United States Patent Application Publication US 2009/0018031 A1 - sequence listing, part 16

SEQ ID NO: 8226 - DNA, 6000 bp, Homo sapiens
aagatcatgccactgcactgcagcctgggcgacagagcgagactctgtgtcaaaacaagacaaaactaaaaaacaattggccggcacagtggctcacgcttgtaatcccagcactttgggaggcagaggcaggcggatcacctgaggtcgggagttcaagaccagcctggccaacacggagaaaccccgtctctactaaaaatacaaaattagccgggcatggtggcgcacgcctgtaatctcagctactcgggaggctgaagcaggagaattgcttgaatccgggaggtggaggttacggtgagctgagattgcaccattgtactccagcctgggcaacaagagtgaaactctgtctcaaaaaaaaaggctggacggggtggctcatgcctgtaatcccaacactttgggaggccgagacaggcagatcacctgaggttgggagttcaagaccagcctgaccaacatggagaaaccccgtctctactaaaaatacaaaattaaccaggcatggtggtgcatgcctgtaatcccagctacttgggaggatgaggcagaagaatcgctagaacccgggaggcggaggttgcggtgagccgagatcgtgccattgcactccagcctgggcaacaagagtgagactctgtctcaaaaaaaaaaaaaaaaatcgtgggccatattttgtggcccctgtcaaagggagatctgcacggtgggatcaggacaggcttaaccaaaaacatgaaggagggtaagggagtgagccatagggatatctggggggtaacagagatataggcagagggaacagccagtgcaaaggtcctgaggcaggactgtgcccagtttaaagaacagatggggagcacaatatagcatgtagtaagccctcaaataagtggttgcatgtaagtgtgtgtgtgtatccacacatgcccgttatattgtcgtatgtaatatatatgatgcttatatattacatataactaacataccattagacagtcagttgctccagggaagagtccattgctgtttttccttgtctgcatactggtgtattcactagtacccaatacatggcagatgctgaaaaaattacttttttttttttttgagatggagtttcactctgtcatccaggctggaatgcagtggcgtgatctcggctcactgcaacctccgcctcttgggttcaagtgattctcctgcctcagcctcccaagtagctgggagtacaggtgcccaacaccatgtctggcaatttttttttttttttttactagagacgggagtttcaccgtgttgaccaggctgatcttgaactcatgacctcaaatgatctgtccgccttagcttcccaaagtgctaggattagcagcatgagccaccacacctggctaaaaattacttctttttgtttgttttttgatggagtcttgttcttttgcccaggctggagtgcagtggcacgatctcggctcactgcaacctccacctcccaggttcaagcgattcttctgcctcagcctcccaagtagctgggattacaagcacacgccaccatgcccggctaaattttttattttttattttttttatttttcttttagtagagacagggtttcaccatgttggccaggctggtcttgaactcctgaccttgtgatccacctgcctcagcctcccaaagcactgggattacaggcatgagccaccgcgcccggccaaaaaattacttcttaaatgaatgaatgaatgctatgtatgtatccttccctgcagcctcaacttccttggctcaagcaatcctcctgccttagcctcccgagtagctgggaccacaggcacacaccaccaggcctggctccaaacttttttttttttttttttagatggagtctcactctgtcgcccaggctggagtgcaatggtgcagtctcggttcactgcaacctccgcctcccaggttcaagcgattttcctacctcagcctcccgagtagctgggattacaggcgcctgccaccatgcccagctaattttttgtatttttagtagagacggggtttcaccatattggccaggctggtctcgacctcctgatctcgtgatttgcccgcctcagcctcccaaagtgctgggattataggcgtgagccactgcgcctggcccaaacttttttttaaactcacaaagtctcttaaaaatattggaattgattgtcatcccgagaagaatgagcggatttctaaaaatctagatctctggcttctcttgaaaaatgagtggatgtggtgcctggctcccttgccatattctgttaatgtcatagtccaacgctgggacagtgttggaaggactgctcaagactgcaaataccaggatgttgggtccttgaggaccatctagaaggctgactatttatttatttattgagacggggtttcgctcttgttgcccaggctggagtgcaatggtgcgatctttgctcactgcaacctctgcctcccggattcaagcgattctcctgcctcagcctcctgagtagctgggactacaggcgcggaccaccacacccggctaatttttttgtatttttagtagagatggggtttcaccatgttggccaggctggtcttgaactcctgacctcaggtgagccgccctccttggactcccaaagtgctgggattacaggtgtgagccaccgtgctcagccgaggctatttagcaagcatgtattgagcacctactggctttcagtcatcaagctcagaagtatctctgtgttaatccaactcaattccccaaaacaagtctgtaagtgtatgccattaggcacacagcctccacagccagactgcctgggttgaaatccgtcttctgccatccactgatagtgtgactttgggcaagtgacatcacctctgtgtgtcttgctttcttcatctgtaaatggggaaaatagtgtaatagtgtttacctctcaggtaacaccaggtaagtctcagatgacagcattttttttttttttttgagactgggtctcactctgttgcccaggctggagtgcagtggtaccatcatagctcactgcagcctcaacctcctgggcttaagcgatcttcccatctcagcctccggagtagctggaacaacaggcacgtgccaccacgcccagctactttttttgttttttgagccggagtttcactctgctgcccaggctggagtgcagtggcatgatcttggctcactgcagccaccacctcctgtgttcaagcgattctcctgcctcagtttcccaagtagctgggattacaagaatgcaccaccactcctggctaattctttgtatttttagtagaaacggggtttcaccatgttggccaggctggtctcgaactcctgacctcaggtgatccccccgcctcggcctccacaactgctgggattacaggcttaagccccctcacccagcccagctaatttttaaacttttagtggagacggagtctggctgtgttgcccaggctggtctcgaagtcctgggcttaagtgatcctcctgcttcagcctcccaaagtgctgagatcacaggcctgagccaccacactggcctcatagcattttgcagaggaagaaatggaagttgaaggaggcgacgtgttgccgaaggtcacctggctaggtctgggtggcaggcggggaaagcaggcgggggtgtgtgggccgccttcccgtgctgacctttcttgggggtaagtgtgtttgcttctcctgtttcctacagatctgcttgggcagctcctgcagaacctggaacagtgaatgggtaggggacactgggcgtgcagaaggcggggggcagtgtggaacatgccttcaccacctccagcttctgctgccggaggctgcacccacctgtgcccatggcctgcacaggcccatcacttcctagcgccttcgacattctaggtgcagcaggccaggacaagctcttgtatctgaagcacaaactgaagaccccacgcccaggctgccaggggcaggacctcctgcatgccatggttctcctgaagctgggccaggaaactgaggccaggatctctctagaggcattgaaggccgatgcggtggcccggctggtggcccgccagtgggctggcgtggacagcaccgaggacccagaggagcccccagatgtgtcctgggctgtggcccgcttgtaccacctgctggctgaggagaagctgtgccccgcctcgctgcgggacgtggcctaccaggaagccgtccgcaccctcagctccagggacgaccaccggctgggggaacttcaggatgaggcccgaaaccggtgtgggtgggacattgctggggatccagggagcatccggacgctccagtccaatctgggctgcctcccaccatcctcggctttgccctctgggaccaggagcctcccacgccccattgacggtgtttcggactggagccaagggtgctccctgcgatccactggcagccctgcctccctggccagcaacttggaaatcagccagtcccctaccatgcccttcctcagcctgcaccgcagcccacatgggcccagcaagctctgtgacgacccccaggccagcttggtgcccgagcctgtccccggtggctgccaggagcctgaggagatgagctggccgccatcgggggagattgccagcccaccagagctgccaagcagcccacctcctgggcttcccgaagtggccccagatgcaacctccactggcctccctgatacccccgcagctccagaaaccagcaccaactacccagtggagtgcaccgaggggtctgcaggcccccagtctctccccttgcctattctggagccggtcaaaaacccctgctctgtcaaagaccagacgccactccaactttctgtagaagataccacctctccaaataccaagccgtgcccacctactcccaccaccccagaaacatcccctcctcctcctcctcctcctccttcatctactccttgttcagctcacctgaccccctcctccctgttcccttcctccctggaatcatcatcggaacagaaattctataactttgtgatcctccacgccagggcagacgaacacatcgccctgcgggttcgggagaagctggaggcccttggcgtgcccgacggggccaccttctgcgaggatttccaggtgccggggcgcggggagctgagctgcctgcaggacgccatagaccactcagctttcatcatcctacttctcacctccaacttcgactgtcgcctgagcctgcaccaggtgaaccaagccatgatgagcaacctcacgcgacaggggtcgccagactgtgtcatccccttcctgcccctggagagctccccggcccagctcagctccgacacggccagcctgctctccgggctggtgcggctggacgaacactcccagatcttcgccaggaaggtggccaacaccttcaagccccacaggcttcaggcccgaaaggccatgtggaggaaggaacaggacacccgagccctgcgggaacagagccaacacctggacggtgagcggatgcaggcggcggcactgaacgcagcctactcagcctacctccagagctacttgtcctaccaggcacagatggagcagctccaggtggcttttgggagccacatgtcatttgggactggggcgccctatggggctcgaatgccctttgggggccaggtgcccctgggagccccgccaccctttcccacttggccggggtgcccgcagccgccacccctgcacgcatggcaggctggcacccccccaccgccctccccacagccagcagcctttccacagtcactgcccttcccgcagtccccagccttccctacggcctcacccgcaccccctcagagcccagggctgcaacccctcattatccaccacgcacagatggtacagct

SEQ ID NO: 8227 - DNA, 6000 bp, Homo sapiens
catgcctggctaatttttgtatttttagtagagatagtgtttcactatcttggccaggctggtctcgaactcctgacctcaggtgatctgcccacctcggcctcccaaactgctgggattatgggcatgagccaccacgcccagccacattggtgttattaatgtaacaaagtagacattggtgtaactttgactaaaggccttaatcagagttttttttttttttttttggagacagagtctaactcttgcccaggctggagtgcagtgacatgatcttggctcactgcagcctctgccctctggattcacaagattctcatgccttagcctccacagtgaaaaccccatctgaaaaaaaaaaaaaaaaaatctgaaatctgaaactcttctgataccaagcatttgggatgaggaatactcagcctgtacttataagtgattttaagtggtcgtagatggccattttgttagaagggaccttgtttgtgctgtgccatgacttgtgatccagtctgtccaggaagcccccttcacttgtacctcccttctttgaggttcatggtgcatgtctgcatgtttgttgttttgtttttttattttttattttttgagcctcgctctgttgcccaggctggagtgcagtggtgcgatcactgcttactgcagcctcgatcttctgggttcaagtgatcttctgcctcagcctctcgtgtacctgaggccacaggcacacactgccacacctggctaatttttattattttttttgtagagacgaggtctcactatgcccaggttggtctcaaactcctgtgctcaagcaatcctcccatcttggcctccctaagtgctgggattataggcatgagccaccgtgcccggcctcatgtctgcatgttaaaagttctgagaattcctatggaaaataaatttgactttgcttaatgcagttcctctaaacttacttaattcctttttctttttttctttactatttattaatttttctcttttctcagaccttgcagggatgaaaggtccccttttctcaaaaccctcttatgatcctctacactctgcaagggcttctgaggacagcaggctgagaaaggccgatcctagcacttacctctttgaagacacttttaaaactgttaacagtatttatagctttaaaagtatccatgttcttaggccagttaataaaaaaaaaaaaaaacagaaaaaaaacaagctaagtgatccctcacaagtccactgagcctttgtgtggtgggtcctgggttaggagggaggcacctgacagcctagttcaacttccttcccgtgtctaggtggggtccacgtcaggccactgggggtgggcaggggatgttccattcaacgaggccgaggggatcgtggtgaaccacagatatgagtttctgaccaaccgtgtgtatttacgactgctttaaaaaaaattcaacacatagccaggtgcagtggctcatacctgtaatcctagctactcaggaagctaaggcaggaggacaggaatttgagaccagcctgggcaacatagtgagatcccacctctaaaaaaataaataaaaacttagctgggcatagtggtgcacacctgtggtcccagctactcaggaggctgaggcaggaggatcgcttgagcccatgagtttgaggttgcagtgagctgtgattgcgccactgcactctgggtgacagagtgagaccctatctctaaaacaaacaaaaattcggcacatatttggtccatcattcgtaaccttaaccatgtttaattttgttgctttatacaacctaacatttcctaaatgttgggagctcatagtttttggaaaatatatgcatctgaaattttacagatttccagatgcagtggaataagtccattttattttattttatttatttattttgagacggagttttgctctttttgcccagcctggagtgaagtggcatgatcttggctcactgcagcctccaccctctgggttcaagtgattctcctgcctcagcctcccaagtagctgggatttcaggcacctgccaccacgcctggctgatttttatgtttttagtagaaatgaggtttcgccatgttggccaggctggtctcgaactcctgacctcaggtgatccacctgcctcggtctcccaaagtgctaggattacagacatgagccaccacacctggccaggataagtccattttagtgtattcatttaagcgatgtccccaaggtgagtccagttcagcccaacgctccaaggggtttttgcacggacggccttcattgttgaagtgcacatcctctttccctgaagcctgctgttagagacagctccccctaccctcactggcgatatgctgtttactccttccctttctttggacttgcagggtttctatgttgcactgagactggtggcctgtgcacagagtggccatgaagttaccttgagcaatctgaatttgagcatgccaccgcctaaatttgtgagtgtccaagtccttcaagttcacattcttctaataccagatgtgtgtgtgtgtgtatgtgcatgtgtgtatgtgcatgtatatttccatgttttctctagccttccccttttattgtggtgaaattcacataatagaaaattaataattttaaagtgaactatttagtggtatttagtgcatttacagtgttgtgtcttcattacctctgtctagctccagaactttttcatccctccgcaaggagaccccatccacattaagtaatcactccttgtctccccctcccagtcgctggcaaccactaattttatttctgtcaatggatttgcctgttctggacatttcctatcaatggaattctctaacatggtcttttgtgtctggcctctctctcagcatcgtgttttcagggttcatccatgttgtagaatggatcagtgtttccatattccatttactggatggaccacatctttatccattcatctctctggacatgtgggttatttccacccttttgactgttgtgaatagtgctgctaccagcattcatgtacaaggatttgtttggacatccgtttttaattcatttgggtcaatacgtaggagtggaattgctgggtcatgtggtgattctgtgtttaactttgtgaagtcttcccttttttgaaagcactttgaaacgtgtatccttttcagcaaacccacccacctatgatttaattctgtgccagccacaaaggaatgtttctctctcttctcagcacgacaccagcagccctctgatggtcacaccgccctctgcagaggcccactgggctgtgagggtaagtgaacgggaatagctccctccttggctctccttcagatagaattgttccagcagttgttctagaattgttctggaattgttctagtttgatgttgttcagaacattttataggatgattgtgtcagctcttctgtctcagtgtgagtggccacagcacttggatgaaacgcctcttctaatgaacaccttttacaaaggctgtggcccttcactggaattgggagttgcctacctggacaactaagtgtcaggagttggattattaaagggctgcagtttaaatcttgcatctttaggtcacattctgtggtttttgctgcttgtgttggttattcagaatagaagaggaaacggtgagagcttgcaagcacgtggacccccaaatgtgtcccttgctttctcgcttctttccagccactttgcatgttaccattctttcctccctgatgttctgattgctttgtgaaaagcctctctcagcacttgaagtgttatttttaaaacagaggatgttgtggctggaaagataagctactgcgtccagaaagaagaaaaaaaacgagggctgtcttctaagtacagaattccttctaaaggaagtgagcatggtccctccaagtaacatcaggcctcctcaccttcccttcactttcagactgtcacatttcctcacgtttatgtggcttaaatcctgacatgaataacactcttgctctcaaataaaggtcccaagcactttcgtcccatgtttacacggttggtttgctcccttcttggagaggtcatgggctgggtgggggtatctgtgcagggagaggacatgaagatatgtcatgtgactgaggagtcatgcagtcacctctgtcatcaagcactttgccagtggcaatcactgtggtgaagggtttctccctgtcacccagcgcattgtgtggactttgaaaaagagctactttgtcatgggaaacagtgccaagagatcttatactttaaaatgtgatggctcttttccaccaggggttatgtccaggcctcactggaagagctgggactgaggggcctggggacctcgcagagaggagtcagggagcacaggaccagatgctgtaattggggtgtactgtggtcgagagagattctgcattccattcacagccacagtcagaaagaacaagcccgaagtgccaagtgtttgtttccgttgtgaacatttctgggcttctgaaggcactgagtcagcaagtccgatggccaggagaggatcccaggcccccgagaaagacctgcagcgctcagcttcttagcaccaacagctgtgaaagcatgcggtgtctgccggtgatctcatctctgtgactgagggctctgtcttggtttttgtcttttaaaaattaaaaaatttttattgtggttgaaagacacatcatgtaacatttaccatcttaaccatttctaagtgtacagttcaggaatgttaagtttcctttggagggtggaacagactggaagccactgcctcactcatggccccttttacgggctgcctgccctatgtctttcagaacagcaggaactgtgactccccatcctaatgctgtaccttccctctgttcatgaagagctattcctatttacgtattaatttatttaccattagaaatggagggcttcctgtatgtggctgggcttggtggctcacacctgtaatcccagcactttgggaggccgaggcaggcggatcacttgaggccaggagttcaagaccaacccggccatcatgttgaaacaccatctctacaaaaaatacaaaaattagccgggcctggtggcgcatgcctgtgatcccagctactcgggaggtacgagtgctgaggcacgagaattgcttgaacctgggagtcggaagttgcagtgagctgagattgtgccactacactccagcctgggcaacagagcaagatttttgtctcaaaaaaagaaaaaaaaaaaaaaaaagaggacttcctgtactttaagttgattttgataattatttgctcaagcactaacatctgctcacacttttgtctttctggtacaagtgggctccttggaggcaggtgagactgatctttgtctccctgcaaagacactgccccaccatgggagactcctgccacactcaggcagcagctaggacgaaggacaagacccggggccagggcctccctcctgaggaccttggctcccagatccgaggttgccataacgttatttccttcagggtatatgttcactttggaaaccaaggggccaagactgttctaagatcattttgtgcttttagccaagggtgatgatgggtccgtggccattttcacttggctttcggtcagagctcggtctggacattcacacaggtgtgctctcctacttactcgggctatttctttccaactaggtggaagaaaaggccaaatttgatgggatttttgaaagcctcttgcccatcaatggtttgctctctggagacaaagtcaagccagtcctcatgaactcaaagctgcctcttgatgtcctgggcagggtaagtgggccacgggcttggttcttctgcactcagtgtccctgctgtgtgtgggcgccactgttctc

SEQ ID NO: 8228 - DNA, 6000 bp, Homo sapiens
ctacatctgattgcctccttcagataaacttttagaagttgtgaatttcagtacgctcatatccacagggtcagagggtatgagcttattgaaatgctcccagttggccgggcatggtggctcacgcctgtaatcccagcactttgggaggctgaggcgggtggatcacctgaagtcaggagttccagagcagcctgaccaacatgacgaaaccgcatctctactaaaaatacaaaaattagctgggcatggtggcatgcaactgtaattccagctactcaggaggctgaggcacgagaatcacttgaacccaagaggtagaggtgagcccagatggcaccatttcactccagcctgggcaacaaagcgagactctgcctcaaaaaaaaaaaaaaaaaaaatgttcacagttaatgacttttttcattcgttggtgtcccagccgtgttgtgtttgtacagtgcaattaaagtattgtattcatgaattcccaccccccaaccaggttccggggcttgcgttcagaactggaacctttctgtatccccatccctacttgaagatgggattaaaaaattgaggtcttctacctatctttgacatgtcaaggttagtcaaaaccaatttaaattggtttcacttttagagtaaacaagacttagtgcaaagccaagcagaactatgaaactcatctctaggtacttctgagataactgatagggttgaatgagttcatatatgagaaagggttttaaaaatttctgccagcggccgggtgtggtggctcatgcctgtaatcccagcactttgggaggccaaggcaggcggatcatgaagtcaggagtttgagaccatcctggccaacatggtgaaaccctgtctctactaaaaatacaaaaattagctgggtgtggtggcacccgcctgtagtcccagctactcgggaggctgaggcaggagaatcgcttgaacctgaaaggcggagattgcagtgagccaagatcacgccactgcactccagactggcaacagagtgagactctctcgaaaaaaaaaaaaaaaaaattccacccgcctgttaaagcaaacataggggtcaaaggagggtggttgtttttgtcacactggctttttctgttaatccctggagccctcacatcccttattagggtaagtttagtaaccctgtgctttaaatggcctgtctctcaggggcttgcttctgacatgtctgatgagcgcattcctgctgttgctcctggctattacaaggtgtcgctgtggaagactattcctgtacagctgtgtgaacctgcctcgtcacggcttcctctgcagtgctcttgaatatcccggttcctgcttaggccacagcagtgagtccagggagaagcatccttctactccctcactgtccaggttggctgaagatgctctgcacttgacctcctgacactaacttccttgccttttcccatggcaagagcaagtcatggactctgaactacttcctctcccttttttctatttattttattttattttatatttgtgatggagtctcgctctgtcacccaggctggagtgtggtggtgtgatcttggctcactgcaacctctgcctcccaggttcatgcaattctcctgcctctacctcccaagtagctgggaatacaggtgcccaccaccatgcccggctaatttttgtattcttagtagaggtggggtttcaccatgttggccaggctggtctcttaactccttacctcaaatgatccacccacctcggcctcccaaagtgctgggattatagatgtgagccactgcacccagcccttcctctccctttctctttggggttcccttcacaaacaggtgaggcagctttttcaagggcattccaagcacaaaagaccttgttgtacctaaatactataagggacctgtcattgaggacgaaccatcacagcaagaggaattatctcgtgccgcatcttcgcataactgacaggatccctggcaaggatgtctcaatgcagaaagttggctaagtgaactgcagtatctaccctggacctaaaagaacttgctaatgttttcaagactacaattcagaggctgtctgatttaatctttgcatttacaaaaacacccttttacgtacattaaatgtggaataaaactaaatatccgtgtgtgtgttgtgtatcctggtgtatatagtattatattttatgaagtatttcattcattccagaaatagctctccagacccatggtgtaccagatctgtagaaactgaaatgcattcatatgtctgggggtgtgtgtaacgctaccgtgtatttgatgaaacttttcattgacttactccacagatactatttttctatctactggggataccaaaaagagccagtgcccttgaggaaccaagtcatgtcagtgcttcttagtttttaaaaagtgggtaagttgagtactttccagatgtttgtttatttttcaagacagtcttgctctgtcacccaggttggagtacagtggcgtgatctcagctcactgcagcctctgccttctgggttcaaacaattctcgtgcctcagccttctgagtagctgggattacaggtgtgtgccaccatgcccggctaatttttgttttttcagtagagaaggggtttcactattttggccacgcaggtctcgaactcctgaccgcaagtgatctgcccacctcggcttcccaaagtgctgggattacaggcatgagctaccaggcatgagccaccgtggctggccccacattttgtttgagacagagtctgttgcccaggctggagtgcagtggtgtgatcttggctcactgcaacctccgcctcccgggttcaagcaattcttctgcctcagccccctctagtagccaggattacaagtgcgcgccagcatgcccggctaatttttgtatttttagtagagatggggtttcaccatgttggccaggctagtctcgaactcctgagctcaagtgatcgcccacctccgcctgctgaagtgctgggattacaggcttgagccaccacgtccggcccaaatgtttcttaaaataacctgacccatgcaaaataaattgcctcctatgtaatactttattaaaaaaaaaaaaagatactgtacatccgagttagaaattaagagagaggcaagaccagaatatgcctgaggaaggctttgcttattttgcttatcagaaatgagagaattatctccgaatgggccagtttccaacttggaccatgtacaccatgtacacaatgcaccgcattctgggaggggcgaggttgggagcagtaaatgacaagtgttttgcccgtgtttcttttctcctccaagtgtgatgtaaaacttttcacatgtgcagaagcacgcaaccatagccacgtgcagaagcagccgtttttgcaaatgaaaatatttcccagaagcacaacaaatacaagactaacaggtgtcgggcagctccaaggcacacatgtggttctcatcagctgtcttcctcctgttttaaatctaggtcttcctgtaacagtgggaaaaaaaagatttctcccgaggccgccgagcttgcctttccatcccgtctcacaagagcatttccaacagagctcccagagagaggggagcaattaccaaggcaataaacagggtggagggaggaggggcgcccttaaacttgacatctgcggttctgggcttaaccccgaagtctaggtgaccttgggcctccgtttcctcctctgtgacgtgtttggttaagagaatgagcatctcagttttacagaatctcaaggcagaggcgggtagaagggtctttcaatcacggggttctctgccggtgggggggcggggggactgtgcccccacaagggacggcggcaatgactgcagattgggggagggggcgcttcggaggccagagatgccgctcaacttccgacagatcgggggacccgccccgaagacagagcgatcccgcccaaatgccagtggtgccgaggtggagaagccgccgcgtagacgcagatttgcaacctccggctttcccagctacggcgggcggcttctgccagaggcgctttgccgcctcacgttttcgcgatcggggtcgcgcgtggcggtgcagacccccgccctgccaccacacccattcccacaccctctgaggggcgggggggccgcggcgacacccccggactccgatgacccttctgcgcgcagaatcacaacgtggacgtctggttccctcgccctcacaaaaaactcggcagctgctcagcctgcgactcccgtcccccagtcacgcgccgggaaggctctcccagaggaaggattttcccgccgccctccccgccccgaggtagccgctgcgagcgtccgggttcaaggactctttgcgcgcgcgcttccgtcagaaagccccgccccgtgacctggacgggggccgttgccccgcccaacctcctcccaacggctgcctaggccgggcggctgggcggggcgtcacgggcggacgagtgcgcctgcgcgcgcttgcgcggaggcgcggggcgtggcacacgggcagccccgcccaggcctggcgtctccgcccgccccatctcccaacctcctcagcgtggcgccgacgctgcgtgcggcgcggactacccagagtactccgcgcgggggcagctcactggagtttggttctcgaggcggcggcagcgagcggcggcggctccggcggctcctcctcctcctttggtggcggcggcggcccgggaccgagacccggccccggctcccctctccgccaccccgcgcgcccccaaccccccggcgccgcggggaacatgcggctccggctcccggaggccggcgagtgagtgacccccgtcccccgcctcagcccgcccgcccgctggcccggccgcaaccccccgcctcgcccaggcaatgacagcggctccggcgtctccgcagcagatcagggaccggctgctgcaggccatcgacccccagagcaacgtaagtacccgccgcgcgagctgggacggaggccgcatgggcccgggaccctccccctctcctgtacccctcgcccaccgggcttcgggggacccgtctggcgcccacctcccctcgagggccgctgccatccctgcctctcgcttctcgggcccgggccgggggcaggtcgggcagcccggcagcgctcggtacgtgaggccgaggcttccgtgcggcctgggcggaggaagcagacgggggagctgaggctagagtttttcctccctttctgctccagctctacgaccctcactgctctggacgaagcttctctgcctcgccctccctccgggacccgagacccccgggaagccctcccggagcgggaaggggagggagaagggctgtgaagcaactggtgtccggggtatgactcggggaacctatgtctcccatgtcttggcctcctgggtgatcagggaagtccttcttccccctcctctcggctggcagcaccttcctggcttcggagagaacccccagtctgttttgcccctggccgggtacctagggtacgtggagagtctgtctcccttctgtgactagacacgcctttgccaaaaccctcttggggtcgctgccgacgatagatgatctcggggagggtgggatccttcctgttgcctttctgggcctcagtacccattgcgtctctgaccaagccagagctccattttttaggtagtgaattaaagaggacttttctctcccgtttacccaagagctctgtttcagtaggctctttccctcacctgggggtctcagcctggtggtttttgacccagactgtcggggttaactccagagtgtcgcttcctcgggtgcccctttgctgaggctactgtttgcggagggaccgccccctccccttccgtgtgtgtgtgtgtgttgtt

SEQ ID NO: 8229 - DNA, 6000 bp, Homo sapiens
taatcccagcactttgggaggccaaggcgggcggatcacgaagtcaggagattgagaccatcctggccaacatggtgaaatcctgtctctactaaaaaaaaaaatacaaaaattagctgggtgtggtggcgagtgcctgtaatcccagctactcgggaggctgaggcagaagaatagcttgaacccaggaattgaaggttgcagtgagccgagattgtgccactgcactccagcctggcgacagagtgagactccatctccaaaaaaaaagaaagctgtcacaggtcaggcttgttctaggtgcagggacaaatccatgtaagaggtgaacagtaaccaaatcatgccataaacaataaacagacctgaagtagtcaccaagaccttcactgggaggtgggcacccagctttcgggaagagcaggtggactgtccctgctctggtggcacagaaagtctctggagaggagagactgtttagcctcactccaaaggctaggtcagatctaactaggcagagaccagagcctgagccataaaagccattctgcaaatgcagttttcttagtgctgaatgagctgttcaggctcccgcttggtttcccctttaaggtgggaagctcattctcccacaccatttttcagccccaaaggaaagttgctttcctagtcagacaccttggggtggcctctgcctgccctgcaaggacatctcaagtctgttccttccttccttcctccctcccccccacccttttttgtttttgtttttgagacagagtctccttctgtcacccaggctggagtacagtcacctgatctcagttcactgcaacctctgcctcctgagttcaagcaattctcctgcctcagcctcccgagtagctgggattacaggtgtgcaccatcacgtccggctaatttttgtattttcagtagagacggggtttcaccatgttttgaccaggctggtcccaaactcctgacctcaggtgatctgcctgcctcagcctctcaaagtgctaggattacaggcatgagccactgcacccagcccagttctttagaagagaggcctccagacctaggaagaagagggcccagactggggtgggggcagcagctcagggcagccctcgttagagacgaggtctcactatgttgcccaggctggtctcgaactcctgagctcaagcgatcctccagcctcggcctctcaaagtgctgggatgacaggcatgagcccagcccctttctgtgactcttatgttacctgtttattatatgaccaggtctaggtgctcctctagggctggcccatccatcctgaagcctcagtctgacccagcataagagtgactattcatcccagcagggaaactgagacacagactctgttttcccagctgcagcaaagagtggcagggcctttgcccacgaacctaatggcaggcaccccagaggacagctgctgatattgactaaatccttcatgtttctccctctactagaagccctgcaagcatcggcccattttccaggtgagaaaactgaggcccacactgaggaagccagtgcctcagtgtagacttggctagtccagcttcaggttggggctgctcaaggccagccctgtcccagcccctcccagagaccggagagggtgttcaggaaagcaactcaacccttcactgtctctttcactgttgctttctgcccacacaaagggcaaagtctgcctgggcccctcgcccagccgcccctgtaaaatagccacagggccccacttgtgcacttggcaaactctaagcagcttccagaagccttggccatgccagcacctttcccagatacttttttattttttccattattttgttggtaataaggaaaagtcattttttgcacagaacagacggtattttctttgctccccacaatgttcaagcatttcgtggcttccggcctgagaacagagccaaatccttcccttgtgcagatgcctcgtgaagttagaagcagccagggaaaccgagtctgtgcctcagtttcccctgtgggatgaacagtcgctcttgtgctgggtcagactggggcttcaggatggatgggccagccctagaggagcacccagacctggtcatgtaataaacaggtaacataagagtcacagaaagggtctgggctcacacctgtcatcccagcactttgggaggccgaggtgggaggatcacttgagcttaggagtttgagaccagcctgggcaacatagtgagacctcgtctctaaaaataaactttaaaaaagaaaaaaaaaagagtcacagggattgggacaggggagggcaagatcccttccaaggccagggtagtcagagaggcttcctggaggaggagacagggtggtggcgctgagcctggaaggacaaggcagaagagatgcctgcagcgagggcattccaggtggaaggaacagtttgggcaaaggcctggatgggggaagactcagatcttggcgcaggagtcaatctccaaaaacaacctgacctggaattcacctaaaggtaatttgaatgtaatgtaaccgccagctcagatatactattcttcttagaaggaaacagaaataaaggaacagggaaaggagacaggagcagaggtcttggagatgaaaagcaaaagcctctctgaagttgtcaaaacactcaagtgtcggccaggtgtggtggctcacgtctgtaatcccaggactttgggaagccgaggggggcagatcacttgaggtcaggagttcgagaccagactggccaacatggtgaaaccccatctctactaaaaatacaaaaatcagccaggtgtggtggcatgcacctgtagtcccaactactcgggaggctgaggcaggagaattgcttgaatctgggaggcagaggctgcagtaagccgagattgtgccactgcactccagcctgggcaacagagtgagactttgtctcaaaaaaaagaaaagaaaagaaaagaaaaactcaaatgtaagatcagagctttagggcgccacaggccttggttccagggagctgcaggacctctgtccacaaacgaaccaacggcgccgcaccgtgtgattttggagacggtgccagagagggggcggcaccaggattgacaagtgggacacatgggcttggggctggggaggtggatcctagttcaactccggaaggatgctctcctggcaagtgtgggaagggggtgctccctgtgaccagaggtgacaaacgcaggccagtggaggctgaggggatgcaaccatgcgttggagacatttcctcagcctttggattttggaaccctcaaacaacagcaaagataaccttaatccaaccattgtgggcatttttaccatcgtcttgggagggacagaggtggacagacgtccctgcttagggatgggacgggcaggggaacagaggcttctctctctttgtcttgcttcccgttccctcccgaagttgatctcttccgtttcctggcaacacccattgagcacttactgtatgcagaccctgagacccactgccccctccccaacctcactgggccacccatgtcagcccgggagggacctgacctccctcacaggcccaaagttatgacctcaggtagtggggacagaggcagctgtctcctgagaaggtgacaggagggtgaggtcacatcgctgtccgtgcaactctctccatctgcttcctatctctccgcctgtctcccccgtgtctctgtttctgggtctctttctcatcccagatgtccctctccgtctgtctctctgtccccaccctctgctcccaacccgaccccacgcaacccccccccccactccccctccaccgcccctaaccccctccctcaatcctccgtcccttccccagtcccggcccccgcccctcccccttatcccctcccccataccctctcccagtgcaaaaagccggcagggggcgcagcggggcggccttggcggcccggggaggcggggcgggcggcggccgcgtcgggaccggccgcgatgggaccggaggcggcgcgggcggcggcggcgcagacaaaggcacgggcggcgtggagggcggcgcggagggcgcgggcccgggagccagggagcgagcggggcgcccggcagcgcggagtcagcgccgcgggggccgcacccgactcgcgcctggacactcgcggggcgccgacctggcagggtgagcccggcctgccgagcctgcgctgggagcgcgggggcctcgaagtcccagggccaaggggagggcgtgggggttccccagaagtttcggacccgggactgggagcggcgcgaggggtccccaagttccagggctggagggagcgcgggggtcccgaagttctggattcagggtctgagaggggactgcgtgggaggttcccaaagttctggacccggcgttggaggaggctgcgaagaggtccccaaagctgcggacctggggtggggtactggggtgggaggggtccggacgtcccggacccagggactggaggggtggcagggggtcctcgaagtttaggagtctaggacaacgcggaggaccggggtcccggacccagttagaggaggagtcacgaagggagtccccggagttaccgacctggggttggaggaggcagaagaggtgtcccccgaagttctggacccagagacagggggcgtcgcgggaatctcggaagttccagggtcagagcccgcgtcccggagttggggcgtgcactgggtgtcctgcctcgggtggggatgggatcctgaattaatattaacccccccgtcccccgcactcgggtgcatgggatggggcctcatccaccggccagattggggatcccgggcaccgggcggtgtcggacccccctccgggagccccgtggccggcggcatccgaggcgcatgactagttggtgagtaactttccccaaacgctgcaagtcgcagcaggagctgccggaccggaagggcctgggttccggggacccctgtgttccccaactcccacccggcgcaggacccgcccccagtccaggccagagctgccgccccacccccactcaggggctccggtttcagaccctgtgaccaggacagcagctgcccaggacaggatagggggggcatcccccctttgaccacagaggccgctgggccagggcctcccctcccccacctgtcttccccctcctccaaactcctccttggtcccctgcagattcggggttgctgaatggcccaatggggaggttggggagccctggtctcccagtgtggattctgctctgccctcatggtgggcattgggattggctgtttgtctacatcttgtctttttaacttggctgggggctccctggggatttggactctggacttcaaggtgtgcttctgccctagggtgggagctgctgggggtggggtccctctgcagggtgtagtggggaactggtctcctggtactacacacctctcaacgccccattttttggtggagagccccgctctggccagtcatgggtgaatgtggtggaaagaactcagcagagatttggcctccacagctcagcctgggatggaggggacttcacgggggtgcaataaccaggacaatgagaaatttacatctggatgtcagcggccaccaggctcctctcagagggccatctcctgtacagggtgttgtgggggcttcccctagacaaagaaagatggggtctgcttgctctgagttatctataataattatcttacctttttgtttctttttataatttctttcttttttgagacagggtctcactctcttgtccaggctggagtgcagtggcctgaccatagctcactgcactgcagccttgacctcctgggctcaagtgatcctcccacctcagcctccccagtagctgggacggcaggcacatgccacca

SEQ ID NO: 8230 - DNA, 6000 bp, Homo sapiens; identical to SEQ ID NO: 825

SEQ ID NO: 8231 - DNA, 6000 bp, Homo sapiens
gtggtggcaggcgcctgtaaattcagctactactcaggaggctgaggcaggagaatcgcttgaacctgggacacggaggttgcagtgagctgagatcacaccattgcactccagcctgggtaacaagagcgaaactctgccaaaaaaaaaaaagaaaaagaaaagaaaagaaaagaaagaaaatgaggtgaggggcacttccacaagagcgtgcaacattcaaaatgatttgatataataaccaaaaaaattcaaagcagggtcccaaacagatatttgtacagccatattcataacagcattactcacaatagcccagaggcgaaacaaccccagtgtccattgatggaaggatgaatgaataaatagaatgcggtgtatccacacaatgggatattgttcagcctttaaaaggaaggaaattctgacacatgctacatacaacatggttataccttcgggacattatgctaagtgaaataagccagtcactaaaggacaagtactatatgacttcacttatatgagttatctagagcagcggtcctcaaccttttgagcaccagagactgattgtgtggaagacaatttttccatggacctggggagtgggggatggtttcagatgattcaagagcattacatttattgtgcgttttatttctattattattacattgtaatatatgatgaaataattatataactcaccataatgtagaatcagtgagagccctgagcttgttgggtttgttttgttttgttttgttttgttttgttgagacggtgtcttgctgtgtcgcccaggctggactgcagtggtgtgatctcagctcaccacaagctccgccttccgtgttcaaggattctcttgcctcagcctcctgagtagctgggattacaggcgtgcccactatgcccagctaatttttatatttttagtagagatggggtttcaccatgttgaccaggctcatcttgaactcccgacctcaagtgatcctcctgcttcagcctcccaaagtgctaggattacagatatgagccaccacgcttggcccactgagcttgttttcctgccactagatggtcccctctaggggtgatgggagacagtgacagatcatcaggcattataatctcataaggaatgcataacctagatcccttgcatacgcaattcacaataggattcacgctgctatgagaatctaagccactgatctgacaggagacagagctcaggtggtagtacaagtaatggggagaggctgtaaatacagatgaatcttccctccctcacccaccgctcacctcctgctgtgcggccccgttcctaacaggtactggtaccaggccccgggggttggggatccctgatctagagtagtcaaattcacagaaacaaagtagaatgatgcttgccagggggtgtggggaggagggatagaagaaaggggagttgtttgatgggtaaagagtttcagttttgcaagatgaaaagttctggatattgattgtacaaaacatgaatacacttgatactactgaactgtaaaagaaaattaagatctgatttgaaagaaagagatattgatgctgcaggaagaatgcatgtgaaaacaacaaaagaggccaggtgtggtggttcacgcctgtaatcccagcactttgggaggccgaggcgggtggatcacctgaggtcaggagtttgagaccagcctggccaacatggtgaaaccctgtgtctactaaaaatacaaaaattagccaggcatggtggcaggcacctgtgatcccagctacttgggaggctgaggcaggagaatcacttgaacctgggaggcggaggttccagtgagccaagatggcgccactgcactccagcttgggcaacagagtgagactcggtctcaaaaaataaaaataacaaaataacaaaagaatatattggcatacaatctgcatgatccaatttttgacaaggtcatgactagagttccaaaagaaaattcacaattctgataatgtgtgaaataacatttatgcagaacatgaggactggaagcaagggatgacccacattacttagggaatatcttaaaacgcattacaattatgacttgtttgattaatggaatcatttccaataaggcaagaaatactaaatacttctcaactatttgggccacaaaccctagaaggtacccacatttagtaaactgcttatgaaaatcaaatatgaaaaaaaattttgagaggccagatgtttgcaaacatgattggaaatggaaccatgcgtggaaactgatggaatgcaacagaagatccttgagaacattctaaggcattcagaattctaaggcattcaacagactcgtgaacactcagacaccaggcagatgaagacagccagatggatgctcccaaaaggtacagggagctgacacttcaaagtctccaaaagtacctgaatgataccagaatcaaaagtgcacacagcactcacatactcatgcattcaccagactggtctgcctaccctgtaagcctcaatccctgaaactgacaactgctgtgaagaccttcagtgcctccaccttccacgggggcttcagaaaaaccatcctccttcctggccagactccactctccagagacccccgagcacaaccctgccccggtctggatagacccccactgagagcctggggcagaaactggagaatcaggaaggaagaataatttgtatgcaaaacaggttctgggaagtgaggcctgatgggaagaggagggatttggcaagatgacagtaagggaggacatagtttggtgagtgtccatagtggctgctgtcaaagaaaaattgcacaggcaaggcagactttattcaaggagattgcaatagggaaagagactgaactcaactccactgaaacaaatatgctagggtggttaagccctaggtgagttaatggaaaaatattggaggacaatgggggaggtgggtcaatgggatgtgtccatcacatggagttattctgtcaatgggatgtgtccatcacatggagttattcctgagtctgcaaatgtttttctctgtgattgggccatctgagtttgctgattgtcaattatcaaagtgaggctcctaccctcccacagagactgggcgataggggtgctatctcccttgatgatttcaaagggataattcccaggtccttgaaaaagacattcctgggttgtaacgctggcaagagaccaggagaagatttacctacatttcaaaggcgcagagaaggccgggcacagtggctcacgtctgtaatcccagcaatttgggaggccgaggcgggcagatcacttgaggtcaggaattcaagaccagcctggccaacatggtgaaattctgtctctactacaaatacaaaaattagccaggcatggtggcacatgcctgtaatcccagctactcgggaggctgaggcagaagaatggtgtgaacctgggaggcggagcttgcagtgagccgagatcacgccactgcactccagcctgggcaacagagtgagacgccgtctcaaaaagaaaaagagagggggtgcggggggagcagagaaagaatttgcaattatatttggccctctgtgtctatggggttctgcatccacaggttctacctccacgcattcagtcaactttggataaaaaatattttgaaaccaaaaaacaataaaaaaaatagaaatagaaaacaataccgagggatgactgtacaagttttctaaagtaagtgtcctacaaaaagcgtgatccagggccgagaggaagaaacctgtctaaagtttagtcgatctgaggggaccattaaggctcttttggtcaccagtgttacgtggactctgccatccagatgtgggtctgagactctgggtgtctgcacatggctggtgcccactctgtggctagtatccactagcctgatccagcaggcagcatctccaggcagcaagaagtgagacaaaccaggaggtgctagcctggggtctctgcctcagcaccaaccacctgctggggcctcctctggacctcctcacctgctgagtgtctgagcatccacatgtgtctgcctgtgtcctcgggggacagtgaccctctggttgtctgctgtatctccatcttcttgatttcattcatttaataaatgtttctgaaacacctgggggcatgtcgtgtctatcggggtgtccctcttcacctctaggtttgtctgtgtgactacacagtcacatctgttcacagcaggctgtgtctgtctttctgcatctcatgtgtaattgcttcctcgaaggcacactctctctctctctcttcctctctctctgtttctcttttgtgtctgtctctccctgtatgtctcttggtgcctctctgtttgtgtcttcattcattgattcattcgttcagtcatacggtatctcagacattcctggaggcccccgaagagttcacagcccggtaggggagacagacgctagcccagcctagtttgatcagggctgggagacaggaaggtgctggaggctgagggtgtgtggatgagtggggagatggggttcagagaaggtttagatgatgggacgatgaacgtgtctttgggtgtggagacatcccaggattggaagctgtgtgggtggtgtgtgttggggtagggggagggaagggaagtcaaaaggccatatgtgccaccctcagattagagcagagtgctgggaggggtgaaggaagaaggccaacaagacaccaatcattcaaaattaagggttccagacttctagttctctcctccctcagacccagaagtgtagatctccagcaactgaggatcaccctgtttccatcacgattacctaggaagagacccgcccacatagggagggtgggacgaagaaatactggccaggctgggtggccgggatgcttaggactcagtaaggagaaccagccaggcagcacatcacagcgggaggagctgtcccaggtggcccagctcagcaatggcaatgggggtccccagagtcattctgctctgcctctttggggctgcgctctgcctgacaggtacgcaaacttctgaatccagtagtgagaaggggcaggtggcctggactcctagatctgagggaggagagactgggggcctggactcctgggtctgagggaggaggggttgggggcctgatctcctgggtctgagggaggagggggctgggggcctgaactcctgggtctgagggaggaggaggctgggggcctggactcctgggtcttggtgggcaggagcctggaggctatgtcattttcatttctcttccctgcctttgttcttctcccatcagtcatttttcctggtgtctctcttcccaccatcccagcctttcttctcttccttgcccaacccccaattcaaaggtatttccagggagccctcaggactctttccgaaactggcagaaaccctggcttcaccttcaggcaacctctaccccattgtgggctaggacaggaacataactcatttcagaatggaagtggttacaaagacagggaattagaaatgtagaaaggaggctattcctgcacacaaccaaatctgtgtgtttctgctccttaatgggagagagtttgatttctgtatgtgtccaggttcagtatgtcctatgagtctctgtgcttgtgtgtgtttctctgtataggttttaaagtcttagtctgaacaaatgcgtttgtgggtctgtttctgagtttgctttctttgtaaaagagatgcgtgtgtaattttgtgtatctgtgtctgtgtttatgtatctgtgatttgtaagcctatatttatctctatgtatatatgctcagtttttgttttttgttttgttttttgagacagggtcttgctctgtcgcccaggctggagtgcagtggcacaatcacagctcactg

SEQ ID NO: 8232 - DNA, 6000 bp, Homo sapiens
ccaggtcttggagtgggatggtgtcctcgggggcccagcactgagcgatataatgggcgtggaagcggagggggtcacctgggggaaggagagaggcactgaagcagtgaccaatggcagacggctggacgccacgggaacgaccactgggaggagatctgagatcatttcagccatcactatagatactctaaaacagatgctcttggacacaactattccacttctaggcttttttttttttttttttttgagacaaagtctcgctcttgtcccccaggctggagtgcaatggcacgatcttggctcactacaacctctgccccctgggttcacatgattctcctgcttcagcctcccgagtagctggaaatacaggcacccaccaccacgcccagttagttttagtatttttagtagagatggggtttcaccatgttggccagactggtatcaaactcctgacctcaggtgatccacctgtcttggcctcccaaagtgttgggattacaggcgtgagccattgcgcccagcctgatgtctaactacttctaagtgaatcttctggatcacagtaatcatttaataaaagtcgttaaactgcttgcccaatgagttcaggagctcccaaatgtttcctgtctgtctatgaatttcagaggctaagagaaagtgagacaaaaaagaaaaatgcagctgggcctataattccagcactttggggggccgaggtggaaggattgcttgagcccaggaatagggaccagcctaagcaacaagagaccccacctctattaagacaaaaaaaaaaaaaagaaaaacgcagaatacattgggatcgtatggaaaggcacagcaaccagaggccccaacccatactcaccaggatagaccaggaagtcacctccgaacttgccagccgcactgaggaagaagcctcgctcccacaggtctctgtagatactgtagcgcagctcgtgggcagggcggccggcgtggggccagtctttagactggacacgccagtccaggggcctggccttgaccggtcgaggcctggcagtggccagctggacaaggagagcagatctgggcaagggggctaccccatttgagggtcctgcttgggaagacgaggggcctggtggggagtacagagaagagtttggtaaattcaaggggtaaagtcttctcaccctcagggagacccaggcactggattcccagctaaaattcctaaaagatctctcctctccttcccgtggtccctggactccacctcccatgctcaccagcttcctcctgctctcccgaagcctggccatcactggtctcatcctctttggcagcctggctcgagccggcctcctggcttgagctggcccctgaagcctgttctagtttctgcttcttagcagcctggccctccgtaatcttctccaggagctcctgacgacgggtctcccgggcctcagctgccaaggcgctctgctcctggaagctctcctcttgctggcgcttgaaggatgtcagggcctgagaagcacacttcgctggaacctccaagcttatggtcccttcagaagccaggaaacttgactcccaggtcccgctcccaccgaacccgagttcgagccccgcccccttaccaggctgtggtgccgagagtctggacgcggggcgctgaccagagtcacggcgccgatctcggccaagagccgcgcctcttcgggcatcagcagcagcgggaggcccaggcgcgagttctggcggggcccgcggggcagggcgcctaccgtgcggccccccacacccaggcgctcccggagggcctgcaccgcctcggctccccacaccagggagcggccgttcgccacctccaccaccagcatcctcctgcgggagccgggaggcaaagcagttaccgaaacagctgcgcgccgcagaccgctgcagcgcacccaaagcctccggggtctcggcgaagccccgcccctaggcctcagggggcggggcctcgctcagccgccgttcaccacctgctgggcccgagcgccaggccccgcccccgggcgatcccaccaggcctcgcggccgccggagacgagacgccggagacaagcccccgaccctcgcccctcgccaagcccccagggtcccgctctacccttgtgaccctgcggtcggcacccgctctgtgcccgcactgccgtacctaccattgcgccttggagcgtgaaaaacaaacctccgcaagcgcggcgacacgcccccttacaaaggtccattttggcaccaccctcttgcaaagtgggcgtcccccttcgggtgttcccgtcagcggtcagaagctctggaggctaaggcaccgccgaggccacaccctcttccggacgctcgagccttcgctcctcctctttccgaacgactgtgattcggctttcggacctcctcgctctcagactcccacagtacaaaaccctgccccctcccgagcacaggaagttcggcgttcgggcgtcctcggctccaccgaatccgcagccccgcccccttcccgaacgccagcaatttgacgttcgggtgttctcggctcggccgaatccgtagccccgcctcctcccggacgcaataggttcggcgttcgggcgtcatcggctcccggcagcctcgcggcctgtggccccgccccctccgagcgccagcgcaccccagttggggagttcccgccctacgaccgaaccccacagccgaaagccccgccccctggacacccgccgtccactctccgctcgggcgggctcaccccaattgggagcgctcagtccgcctccttgcctcccttcagaatgtcccactgtccaccgatagaaccagcgagtcacctcataaacagtaattcgcagtcgaggtggagccacccactgcgcaccgcgccacgcgctccttgctccaccccctcatgccgacaccctcgtcaacttcgtcatcccgccccatcagcgccgcgggaagtcaggtcccgcccctcgcaggaccgaagccccgccctcctcccgcgggggccaccttggctccgccccactgagcgcacctccctctgccgcttcctctcctctacttgggaacttgaggatcgtcaccctggcccggtcccgtaggcgcacgccggccctcggggttccgcccctttgagggcaagtcgctttcgccccgcccccttgtaaatactcatgggtatctggcgaacctgttgactccgcctatcatcctagcgtcacttgtacccaactatctacgaagtaaaccgaagcttgtggccccacccacatccggccgagtctgtggccccgcccacatcggaacagtgaccctaaggactcgactacctccgaagaaagccgaaacatgtggctccgcccacactggcctcagctctccgttctcgactattgccgaagtgagccgaagtttgtggccccgcttccggagaactcaagctcccgattgtgcccgaaggaacccgaagggagaccccgcctcattcctcacggcgagctccagaccccgcctcctttccggagcccgtctgttccccttcgggtccaaagcttttggctcctccttgttccgagcccgaaggcccgccccttcacgtactcggagctcggatcccagtgtggacctggactcgaatcccgttgccgactcgcgctctcggcttctgctccggggcttcttccctgcccgcccggggccctgaccgtggcttcttccccggcctgatctgcgcagcccggcgggcgcccagaaggagcaggcggcgcgggggcgcgctgggcgggggaggcgtggccggagctgcggcggcaagcgggctgggactgctcggccgcctcctgcccggcgagcagctcaggtgggccagggtggcggcgcccagtggcgaggcgaggttacacggcggcagggtctctgcgggctggcgggtgcggggcggccccggaggcgcgttggaactcggggctggcgcaaccgcctgtggctctgccggggatgcgctggggtgcgcgggacgggttggggctgggcctgggcctgggcctggggaggggagggtgttcgatccccgggttctcagtaggagaggggtgtggagctccgaaggaggtgcaggttggagacccgggctcctctgggtggtctcgaagaagggctggggggtccggatatctggtttcacaagggccgggggatgggggatccaaagagggggtctgggttcctggatcctcgctggaagagggggctcggaggtctagattcctgggctgtcgaagaggaagggtccgggaggggtgccgtttctgggtttttaaaagaggggcgtcttcaaatctgggtccccagtatgggtgcggggagtagctttgatttctgcgttcgcaaaggaggggcttgggtgctgggagatccccacactttcctgggttctccaaggacaggagagctggaggcctgtgcgctcaaaggaggggctgggggtggattcctgtctcctccaaggaggaaggggctggagtccgggttgctaggttctcaaaggagaggagctgaggctcatactccatcatcctcaaaaactggggtctagaaggctgggttcctggatcctcgaagagggaggaggcagggggcctggattcctgggttctcactgtgaatctctgcccctcccccagaccatgtcgcctgaagaatggacgtatctagtggttcttcttatctccatccccatcggcttcctctttaagaaagccggtgagtcaggctccctccccagtggaaaataaaggggggggaccctctggaaggttccaggcttatgctgtcccttccccctgcaggtcctgggctgaagagatggggagcagccgctgtgggcctggggctcaccctgttcacctgtggcccccacactttgcattctctggtcaccatcctcgggacctgggccctcattcaggcccagccctggtgagaatttggtggagggaggagagggagaggaggggagagggggaagcaacctgtttcctctttgagtctttttcagcttctgcctcatctctagctgtctcttgttgatcagctcatttctctgtttcatgtttgtttgtttgtttgtttttctttctttctttctttttgagatggagtttcgctcctgttgcccaggctgcagttcagtggcacgatcttggctcactgcaacctccacctcccgggttcaagcgattctcttgcctcagcctcccaagtagctgggactacaggcatgctccaccacgcctggctaatcttgaatttttaatagagccggggtttctccatgttggtcaggctgatctcgaactcctgaccttgtgatctgcccacctcagccttccaaagtgctgggattacaggcgtgagccaccgtatccggccttcatctgcttttctttctcccctgccttctgcgtctggtccctgtgtgtttgtcccagtccgctacatccatgtcatggagagaggtggacagtgtgtctgctggcctggccaccgttcatattcattcatatccacctctctcttcttgagccctggacctcggaaataaagaaaaagtggaggattgcagggtcttcacctgaagcttctcttaacctcattctctgttggtgtgtgtttctatgtggctgagcctcttctcccactgtttcaatcatactcattcggtccctacatccaccctcctgtcctctctgcccttctgtgtttctgtctctaaacgaatggggagagctgggggaggattggtggctggactcgtggagtgaatggccaaggccgagacttctgtgcccaacacagtgcgcctcctgcttttgcccagctcctgccacgccctggctctggcctggactttctcctatctcctgttcttccgagccctca

SEQ ID NO: 8233 - DNA, 6000 bp, Homo sapiens
ccccagtcacaggaaggaagaactaagcctcatggtgacttcctgggagatacgtggtaagaagccacaagacggttgggactgagtctctgcgcaccgcatcctgagcctctgcattctgcacagcggggcgggcgcaggcagcacggtgccccttaccatgctttcttcctggactttcccttgaccagtcttggcacggcaggcgagggattgagggattggggctgggaggtggggaagacagctctctccctgggcccatgtctggttagatcaatgctgtgggagcttagcgatcgaagagggagcagagatgacggcgggacggcattgtctgcccaagcctcaggcttcgcagcccaggctgggaccaagagcttacagacgtcatcgagtgcagattttgagcgacgtactgagcattgtaaatccagatttctcttccagagctgagtctgggccacaggacctggacacaggagggtcagtctttccggtaatggtgagggtctgtcttcttggagcagcacagcggactcccaccaggacagtggatgctgggtacggaagggctgggctgaggacagtggatgctgggtaccgaagggctgggctgagggggtcactttggcagtggttctggagtctaaatttctaagggcctggaactcaggagactctagatgctgattcttttctggagaacttctccagagtcaccatcctggcttgtgcagactcaacattccacctgaagagctctgggaacctctggggctgggagccttctgggcctgatgagttctgttgggatggagaagatgatcttgaagttaaagatttcagtgggagtccaggaaaacgtcgcagctgtccatcatacccacaacagcaaacgactcaggactttgccaaggtcactgcggcagccaaaaccacagctgtgatctggggccggactcatacccaggggttgtctgggttcaggttctgcacccccggttcagagaaagaggaaacggagtgggccgtgtggaccccgtccttcatcgaactccagaactaagggaactgggaggggagaaggccgtcacccttgcacagagctgcctccttcagttctagtggtttctactcctctctgcaggttagctaagacgtgcatgggttccagagggaatatgacaatatttctctttaatattacttgaacctttggttttgatttccttctaagtacaggggagtcaatcaccccacatggtccatcaatcaggtgtcacaacatcatgctcctgggctatacattctcaggtacatttcttcttgagattatttttcacgtgaggcagaaatatgtggctgctcaccagaaaaaaaaaaaattctgtacttacccttacagtgcaagcattggaacctctgggaagtggctacccccaccaagggactttttccctggtcttgttgcatcattgtgtgactgttcataacactatttatagccaacaattctggacagaaatgacatgtgtcagcaaattttgcaagtgcacagatatattctgtttctccttctttcttgctgtttgaagtacgggacgccattgcccaagggcatgatgggagcacaatggaggaagcgggtgtccctgagtcatcctggggagaaaattcaaattctgccccagagaaaaccgcactggtcatttacatgagtgaaaagccaaatcccattgtgttaagccattggtgcgatctcggctcactgcaacctctgtctccctggttcgagctgggattacaggtgtgcaccaccactcttggctctcactcttgtctcacaatagtcgtgaaataatttgtgatttgctatttgaccctgttcccataatcattacactaagagctaggttgagggcagggactggatctgttttgttcattcctgaatctcaaacaccaagcgtataagaggtaattgataaatattggtctatcgacttatttattttatttatttatttatttttgagacggagtctcgctctgtcaccctggctggagtgcagtggcgcgatctcggctcactgcaagctccgcctcccgggttcatgccattttcctgcctcagcctcccaagtagctgggactacaggtgcccgccaccacgcccagctaactttttgtatttttttagtagagatggggtttcaccgtgttggccaggatggtctcgatcacctgacctcgtgatctgcccgccttggcctcccaaagtgctgggattacaggcgtgagccaccacaccaggactggctttttaatttaattttgtttttttaggacagagtttcgctcctgttgcccaggctggagtgcagtggtgcgatttcggctcactgcaacctctacctcctgggttcaagcaattctcctgcctctcagcctcccaagcagctgggattacaggcgcccgccactatgcccctctaattttgtatttttagtagagatggggtttcaccaggttggccaggctggactcgaactcctgacctcaagtgatccatccgcctcgaccttccaaaatgctggtattacaggcatgagccactgtgccaggccagttgatcgacttttaaagaaagaatattcacaaatttagatttagagaagtttataaggaggccgggctcagtggcttacacctataatcccagcactttaaaaggctgaggtgggcagatcacgaggtcaggagtccgagaccagcctggtcagcatggtgaaaccccgtctgtactaaaaatacaaaattatctgggtgtggtggtgcatgcctgtaatcccagttactcacgaggctgaggcatgagaatcacttgaacccgggaggcggaggttgcagtgagccaagatcatgccattgcactccagcctgggtgacagagtgagacttcatctcaaaaaaaaaaaaaaaaagaaagaaagaaagacaagtttataggggaagtggcttgtcaaagttctctgaggctgtgggacaggaagtcacaggagaagctcattctggctgacttcccagctggtgttctgcacctctatcagtatcttaggaaccaagttaccacgacacacctattagagtggccaaattctaaaacgcagacaataccacatactggcctactggcgaggatgtggagcaacgggaactctcattcattgctggtgggattgccaaatggtacagccactttgggagacagtgcggcaatttcttctaaaactaaatatagctttgccatgtaatccagcaattgcattccttgatatttaccgaagggagctgaaaacatacggtcatatggatctttacagtagctttattcataatcgcccaaacttggaagcaaccaagatgcccttcagtaagtgagtggattaactatgtgtccagacaatggaatattatcccatgctaagaagacacaagctctcaagtcatgaaaagatgtggaggagagttcaatgtatatcactacacgaaataagcccgcccaaatggcgtatccactgtctgattccaactatgtgacattctggaaaaggcaaaactatagaaagagtgtaaagttcattggttgccagaataaaaggcttggacaagaggaaatcatcccagtggaaatggagaaacgcaggaacaaatgaagagcaacagaagaagctaaatatttgggtaaagacaggaattttgaatgatgatttcatcattaatgaattaagaagacattgatgcgtgctcattctatatttgatgacattgcaaacattgttttgaaaactatactttgcactaaaattaaaaacgaggctgggcacagtagctcatgcctgtaattccagcactttgggaggctgaggcgggcagatcacctgagggcaggagttcaagaccagcctggtcaacatggcgaaaccccatctctactaaacatacaaaaattagctgggtatggggtcacacccttataatcccagctactcagaaggctgaggcaggaggatcgctggagcctgggaagtggaggctgcagtgagctgagattgcaccattgcactccagcctcggtgacccaccttaaataaataaatacaatttttaaatgatagcatatatatatatacacacacatatacatacacaccaaataggtacatcgatgagagaacactatatttacaaaagtgcaagggaaatttgaatataagacttcagatgctggttacggtacctgaggtaggagggggaaacaggctggagtatacactacagaaatagacatgctttatcaattgtctgatttccctggagcatgttgacttcacgttgatttttttttacatgttctgttaaaaaaatttctttaaattggcctttggaaatttaccagcagtgtgctggtaaagtcttgacaatcagctctctgaaaaaaaaagcaaaaagaaaaacaaaaaacaaccccgacgtgtagcatttgccgatttctctggtgtaaatactcacagcatggctttgacatgagttttacatttggtaaaagcaaattgtgcctactttgaatagaaggattgggacagagatatggttcttgtcaggcactaattagggagtaaggcttgtctaatattgccttggctctcaagcaaaataaaaaaaaaaaagtaacgtttgggaatctgtgttgcttcctcagccccatcctgggtaaaatcggagacgtatacagggcagggagaagctgtttatttccgtgcctgcggctggagcttcttaaggatttgagctgtgatgctggcacctggcagaccacatcctgtgcggttttcagttttgctccgttcctgaccctggtatagcagaagctttttcacatctatgacacccgctatgtcttggtaaaccctggaagggaaaggaggacaaggttaaaatactgttccgaggatctggtctctccacagcgcaggctggaggtggcagcccgtggaaagccaagttcatccaccatcggagcccaggccaggctgccaaggctaatattcaggacaaagccaggcacaggtcgggaatcctatgaagatgatcatcgtcctgaggtcttccttccagggttgcatccgcgacagaagatggaaagagaaatgggtgagtccctgctaccaccccaccctcaggttgcttttttggctgaacaagaagggtcctcccaggcaggaagggtggggcacagaaacgtgagccaatgtggatgacttggggagggctttgcagttgaatctcctgaaaacagcaagaagtacagacctccgggcattctagactcagattctgtagacgcttccctttggccgagccaagccagggttgctcaggaactggggtccttgagattggattagattggacggaacgacacaggattgcaacgtgctgaactgtgaggaccggggtttagcttgagttccccagtctgtccacgaggtccaagcttgagatcattacggcgaccacatctcaggaggaagataggtcagcaacgcagtgacgtgctggaatagttttgaaatatttgaactattctaatgcaaactcttcttttaatgacatttcacattgcatcttgtgtcattttatttctgtagatgttgtctttccacttgacatttaattggtgtttaatttaagttgcaaatattgtgtatgtatctgagtctagtgtgagaatcactactctatgcctgtgcatcccacatcaagtaacgtttttgagtgagggagctgtgccatgctgaatctgcagcatgccttggacataagcatgtagcttgtcttctccagcttggaggagagtctcagaggaaaggtcttagaggaatgcaaaggtggaggggtcctcataatatggaacaacgacagctctgtatcac

SEQ ID NO: 8234 - DNA, 6000 bp, Homo sapiens; identical to SEQ ID NO: 2016

SEQ ID NO: 8235 - DNA, 6000 bp, Homo sapiens
gcccgggctggccttcaccccagctcccgacagcgttgggtccctgagtgcagggcctgcccctttctcatcctcctgcctccaggtcatggggcaggggtgccgagaggccctgcgggagccaggacctgagaggtgatggtcaccacccagacgaggggccgggggtcgcacaaggaggcttccagggggatgccaggagcagtggggccctagacccagcagtgggtagacccagcagggcagcgctcacgtcacaggttctgggggttggggcttgtcatctgtgcaggtgcagctgggatggggatttggtgctttttgttctgcaaaagccagaacgcatgtagctgagccaagatcagacggcatggtgcctcatgcctgtggtcccagctacctgggaggatgaggcgggaaaattgcttgaactcgggaggcggaggttgtaatgagccgagatcctgccactgcactccagcctgggtgatggagctagatcctgtctcaaaaaacaaaagaccacgcatcctagccggcaaggccactctgtactcagacccggcagctgtggctgtggcacaggcgcttaccctgcggcattggccctttcagtggttggtgttgaccctccacagaggggctgggtggggtgtgtccagtcccatctgggtagactgagtgttggggatgggagagtgtttaaggaggtggcggttacagactccagcatcgggacacggggccgtgggtcatacccacatccgtgggggctgtgagacagccgtccagaagcttctgtctccgggccaggaggacaccccagagagccccaggaggctcgttccggaatttagggctcagcctcgatgaacctggccaggcggcggttgatgggttaattcagttaatcacacatcactcagggtttctcagcagaaggaactgaccaagccaatggctcacctggaagagagaaggagggaggaggaggggattctgcagagggaaggctggtggtggcgccccccttcgacggtcgtgccctgatgctgcgtggcttaaacggtgccacccggagattggtgggcgggattgggcctctggggtccccggctgtggagagggcaaggcaggggcggctagaaagaaaagcaacctggacgcaggccccacctccctccaggcagccccacaggcccgagggccaccgtgtcaggagggatagcctacacggagagcaggccagtggccctgtgcccaggagggtgccttgcccagcctggaggcccgcaaggatgagaagcagtgtgtgcccgggaggtcacgtgggcaccacagacgaaagtggagccgggggagagatgtcccgggatgcaccaggcgctcgtgcaaaccaagtgctgagcagagagcagcctgggagagaagggggctgccccgagcggcttgggtggccgggcctgtgggagaccttgggtttgctgttaggagggacagtgagcgcaggcacctctctctccacttcatgtttgtcctcactgagggagccgagcagatgcctttgcccctgcaggtcccccatgtcccctcgcccggggcgcgctccacaggctaggccactttcacagctcaccacacaggcagagactggagggtgcgcaggaccccgggtgactgcagacgtgggcacagaggggcctctgagggcgtctggcggcatttgagcagctgccagatctcccctggaaacactggggtgtgtgctcggtgggtgccgtgtgtggggggtatgtgctcggcgggcgccgtgtttgtggggtgggagctaggcgggcgccgtttatgtggggtgggcgctcggcgggcactgtgtgtgtggcacggccactgcttagggccccctggagctgcggggcacacggcagagccagcctcatgtcaccacgtgcttcccccgtgtgcagggaggggttggaggtgtgcgcttgtcttgtccggaagccgggtgttgggacgcgtcctgacgacggcactgcccacatcctaatgggacacctgagggacatcggtggctgagtaaggggcccctcccgagcaggtctggaggcgttggaagcacagcgcagcctcatggggcacctgcctgctctgcctggaattgaggggcgattgggactcccactgcccccaccaaagcctgtgcccctgatgtctgtccagagcacggcttccttctcggtggttcccagaggccgctgggcctcgcttcgtcctttttgggcagcgagtgtgtatgttaggggaacaggagcccggcagggccgtcttgcagggctcagcagtgggggccgtggggttggtgcaccagggcaggagagctgcccggctcctgctaggtgtctagagggcctcagctctcccaggcactgtcccctgtccccccatctcccctgtcccccccatctccccatccccccgtccagggccgcagcagctcagctctcccaggcactgtcccctgtccctccgtccccccgtccagggctgcagcagctcagctctcccaggtactgtcccccgtccccctgtccccccgtccccccgtccagggccgcagcagctcagctctcctaggcactgtcccccgtcccctcgtccccccatccagggctgcagcagctcagctctctcaggcactgtcccccctcccctcgtccccccatccagggccgcagcagctcagctctcccaggcactgtcccccgtccccctgtccccccatccagggccgcagcagcccagctctcccaggcactgtcctccgttaccccgtccaggcactctccccccgtcccccatcccccgtccaggcactgtcccccctccccccgtcccccccacccccgtccagggccacagcagccggtattgagtgtgggtatgagctttggctctgggtcctgagcgtcccttccccaaattccccatgtggcttcccagtctgcatctccatctgctcccagggtgcgagttggtttttgtattaataactgaggtgtgacactcgggctgtacccgctagctgtgtaactcatgcagctcagtgcctttagctcatcatgaggctgtgtctctgtctgtgccatctaatagaggatattttcatcctcatggcgagaagggatggatttgttttcctcgtgaagtcggtgacgtttgcttttcaggtttggttggtggcctccagtctcttgtcctcaacgagggttttggcagctccctctcagtggcctgtgagtgtccccactcccttgtctgggaaagggctggagctctggggctcacagagagggtgggtgtgatgtctttttcctgacgtggcatcggggtgtcttacctgcccggacacctgcctgcgcagggtagcacagaccctacaggctgcggctgagcccccagcacccgccccacctttaatgctcggcccccagcacccgccccacctttagtaccaccctgagtcccccagcacctgtgccacctttagtgccaccgtgggtcccccagcacccgtcccacctttagtgccaccctgagtcccccagcacccgtgccacctttagtgccaccgtgggtcccccagcacccgccccacctttagtgccaccgtgggtcccccagcacccgtcccacctttagtgccaccctgagtcctccagcacctgtgccacctttagtgccaccgtgggtcccccagcacccgtcccacctttagtgccaccctgggtcccccagcacccgccccacctttagtaccaccctgagtcccccagcacctgtgccacctttagtgccaccgtgggtcccccagcacccgccccacctttagtgccaccctgggtccccacatccctggctacacattgtggctcccacaaccccgtttgggttcacggtcctcctgcaggactctcggaactggggagtgagagtttgttccctgctgttgtaaagggcataacctgggggaagccaggcaggcagaaacccccacccacgtccagggccccatgtagggtccggagcttccctgccctccctggtgccagtcctgaccctaccacagccgaatgtctgcgtcagcacaggggcgtgtaggaagaaaaggcgtcctgcttaggagataggtacatccgggacctggggccttctcgccctcagtccacagggaaggtcccccggatggcgcctgccccttccccctccctacccggcttctgcacgcagtcccctgagatggcccacacgtcctgccgctttctggcaggggagagctgaggcctgtgtcttcaggatgctgcctctcgggcagcctccagccctcgtcgagaaaggcaggcagtgtggcgcgagcaggctggcctcaggcggggcctctgggcagtgtcccctcgggatgtttgccgtgctggatctcacacccggctctgacacgctgccgtgtcccccgtgtgcctgcgcctggggtctccgtgtgtgtgtctgtgtacacgcatgtggttttgctttcttgtgggctggaaaatctaatagtagtcagggcgtggtggttgacacctataatcccagcactttgggaggctaaggtgggtggatcacttgaagtcgggagtttgagaccagcctggccaacgtggcaaaaccttgtctctaccagaaatatcaaaaattaaccgggcatggtggcacatgcctctaatcacagctacctgggaggccgaggtaggacaatcacttgaacccgggaggcggaggctgcggtgagccgagatcgcaccactacactccagcctgggcgacagagcgagactctgtctcaaaacaaaacaaaatgcaggcacggacgtttcagccccctcttcctgtggatgctgagagggtttccagaagaaggagaatgtccccgtgctggtggctcatccaggtgtgggccggtgtgcggcggggcgtgggcagaggagaggcttcgggctccggtttcctctcctgtggatgcgtcgcccccgcatggtggtcctctgcggaagtccccctgtccgtcccgttggcagccgcagtggaaagacggatggacgggctgtgacagggacagcccagtgtgaccccagccctggccgtcgcggttgtggcattctcgctgtcagggggctgttcccgtggctctcatggctgtggaggggcgtggagggggcggtccccatggccagaacctggccgtggcgggtggaggacttgaggccggctcagtggtcagcgctgctgcttgttcccctacacagaggcgttgggtggagctgcctcaggtatccctcctggctggggtgtgtgcgtcaccctgagtctccagcccatgctgaggagcctcgcaggcagggcccagcagcctatactccaggccattgctgtccgtttctccagaaggccctgctggtgggtggtcccaggagctgggcctcagtgggggatcccaggacagtggagcctgggaggggccccagtgttgaggcgtgaggtactgtctggaactagggggtgcccccaaagcggcacggcgcccagtccctgtgctggaagagagatgagctgcggtggggggtgggggactacgtctcacagatccctctcccagggcacatgaggagattcctcccccaaaacgcccaggaaggaagttaaattttaatatgggtctggtttagagaaactaggttagccatgcgtgggtgtttctggatgtttgggcagtaaggagagtcggtagctcaagaaatccgctggccgctaagcaggggtgaggggcaccgactgccatcccttcttcaaccacggccactcggccacatcagtgtctcctgccacctccctcgtgtccagcatcaacacagcactgcatccctgacccagtgcagtggagaaaactcgcatccaaaaataaac

SEQ ID NO: 8236 - DNA, 6000 bp, Homo sapiens
gaaatggaaatagaaataattcttctgtctataaatatcccttcaggtgatgacatcgcaagtcacaattatataaagtggcacaaatagagcccaaattttctgcacacatctatttattgtaccaattatatgatgcttaatttaaccatttatccagttgctagactaaaagctcctggattgtagggaccatgactgcttcatctatttttctaatggccatatgaaaagaaaacaatttagccgggcgtggtggcaaatgtctgtaattacacctactcgggaggctgtctcggcctcccaaagtgctggaattacacgcgcgagccaccgcgccaggccttttgactctcatacatttttaatgaaaggaaagagagactaggaacgccacggaccaaagctcttcccattcatgaacccggcacccgtcaggattcgcccctgacgaccctcccgtggtccctgcacaatctgggagagacccggcgctgcggatgcagagccacccagagagagctgcaggccaggacacagtcactgagcagggaggagaaaggacgcccggggggctggctgtcagcgcagccgccatcttatggtccaagtggactgaggccgcctgggcgaggagaactcagggcgcaaattgtggagctgactgcggcgaggtctgagtcccgccacagccccttcccctctctcgggatgtcggacccgacattctcaccatttctaggtttccgggggacctggcgtcttagctatggatcgccaatacctgcaggtcagagggccatagaggctgggcctctagaagaagaggacacagagcagtgaagacgagacccggagctcgggctgaagggagagacaaaggccccgccaatcccggaagccgccctgtctgctccagctgcatgcctgattggacagttcccagcccagcgtccctgactggataatgattaaaaccccacccctcaggtcctgagtgacagaagatgtgatcagatgctctgctgaatgaagactaacaacgtaagttgcagcgttttcagacagggctccctccctgagctaagccaggcccacccaacagggtatttgcctttaaccttctgtgtaaggtcacatgcatttcaaataatatactagatagctattcaaaaataaaaatatatataataacaattattttaatatttcatcttttatgaccgtcctggtttctggcagccatagtccctaccccgacagcccccagcccagatggcattcaaatcttcctggatgggcttgatgcccgtcactcacgcgctctttagcactgcgttgtgttggttactcaggcctgggagaggtggtggggattgtagatccagggtaggagccaccttacacccagagttcacctggccacatgccagcaaggaagcccatgaagcacagccctagacactgagcctcggcacctccagctgcactttctatttatatatcaggtttttttttttttttttttgagacggagtctcgctctgttgcccaggatggagtgcagtggcacaatctcagatcacaacaacctctgcctcctgggttcaagtgattctcttgcctcagcctcccgaggagctgggactacaggtgcgtgccaccatgcccggctaatttttgcatttttagtagagacggggtttcactatgttggccaggctggtcttgaactcctgacctcgtgattggcccgcctcagcctcccaaagtgctggggttacaggtgtgagccaccgcgcccggcctatatatcaggtttttaaaaccataaataaacagacacaaaagcagccactttgattgaggagaaagtgggagcctaaagcagctgaccctcaaacagctttgccaagcctcaggccaggccaggccatctcaacactccaaggctacatgatagttacagaggacgacagttcccataggtacttgtcaagcactgtgctagcttctcagtcacagagtctcagaatttctccttgccaataccctgtgaggggaggccctaactcactagagcacaggaggttcctaagctcttcccaggaaatggttaacaaagtgtggagctgggggaaaacccagtcagaacaaatgacttcccagggtctcccttgactccatccctatctccacatggggccaggaggtgaagcgagccccctaaccccctccattccactctctcctcaaagtggctgtttttgtgttttcttatttatgggatttcaaaagcctgatttttaattttgagtagtttcaggcttgtatgggtgtatttgtataggctttattagaaggaagagggcttaagacaataacatttttaaaatgtctcagtggggaatagacttccatgtcatgaacgatgatgttgacctccttctgctgtctttgtgcaaagtataaatagtgtgagaattggcatgtgctgggttgtggtttcagtgtgggagggcagttccttaagatggaaaccaaatctcaccgagctgtagcagccacactcaccttttatcacattccccaccatagtctttcacttttcttctgtgcttaaatttctttcaacatatatatatatatatatatatttttttttttttaagacagagtcttgctgtgttgcccaggctggagtgcaatggtgcagtctcggctcactgcaacctctgcctcccaggttcaagcaatcctcctgcctcagcctcctgaataattgggattacagatgcgtgccaccacactgggctaatttttgtatgtttagcagagttggggttttaccattttgggcaggctggtctcgaactcctgacctcaggtgatctgcccacctcggcctcccaaaatgcagggattacaggtgtaagctaccatgcctggcaaacatacatattattttgattatatatatagggtgtataaatatatgtgtgtatatatatatacacatatatatagggtatatatgtgtatatatatatatgtttgtgtgtgtgtatatatatatgtgtgtgtgtgtgtacacatagaggtctcactctgtcatccaggctgaagtgtagtggctgaatgatgggtcactgcagcctcaacctccagtgatccttctacctcagcctcttgagtaggtgagactataggcaggcaactccacacaaggccaattttctaaatttttgtagagactgagtctcactacattgcccagactggtcttgaacccctgggcttaagcaatcattccaccatggctttccaaagtgtttggattacaggtgttagccatcaaacccagccaacaatattttttaaagaactgttacaaccaaattatgagctatggttgtgccactgcattccagccagagcaccagagtgagaccttgtctccaaaaacaaaacaaaacagaaacacttatgaccaaattaaaattctaaggttgtgtcctctgtgtccccttcttgccctgtaaactatcactgttaaatataatgcgtattgagaaaactgttagatattattaagaaattcctatatatcttctaagtgagataaggtattctaatgtgacccaatatttcctcacccctacctccagggtctaaactagcaaatcaaatcaggacatccacaaaggacagttggccatgttcaattagaaaattaaatatccccgttagtgagagtaatccagtgattttaaaaaagagaagtcaaactgaaatgcagcgtagtcacggcacaattaccctggaatagccacttcacatggaatgactgaggagcctttctaagatgaacaaatttgggtaacgtaattctttctttctttctttctttttttttttttttgagatggagtcttgctctatcgcccaggctggagtgcagtggcataatttgggctcactgcaacctctgcctcccgggtgcaagcagttctcctgcctcagcctcctgagtagctgggattataggcgtgcgccaccacgcccggttaatttttgtatttttagtagagacggggtttcaccatgttggtcaggctggtctcgaactcctgacctcgtgatcagcccacctcagcctcccaaagtgccgggattacaggcgtgagccaccgtgcccggcccggtaacataattctttctaaaccattctcagcctgggctgcctcccacccccgccttatttctaatggccatcccacgatgtggtcagcagtgtggtacggcatggtgagagaggcgctcagggatgggatgaaggtctttcccgcattatgaaaatgattaaaaaatgtccaaatgggcagggcgcggtggctcatgcccgtaatcccagcactttgggaggctgaggcgggcggaacacctgggatctggagttcgagagcagcctggccaacatggtgaaacctcatctctactaaaaatacaaaaagtaccagggcgtggtggcatgcgcctgtaatcccagctactcgggaggctgaggcaagaaaatcatttgaacctgggaggaggaggttgcagtgagccaagatcgcaccactgcacttgagccagggcaatgaggcggaaactcggtctcaaaaaaaaaaaaaaaagtccaaatgttctttcttacccttaagtagcaaataagatgcattatacaagacccaggtaaggaaaagagcaagtgcatttcatgtctcagcttacttcttaattagctgtaattccctgtgcatgttaccttacctttactgtccgtaaaatgccctactgccgagcggggcgggtggtggtatggagagaatgctgttgctttatccaatcagtggcgctggcgcgggaaccgcccaatcaggggcgcagccggagaggagggcgtggcttccgacattccgcggggtctttacctcttgctcccgccagagtttgggatcggtctcttctgttccgcgtcctccacctcggtagcccctggtgactctgtcacagcctctgttgacctatgatctgcagggagacgcacagccaggacatcctggaacctgggaaagggtgagtgtgcggggttgggcaacccgagaagggagaccaggctgtgaaaccagcagaaccggcctctccacagcccgctcccaggtcgccgacctgagtccccgctggcgcagctccgtcccaggcccctctggccgcaagatggcggctgggcccacagccgggaccccagcgtccagccccgtccgtgcggggccatgtctggagccccctgagcaagctcttcacgcagcctcgagtatttcccaggttgttcagggatgccaggcgggtcataagagcagaatcccgacccggtgtttgcgtgggaagaactgcagcctatggggctcccagtgtcttttgttaaacattttgtttgagacggagtcttgctctgtcgcccaggctgaagtgcagtgcgtgttcacggcaacctccgcctctcaggctctggtgattctcgtgcctccgcctcccgagaagctgggattacagacctgcgccaccccgcctggctaatttttgtatttctagtagagaagtggtttcgccatggcggaaggtggtctggaactcctggcctcaagtgatccgccagccttggccccccaaagtgctaagattaggaggagcatgaggcactgcgccaagcctcttctcttaaaaattaaagggagtcagggttaaaaccttaaagaggttatttgagccgtgattggtgaaatggaaagcaccccagccatagtatgtggcccacctgagagacataaagcaaagggttttataaagggcgtgtgagaaggcaaaccaaatgcaagaattggttagttatgtagtcaccttatttgtatgatacaggtggaaatttcctggttatgtaatcagaggttaattgca

SEQ ID NO: 8237 - DNA, 6000 bp, Homo sapiens
gggctttcccatgctcacgttccctggcgctgggccgcagacactctgtggttgacagcctggtcctgttcatcttgcccggctcccacttcacagctcacactggtatagtgtggccccctcctcttctagtatttccatgtgtagcctcacaagataactggctcatccaggtggccacagatgtccagcttggccccacagcaaggccttagccagctccactgccagccacagcccacaccttccctgatcaacctttgctagcagcggggctctttaattgtccgctaagacgcctttgaggacctggtagaagttaggctccagctgcctggggaaatgcacatgggcccaacagtaggcaggctcctgggtctccaaaggctgtccagggatcccatgttaaggaatcctatctgggaaggacttcccccttgcaatcccttggtcttccttctccttaacctttatgtcctggtgcccgtcctccatcatcagagcctgaaccatataggaagctaagcaaataacccccaaatctctttatgagtaataacaacacaaattgagcagttaccttgtgccagatactgttgaaaacacttgaggggtattaatacatttacccctcaccgcaaccccatgacgttgggacaattagaattatacccattttacagatgagaagattaaagcacagagaggttggagaaccttcccaaagtctcatagcaaaggggaggtgttgccctccctacacagcagctggttcaccacctctgatgcaatccacagtctccctcaaggctgggccaatgctcgggagctctggacttgaggcaagcacagaatggaatgaacccaaacacccaaaggtgagctgccctagaaaggcggacattgggccgggtgcggtggctcatgcctataatcccagtactttgggaggcccaggtgggcggatcacctgaggtcgggagtttgagaccagcctggccaacatggtgaaactccatctttactaaaaatacaaaattagccaggcatgatggcacatgcctgtaatcccagctacttggtaggctgaggcaggagaatcgcttgaacccaggaggcggaagttgcagtgagctgagatcgcgccattgcactccagcctgagcaaaaagagcaaaattccgtctcaaaaaaaataaaaatgaaaacaaaagacatcagtggtttctgaagactccaagctgctgtataggctgtgtctgccatcttggacacaacttttctattgttcctattaaatgtgttcatccttctggcttacatgccattttcttcatgcaaacttcttgccatccaaggatgggttggatacatccttctccacatgaagtcatagccccaagactcttcccttcccagccctatcatgctacactgcaaatgcatgacagcctcccttccacaccggaagctcccaagagggcagggattgtgtcttgctttgctatgtcttgaattaaaaaataataataataattattggctgggcgcagaggttcacacctgtaatcccagcactttgggaggccaaggagggagaatcacttgaggccaggagtttgagatcagcctggccaacatagtgaaacactgtctctattaaaaatacaaaaattagccgggcgtggtggcaggcgcctataatctcagctacttgggaggctcaggcagcagaatcgattgaacctgggaggcggaggttgcagtgagctgagatagcgtcatcacactccagcctgggcaacaagagctaaactccgtctcaaataataataataataacaacaataataataaggccgggcacagtggctcactcctgaaatcccagcactttgggaggccaaggcgggcggatcacgaggtcaagagatggagaccatcctggccaacatggtgaaaccccgtctctactaaaaatacaaaaattagctgggcgaggtggcgcatgcctataatcccagccgctcgggagactgaggtaggagaatcacttgaacccaggaggcagaggttacagtgagctgagatcgcgtcattgcactctagtctggacgacactctgtctaaaaaataaataataattattattattatttaatttttattgagtaaaagatacattcagtaaagtgcacaaatcctaggtgtgaacttttatgtatgtatcaatcaatgagcttttatgtatgtatacagtcatgaaaccaccactcagatcaaagcatacatgtctagcccctagaagtttcccctggtctcctcccggtcattactcctcaccctaggggtaaatactgttacggtgactgctgtcttttcttaaacttcaaataaatggaaacttcaaataagtgtgtctggcttcttgggctcaacatgttgtctctgaaattctcatgttgctgcatgattccttggtttgtcctttttattgctgtgtggtattccattgaattaatataacaacatttatgtatccattctattcttgatgaacatgtcagctaggatgtggaggatttgggctctatctttgctggtgggtgtatacattgctgtaatgactaaggaaaactgtcttgtctaccatcattataataactcatttagtgagcatttactgtgtgccaggtactgtacaggagtcagctacattatctcaatcttcacaatgatccttgggagtagatagttgccatctgtgaaacaggataattgtggcatcaacatgaataggattattgtgaagtttaattgagatgatactttgaaggacttagcccagtgctgccattttggaaacactgtttatgatacctgttactggtgattcctaacgggcacaggatggggggttcaggtgcctgggtccctgctgagcaagtagcccagcagccttggcctcagagcacctgggggaatcatgaatttgtgagcctctttgataagaccctggctctaacttcaagaaaacggtcactaggggagggtgagggacaggactgagactttagcttaagaagggccctgggagcattccagagccttcttttacgcacatcttcctgaagctgagtacagagggtactctgaggtgatgactgttccttacctgtctctctcattagccggtaagccctgcaagggcttggccagtgcctgtctttcaaatgttcattcagaaacaatttaagtgtctcccttggtccaggcactatgccaagaactgacagatacagcagtgagcaagatgggcaaggtggggagagagacaagaaacagagaggcaccaagactgtgtaggggctgggctcccagcactttgggaggccaaggcgggaggatcgcttgagctcatgggtttgagaccagcctgagcaacatagcaagaccctatccctacctgccaccccccaccccccgccacaataaaaaatacaagtcttgagggagaaaggacagaggagctgtggagaggaggcctgaggtctgagggtgggggatcagggtcaggtcctgtggagcctgtagcctaggacacggagtgtggatttgacccttatgcgaaacaactggaaggctttttgtttctttttctgtagaaatgggggtctcactgttacccaggctggtctcgaacaccccaagggatcagccgtctcggcctcccacaatgctgggattaaaggcgtgagccaccgcgcccggcctcaactggaaggctttaagtgagagatggggtgcaagggaatcccagagtcagaaaggtcttcagagagccaggaagggcttgcgggggaggggcgcatatggaaggggcgcatggaaggaactcacagattccttgaatgaatgaatgaacgacccaatgcactgacggatgaatggacaggcggccaggaatagcagccggcccccagggagccccagaccccgcggcctgaagccttggttctaggccaaggcacaggcgcggtgaccttggggatgtccccgcccaggactcagggcccggaactcggcgtctcgggggcggggagggcgtgcctggcgggacagcgcgcgcggaggaacggcgggcggtgctcctcgggtaggccccccacacatccccttggctcagccctgccggggcccgaacccgcgccgcccgccgtgtttacattccacccgcgccagccacgcggctttttgccgctccagcgccgctcggccccgcccccggcgcccgcggcccgcccctcgccgccgcgcgccagacttctcccgcgtcccgcccgccgccccgccccgcgtcccgcgccccgcgccccgcgcccggccctcggcgcgcaggccctgtcacttggccccgccctgtccgccggccccgcccctgattccccgtccctgcgcctcgcgggccggcgccgtggaggggcgggtccgggggcggggcgagggacggggcgggacgggctctgggtcccgcgcggccgctgaggggctgggagccgcggcggggcggtgcgagggcgggccggggccggttccgcgcgcagggattttaaatgtcccgctctgagccgggcgcaggagcagccggcgcggccgccagcgcggtgtagggggcaggcgcggatcccgccaccgccgcgcgctcggcccgccgactcccggcgccgccgccgccactgccgtcgccgccgccgcctgccgggactggagcgcgccgtccgccgcggacaagaccctggtgagtctactgccgcgggctgcggacagggactcctggggcccagaccgcgccggggagctgggtgggggcggggtgcggccgggtcgcgggtccccgggcggcgtcgcggggcgcccgggagggtgctgagagcgcggcggggtggggtggaggggacactgaggcagcccgggccccgggaggcgacgggccggtgagggcggcgggggcggcgggaccccgggtcgggggtcggcgggtgcccgggtcgcgggtgacaggccaccccgccatcggccatcttcctggctcgcccggccgcccgcgcgcaaagggggaaggggtactgggcccgcggcctgaccccgccgccgcctcaccccgcgccgccccgcaggcctcaggccggagcagccccatcatgccgagggagcgcagggagcggtgagtgcccgcgccgcggggccggacgggacgggacgggacgggacgggtggcgtgggggaggggcggccgcgggtgctcacccggcccggtgccacccgggtccacagggatgcgaaggagcgggacaccatgaaggaggacggcggcgcggagttctcggctcgctccaggaagaggaaggcaaacgtgaccgttgtgagtacaaaagagacaggttggggagcatcccccccatctcacctgggtacccgacttggctctgcctacgggggcgggggtcccttgggcaggaacggagctcataacctgatcagctttctcttcttctctctgtttttgtcttgtttggtgtgtttccttggggtcatgggggtggcttcatgttagtttttgcaggatccagatgaagaaatggccaaaatcgacaggacggcgagggaccagtgtgggagccaggtaggtccgcccggggttgggcctctgtggaggtccttctccccctgggtcacatggggtttcatgctgtcttgtctcttgctggagacactctggtgagagtgaacttctctaatgcagccacagcccatatggcccagcactgtacctgtcagtgggcactggcctctgccagtcctgggattccaggaagcttggtgttcctgactggcaccgtctgagattacagatatgtgcctagcctggaagaaccagaatggacatcacagtattcagtcctccccttctgcccaggaggaaactgagactcagttaga

SEQ ID NO: 8238 - DNA, 6000 bp, Homo sapiens
caaaggcaggttcattttatttatttatttatttatttatttatttatttatttaaattttttgagatggagtgtccctctgttgcccgggctggagtgcagtggtgtgatcttggctcactgcaacctccgcctcctgggttcaagtgattctcctgcctcagcctcccaagtagctgggactacaggcacctaccaccacgcctggctaatttttgtatttttagtagagacggggtttcaccattggccagggcggtctgaactcctgaccttgtgatctgcctgtctcggcctcccaaagtgctgggattacaggcgtgagccaccgtgcctggccgatttatttatttatttatttatttattttgagatggagtttcgctcttgttgcccaggttggagtgcaatagtgcaatgtcagctcaccgtaacttctgcctcctgggtttacaagattctcctgcctcagcctactgagtagctgggattacaggcatgtgccaccacacctggctaattttgtatttttagtggagatgaggtttctccatgttggtcaggctggtctggaactcccgacttcaggtgatctgcccgcctcggcctcccaaagtgctgggattacaggcatgagccaccgcgcccggcctatttatttttttgagacagtctcactctgttgcctaggctggagtgcagtggcacaatcttggctcactgcaatctccacctctcaggctcaagcgatgttcccacctcagccccccaggtagctgggactactggtgcatgccactacacctggctaatgtttgtatgtttttgtagagacggggtttcgtggtgttgcctaagctggtctcaaactcctgggctcaagcattcctcctgccttggcttcccacagtgctgggattacaggcgtgagccactgcgtccatccagattcatgatatttagatgttgaaatgtggctttacagactcagacagctctctgaggcaaacaaagagggagatgcaggtaccctcagcacaagccccaaattacctgcaggggagaggcggaaaatcagacaatgtagaaaccgggagaagaaaggtatggacagaccgatgcagataggaggggaaggaaatacctggaaatgagatagagaccggctggacagaccccggggaccctgcaggtcaccacacccttctctttcagctcacctgttctccaggaccagccctgctggggcccaggcccaggctctgagaggccgtgtcctaacctgccctggccccggagaagctacgttgccacctgtcccccttccctggcctggtggggcctggctttggggcaagactgagccacgggggaagggggaatcccgtacctgctgctgcttcctctgtcttggctaacgtctgtccccctgaacccctaaccataccccaagagctcccaaagcctgagaccagggtcatttgtccccaactccccatctggccctgctgttgctagtacctgttatttattacctggaggcctgtccagcacccaccctacccccataaagcattgtttacacctgtgtcttggcctccattattgtgagatggcagggagatggaagaggtccctgatggaagaatcatgtgtcatggtgtttgggggccttgtttctgtttttttgttgttgttgttgagatggagtttccttcttgttgcccaggctggagtgcagtggcgtgatcttggctcaccacaacctccacctcccgggttcaagctattctcctgcctcagcctcccgagtagctgggattacaggcatgtgccaccacacttggctaattttgtatttttagtagagatggagtttctccatgttggtcaaggttggtctcgaactcccaacctcaggtgattcgcccgcgctggcctcccaaagtgctggaattacaggtgtgagccactgggcctggccttgggggccttgtttcctgattggacgtggtgtggggtataccaagcatgatgactcaggtgcctgttgcggagggagggaatttgttactgtgtggacagtttgtgacaatctgtgttctaagctcacgtgtgtaaacacgctgatgtccctgtgtttgtgacatgtgtacatgtttccagtacctgcatatgggatgatgtctataggatataatgtgtgctggttgtgtgtgatgctgacagccgtaactgctctgtggccttggtcattgtattggtgaggctggtattgtttgggacatcaaggccaggggatgggaatttggacctataggtgggcctccggtgtgtgcatgtctgatgcctgagagtcagaggcagtgactcactactgcgtgtgtgcctgtgcatgtgtaccccgaggtctgtgtgtgttttggtgtgaatttggctccttttaaacacccatgtgtggccaggcgtggtggctcatgcctgtaatcccagcacttcgggaggccaaggcagatggatcacttgagcccaggagttggagactatagcctgggcaacacagagagaccctatctacaaaaataaaaaacagaaaaagttagccaggtgtcgtggtacacacctgaagtcccagctattccggaggctgaggtgtgaggatcactttagttgggaggttgggcctgcagtgaactatgatcatgccacagcacttcagcctgggcaaaagggtaagaccccatctcaaaaacaaaactaaactagaaacacccttgtgtggccatgaaccctgtgtgtgccctgaggactgcgggcttttgtgcaatcctcacgcatgtgtggataccagtatgcatgcccttgtgctcacgcgaaccgccctacgccctcaggtggcctgcaggggactggtgcagccccgaggacactcccagttgctcgtcgccctcccatctccacgtcggccttcaccgacccggcgggagccttgagtcccagctctccagagcaatggtggagcgggcagggcattcaaaatgaccttatctccttagtctcctaaagtgttcccagctggccatgcaaatgtcttctctgtgtagcgttccgtggatttttttttgtttcattttttaattttgtgtaaagataaggtctcactccgttgcccagactttccctggttctttattctgattcccacaatcgtcccgagggggcaggccggagcgggtcttgaaaatacacatttgcacatcccttctagtccgcgttcccttttctcaagggcaacccgcacttttttgcctccgttataaaagatacttatgtaaattactgacgtgcgaatttacatacatttctcaactaactgcgtagccatttctccgtctctcacctccgttcctggacggcgagaaggaggaggagctgaccatgtaaatgaagtcacgcgcaccgcgctgccgaactcggtgccccgcgctgggcggggggcgggtaggcctgtccatgtaaatcacatcatttgcgtgccccgccccgccgacgccacttgattccaacatgcaagaaacgccccctcccagacccggcccctcacactgcgttccccctcccgcgcaaagggggcggggcggaggatgcaaatgaacctcgtgtaggccacggaccgctgtttcctttctccttggtaggggggttgtcccgaacttcctcgccccgctccgccccgccccgcgcggctcgggcctgcgcaggcgccgtcccctccgcggggcgcggtcacgtgcccaccgggcgaggcggggcggggcgtcgcgcgcggtgggggcggggtatggcgcgctgtgcggcgcagggcggctggcacaaacggcggcgccggggccggaggaaaaagctcggtgaggaggtcgcggggcgagaagggagcgggaggagactaagccggagccggggcgccggcgcgaaccgggcggggtgtgggggcgcgcgccggggcctgccggggcgaccccgggaagggggatgtgggtgcggcgcgggggaggggacgcgcgccggttacgttgggtgccggccgttgtgggggttggggtgggggcggggagcgcgcgccgggcggaggccgagtggagggggaggggagggggtccgagcggcccttaggccctgcccctgtcgcctactgcgctcagaaggggcctcagggcctgccccgggttgggggcgttggggtgccctggatgggggcacctttatctctcgtcctgtctccgggtgcgtgcaccctcctccgtcctttcctctgtcgccgcggaccctctccccgagggcccctcccgtcggtcagtctcgggacctcccttccgtctgggcgtgtgtccgcccccggccggcttcctcccgtcgggctcgggtcgaccccaccgtcccgctccgccccgggtcctccctcccagcttccctccggtctatttttctgtctctgggcccctcgttctctttgtttttggactccccagtttcctctgtcttttgacccccccgcccccaccctgactctccctggaacccccacgtttctcgttgtctttctggaacgccgaggcaggtccctcctattttccaaaccccctcctttcccactcctccacaccacccttttctactccagccctccttcttctgtctttggttaccgcgtcccacaacctgcaccacagtcctctgtcttagggtcatctacccagcccctggcctccagcctctccctatcactgcctcttatctgtcagcggactcccgcacctccagattctcagggtcctctccccgacttggcctcaggttttggggggcctctatagtcaagtctgtcctggtcgtcttccccactcctgcccataccatcccggctttcccctgcctgcctgtctctagtttctctcacatccctttttttttttcctttctctagccaccctgaagggtcccttcccaagcccttagggaccgcagaggacttggggaccagcaagcaacccccagggcacgagaagagctcttgctgtctgccctgcctcaccctgccccacgccaggcccggtggcccccagctgcatcaagtggaggcggaggaggaggcggaggagggtggcaccatgggcccgggcggtgccctccatgcccgggggatgaagacactgctgccatggacagcccgtgccagccgcagcccctaagtcaggctctccctcagttaccagggtcttcgtcagagcccttggagcctgagcctggccgggccaggatgggagtggagagttacctgccctgtcccctgctcccctcctaccactgtccaggagtgcctagtgaggcctcggcagggagtgggacccccagagccacagccacctctaccactgccagccctcttcgggacggttttggcgggcaggatggtggtgagctgcggccgctgcagagtgaaggcgctgcagcgctggtcaccaaggggtgccagcgattggcagcccagggcgcacggcctgaggcccccaaacggaaatgggccgaggatggtggggatgccccttcacccagcaaacggccctgggccaggcaagagaaccaggaggcagagcgggagggtggcatgagctgcagctgcagcagtggcagtggtgaggccagtgctgggctgatggaggaggcgctgccctctgcgcccgagcgcctggccctggactatatcgtgccctgcatgcggtactacggcatctgcgtcaaggacagcttcctgggggcagcactgggcggtcgcgtgctggccgaggtggaggccctcaaacggggtgggcgcctgcgagacgggcagctagtgagccagagggcgatcccgccgcgcagcatccgtggggaccagattgcctgggtggaaggccatgaaccaggctgtcgaagcattggtgccctcatggcccatgtgga

SEQ ID NO: 8239 - DNA, 6000 bp, Homo sapiens; identical to SEQ ID NO: 2051

SEQ ID NO: 8240 - DNA, 6000 bp, Homo sapiens
ttagtcgggtgtggtggcgtatacctgtagtcctagctactcaggaggctgaggtgggaggatcctttgagcccaggaggtcgaggctgcagtgagctgtgattgtcccactgtactgcagcctgggtgacagagaaagagtgcatccaaaaaaaaaaaagtttagaattttggagcattttggattttggattttcaggttggggatgctcagagacctgtacttgaatgtaattggagaaagtcataacatcttagcccccaaaattactttagtgggtctttttcttccttgtaaacaccacatcctttatcacacctaagggcattcacattgttgttaatttctttttcttttcttttctttcttttttttttttttttgagatggagtttcactctgtcgcccaggctggagtgcagtggtgcgatcttggctcactgcaacctccgtctccctggttcaagtgattctcctgcctcagcctcctgagtagctgggattaaaggcacacgccaccatgcccagctaatttttgtatttttagtagagatagggtttcaccaacgttggccaggctggtcttgaactcctgacctcaggtgatccacccgcctctgcctcccgaagtgctagaccactctcagcctaatttttgtatttttagtagagatggggtttctccaggttggccaggctagtcttcaatctccaaaagtgatgtgcccgcctcagcctcccaaagtgctggcactacaggtgtgagccaccacgcctggccacagttgttaatttcatttactattcactctgtattcaaatttccccaacatacttaaaatatgttcattgtttctcccccactaggacgaaaagtgtctgtcgtgtcccttgccatatcccacaccctatgacggtgactggtgcctgacactcaccagaagtacataaatgtttttatccttgtatggattcctaactcgtgaggttgttgggagcagaagctcaataaatgtgaaccccccccgccatactccctaaacatttgcaccatggctgtgtctgtcccccacttctgaatcctcattctgtacctctgtgtgaggtcagcgaggtgacgtcatttgcacagggccacacagcaaaatgcatggcagggtcccaattccaacctgaatttgttcaactccaaagtcacattgcctggtacatggcaggtgccctataataagaatcattccttttctctgttactgcttgccccagaaagcaggagggacataaacgtgtggcccagggccttcaggaggacaccctccttcctctcccccacgcgaagccctctcccaccatccattaacactccctgcccctcagtccacaggaaacgtgtggatgacacacgaggagatggagtcccttacggccacgaccaagcccgtgagtgccccctgccggccgccttgggggtggcactaaccttctttgggggtgggggcggggaccgagtctgtggccatccctaagtccgctccttgcgtcctcctctgcctgccccttaactcaccccttctctcccctcttcctactaacgggtcaggagaccaaggagatcagctgggagcaggtagggggcgcggggcggggcgtgagcgcatgaacaggctgtgcacgacgcatggatgcccctcctccgagccctgcccctgccttcaccagaacatgccatcatccccatgggggggcgctgcgccaagcttggctctggactgttccattatggcttggcggtggggagggtagaggggatgcgatgtggaagcccagactgttgcatagtcagccttatgcatggaccatttcatcatcgtgggttgtgggggctctaaggggcttcaattctgtagctcaggagagactgagcagccggtgtccctatagtggagggggcgggggctacagtggactgctcagtgtaccagggccaaggaggacacactggctgtggtggtggtgaggcagccaggctgaatgagaagttggggaggaggagctacactttgttctcaagaaacaagaggcggccgggcgcagtggctcacgcctgtaattccagcactttaggaggctgaggtgggcagatcacctgaggtcaggagtttgagaccagtctggccaacatggtgaaaccctgtgtctactaaaaatacaaaaattagccgggtgcagtggctagcgtatgtaatcccagctacttgggaggctgaggcaggagaatcgcttgaacccaggaggtagaggttgcactgagccgagattgcaccattgtactccagcctgggtgatagagccagattccatctcataaaaaccaaacaaataaactaacaaaaaaacccaagaggcatgaactcactgtccacggaggaattatgtttgactgtggtcatagatcacatatttccagccagggggaggcgtggattttgtgctgatgctgaaaggagtgagggacttgggactcatctggaatattgtcctgggccagatataacattagacaagtattttcaggacattgcaagagtgatggccctttcttagtgggagagctgccttgaaagagtccattgtcctgacttgggggtttagtgacgttggactgcagtgagacagagttaaagcagtgcttccccaaatttaatgtgtagtggggtggcacacacctgtagtctcagctacttggaagactgaggcaggaggaccgcttgagcccacgaagctgaggtcaacctgggcaacatagtaagaccctgtctctaaaaaataaacaaatacagccaggcgcggtggctcatgcctgtaatcccagcacgttgggaggctgaggtgggcggatcccttgaggtcaggagtttgagaccagcctggccaacatggtgaaacgccgtctctactaaaaaatacaaaaattagccgggcgtggtggctcgtacctgtaatcccagctactcgaaggctgaggcaagagaattgcttgaacctgggatggggaggttgcagtgagacgagatcgtgccaccgcgctccagcctgggtgacatagcagactctttcagaaagagagagagagagagagagagagaaagagagaaagaaagaaatttaaaaataaatataatgtatatttcgaatcacctgagggtcttgtgaaaatgccgataccgacttcagtaggtctggagtaaggtctgagattctgcaattccagcaagtccacaggtgatggtgacgctctaggtctcaggacaactgtttgagtagccaagagtatatgctgtcatgaagggctaggagacaactctggattggtccattatcctgagcagagattggtcattgtcctaccatggggtgggaaaaaaccttggattgggaggttggactgtacccctctcatgcacagtgggaaggggccagagggcctgactcttccctcacctgcccatggccccagatcctggcatatggcgacatgaaccacgagtgggtggggaacgactggctgcccagcctggggctgccccaataccgcagctacttcatggagtcgctggtggacgctcgaatgttagatcaccttaacaagaaggagctccggggccaactcaagatggtggacagctttcacaggtgggggctgcctggccagtggggacagtccaaagggaagccccaccccagagagtctttggccaataggattggccatgggagattcccaggcttatcttggcccttttagcctgagttctcaggaaatcctgactctgtgctcctttcaccaatgagatggtccacaggaaaagttcagatcctgaaatggcttggctagttaaccctggaccccttccaggctggccagtaggaagtgcctattattgaaaatgcctcacctcctgagggggtcaacagtcaatagaacttatcagctccccaccctttccaagaagagcgcagccagtggggagggacccgtaggagcagcagtctaggggactggaaagctcatccgtgactccacttcccctgctgctcagggtgagtctacattatgggattatgtgcctgaaacggctcaactatgaccggaaggacctggagcggaggcgggaagaaagtcagacccagatccgaggtgagtagagcctaagggtccctttgggagccaggtggagggcgtggagctggatggggaggagagggggtagggggagaccggagaagcaaattggcaccataaccgtgggggtggagccagcgtggggggcgtggcccgaagagaccaaatggaggtggaggtatgggctaaactgaactctccaggccacgggaggggcacggctgagggtcccttccgtccccagacgtgatggtgtggtccaatgagcgggtcatgggttgggtgtccgggctgggcctgaaggaatttgccacgaacctcacggagagcggggtacacggggcactgctcgccctggacgagaccttcgactactccgacctggccttgctcctgcagatccccacgcagaatgcacaggtgagctgccgctgggcccggagcatgctgggcgtccccacctcgcagactgcacgctccaaccgccccctccacctcctctttccaggcccggcagcttctggagaaggaattcagcaaccttatctccttaggcacagacaggcggctggacgaggtgggcgcggcaacagctcagagggctctgctcccagcggctcctcgagaggctgagctgagggggcggggcctgactattaatggtcacggttggaggcggggccaggagaggggcggggttaaaggagaggtgagacccggagaggggtggagtcaaaggaaggggcggagtcagacaaggcaggagtccctcaccggctgtccggctcctatacctaggacagcgccaagtctttcagccgctccccatcctggcggaagatgttccgggagaaggacctccgaggcgtaactcccgactcagctgagatgttgccccccaactttcgttcggctgcagcgggagccctgggctctccggggctccctctccgcaagctgcagccagaaggtggggggctcccaaatgcgacagcccttcctcgcttccctagggtggggcatggaccacctcagtagtccgggttctggaatggcctagtcctttctcgcccacccctgaggaatggactgctccaacgttccggactcccccgtcaggatgaaatggataaatcccactcccccttcccagggcgggagtgaactcgcccaatgcgagtttgagtccttggctgcggggaagggagggaaacccatgtggagcccggcgatcgttgtgacatcgggaagggaagtccaaagggaggaatcctggagaggaacagggaggagggtgctccaggctgaaccgctgctcgctctccctccaggccagacttctgggagttcccgggcagacggcgtttcggtccggacctattcctgctagtgcaggcctccaggtgaggaccgtgctgggcgaccttgggggtgcggggcggcacggtggatcttcactgctccacgcgctgcccggcgtcatgcaggtgacctcactcggacggaagaatcttcccgaggctgggctgttccctctcctgcccggactgtggcctcgccggggagagcgggcgggggagctcgcgccgaggactggaccatctgtacagaccagcgggagtgcgcgcgcccgcctcgcacagggccggggcctggaccaaaccacatgaactggactgagagggggaagaagcggggaggaagaaatcccgccccaaacgtccgctttccttttctctactttgtaatttattgatcagtttctgttgggagacgggtgtcctttacccgcgggaagggggcggggcttccctcc

SEQ ID NO: 8241 - DNA, 6000 bp, Homo sapiens
cccgggaggcggaggttggagtgagccgagatggtgccactgcactccaacctgggtgacagagtgagactcggtctcaaaaaaaaaaaaaaaaaaaaaaaaaaaaaaaaaaaaaaggattgtttctgggtgtgtctgtgagggtgttgccagggaggctgacacttgagtgagtggacggggagagggagacccactctcagtgtgggtgggcaccatccagtcagcgcagaaggtgggaggggctggcttgctgagtcttctggctttcatctttctcctgtgctggatacttcctgtctttggagattagactccaggttctttggcctttggactcttgaacttccaccagtggtttgtcggggactcttaggccttccgccacagactgaaggctgcgccgttggcttccctacttttgaggcttttggactttgagacgtgactggcttcttccttcctcagcttgcagatggactatagtgggactttgcctgatgatcctgtcagccagttctccctaatatactccctttcaatatatacatatatcctgttagttctggccctctggagaaccctaatacagatggcaaataaacacaggaaaagatgttcaccgtatgtcattagggaaccgtccattaaaacaagacaccactggccgggcgcgggggctcacacctgtaatcccagcactttggaaggccaaggcaggtggatcacgaggtcaagagatcgagatcatcctggccaacatggtgaaaccccgtttctactaaaaatacaaaaattagctgggcgtggtggcgcacgcctgtagtcccagctactcgggaggctgaggcaggagaatcgcttgaacccaggaggcggaggttgcagtgagccgagaccatgccactgcactctagcctggaagacagagtgagactctgtctcaaaaaaacaaaaaaaaaacaagacaccactacatacctattagaatgccaaatccaaaatgctggcaccaccaaatgctggcagaaatgtggagcaacagaaacccttcttcattggtgctggcaatgcagaatggtacagctactttggaggacagtgtggtggtctctcataatcctaaacatactcttagaatatgaaccagcaacactgctccccagtatttacacagatgggttgaaaacttctgcccacaaagaaatctgcacgtgcacgtttatggcagctttctttatcactgccaaaaacttggaaggaaccaagatatccttcaataaatgtcttactacattctggttgttgtaacaaaataccatacactgcgtagctgaggcaggaggatcacttgagcctgggaggttgaagctgctgtgggctgagacagagatcacatcattgcactccagcctgggtgacagaatgagaaaccctgtctcaaaaaaaaaaaaaaagtacagttttggtttttgctgtgactgggctcctggagtgagagctctggatcccagctgcaagatgaggaatctggagccgagagaagggaaacgagttttccaagtcatacggctggttaagtaaaagagccgggattatgacttaggtttcctgccccccaagattattattttttgaaacagagtttcgctctgtctcccaggctggagtgcaatggcatgatctgggctcactgcaacctccacccccagggttctagcgattctcctgcctcagcctcatgagtaactgggattacaggcatgcgccaccatgcccggctaatttttctgtatttttagtagagacggggtttcgccatgttggccaggctggtcttgaactcctgacctcaggtgatccacacgcctcggcctcccaaagtgctaggatcacacgcatgagccaccgcgcctggcctacccaagattattaaaataagttttcagaagcaaccccctactggccaggcgcagtggctcatgcctgtaatcccggcactttgggaggcagaggcgggcgggtcacctgaggtccggaattccagatactgtgaaaccccgtcttcactaaaaatacaaaaattagctgggtgtggtggtgcacgcctgtaaagagaattgcttgaacctgggaggcaaaggttgcagtgagctgagatcgtgctactgcactccagcctgggcgacagagccgtctcaaaaaataataataataatagattttttaagaaaagcaatcccctagtgacttcttagagcacatcatcagacagttggggtaaaattctgaagtggattaagggaggggtgctggtttgcctggatggctacatgaacatagccctggaaccaaccaaatatgtaactggacaacagaaaaataagtacagggtgcattaatcagaggcaacaatgttttgtacttaagtacacagaagacacgatgtgaagacaccaagagaacagtacttttcatggttagacacatttcttaggtattttttctactttgggattcttttgtgatataatttgtcctgtttacataatttttttccctgacatgtaagataaatgtatctaattgtgggcttacttgtaaagagttttcacatttaagttccagtcatttcattttatcgctgtgtctgtgtacagaatgctaaagaataagacataaaaaataaaagtacagttataaacacctcttttaaaaggcagagactgttcgcttgggcaaaaaaaagcaagatccaactacatgctatctacaagaaacccaccctaaatacaacaggtaaaaggaagctaaatggaacgtgggtcctggcttgtaccctggcatgtaaagaaaacattggaggaaaaggtggtgaaatcccagtaaagtctgggttttagttacagtaatgcatcatgtcagtatctacaacaaaccacttttgttggtgcttgtgatgacagcatcagaagaaactgagcataaaacatggtggactgcgtatgatctttgcaacttttcttttttttttttttgagacaagaatttcactcttgttgcccaggctggagtgcaatggtgtaacctcggctcactgcaaccttggcctcctgggttcaagcgattctcctgcctcagcctcccgagtagccgggattacaggtgcacgcgccaccacgcccagctaatttctgtatttttagtagagacgggacttcaccatgttggccaggctgatcttgaactcctgaccccaggtgatccacccatctcggcctcccaaagtgttgggattacaggcgtgagccagcgcgcccggtctttgcaacgttttgaataaatccaaaattattccagaacaaaaagcttagtaccaaaaagaaaacaaaaacaaaaacaaaacaaacccccccccccccacagagtaaaataacggaaaaagatctactatgctagcactaacaaaataatacgtagttatgaaaatggtatgtatttttcaagctagacgttcataatggtagaacatgaggaggaaaactgcctcttaaatcccaccacttactgtgacgcagtgaccggtccctgcagcggactggatagttgtatcagagtcctggacggaaacagatggcactcaaaaggtggcgcgcagttcagagaaatgcctatgtacggatttggtccaatgcctcagcctgacctcagggaccttcgggggtctgctccgcgcccacccttacacatctgtgaccccacacacttccaccccagcgccactgccaacagctacacccatccccctccaaccgcgtcagcttccagcctcggtccatctgaactcgccgtgccccctcccctgcgcccttccagattcatttgctagggaagcccgctcttccgggtggagctgttcctcatcccctttctttatcattctctccccagggcttccacatcaccgtgctgtggacaatcccggaactcctgtcacgccagtttacatttaggaacagtaatggctcccactgactcagtcaaaacaaggctgcggccgggcacggtggctcacgcccgtaatcccagcactttgggaagccgagacggagggatcacgaggtcaggagttcgagaacagcctggccgacatggtgaaaccccgtctttactaaaaacacaaaaattagccgggcatagtggcgcgcgcctgtaatcccagctactccggaggctgaggcagaattgtttgaacccaggaggcggaggttgcagtgagcagagatcacgccactgtactctatcgtgggcgacgacagagcaagagcaagactccgtctccgagaacaacaacaacagcaacaagaaaacaacaataaaaaaaataaggctgcgtgggaggcagaaagagctaatgcggccacgcttgtcccctcggggccaccgtccccacccagacttccggtctgccttaaaatgttcatgcgtaagtgcgtgggcaggaaggcgggctcaagcgcagctcgtggcgttcattggctgtgcagggccgagggaggcggtgcaaggccgccgcgtgacgtcaggacgccgcggtcaggacgtcgaagccaaagaagaccagagccagccgggtggcacagcggtgtcgtggccgtgttgctgatcgcctgggtggttgttggcgtgtccctgcagcgaaggatcctggttggtaaggggagcggcgggcgagcaggcgggcggggatagcatctccttttggtcttgcgccccgcgagccccgaggccttctcggccgtcgcagcagcagacgccgcgcgcgagcgtcgacagggtgtggcggcgcaggggcagccactgcgcctgcgcaccgggcctggggccgcgcgttcgggcactagcgcgcgtgcgccgtcgtcttctactttccgttcctctcccttggagttctcggggccccggggcgcccctcactcgccgttgaccgggtgttgccccgggcgacgggcggctcctgcgcgtctttctggggcgtggtgcgcaggcgcggcctgggcagtggctccgtggctagtcgtggggatccgagcggcctcctccacccggcgtcctcctttgccttcgcccagcctgcgggacggccaggtgctcccgggacctcaggcctcgcgtctgatgcctgtctctgttcttgagacccgtctgggagtcctctgtccagcccccaactcctgaccttacctctaatctcccttctgccctggggctcctcttcctgtgtccccgccacgatccctcgtctccacccacgccctgtgtcctgtttaagttaagcctttgcgtttctagggcttttccccagctccagactcccgttcctatcccgtcaactcgtgagaattccggttctcctgcgggattaattatcctacttatcagttactctctctcgggagtttaggctcctgaatccttgctccggagacactccacttttcttccaattctctctgtaccccactcttaattcgttgaacatgttttgggtcttctttggcattcccaaagctttatgtccagacacccaaccaaggtgatcccttttctctcccagccctacccctgcttccgggaacctcccgtggaagcaggcaggggtagtcccactgaggactcccacgtaggtctctttactgcccttcggagacctttttgaaatcagtctgtcagtgctaagaacccatttcttcacgttggggttcacgttggcattctcaggagcgctcaacgaccacttgcttccagggttaacttccggaaaatccccttttcctctcaaaattttcttctcttctccaatattcttccagccccctcgatgctccctgaaaggcctcccttttcacagagttctcggaaacctttccaccctctcagccttaagggttccctcagactcttctcattatagcatccatcctcttggttcaggttcct

SEQ ID NO: 8242 - DNA, 6000 bp, Homo sapiens
gggcagcgaggaggtgaatcccaggagcttgggggtcccctggtttatgctgtctgccccttcgggagttgatcctggtgggagttgatcctggtgtgtgagcggggacggagttgatttttccgtaatgctcagcgcagggcttgtcagtgtggacgctgcgacactggggcaggataggtctccctgctgcgtgggcagggatggggcctgagtgcctctcctctcctctcccctgcaggggcagaaccccttcgagctggccttctccctagaccagcccgaccacggagactctgactttggcctgcagtgctcagcccgccctggtgaggggcccgagggggaggagggcacagggcagctgctgtcgctgccatggcagtggccagcccctgcaggggggtgggggccggccggccagggccatgtcctgagccccctgggcgtgcctcctggaacagacatgcccgccagccagcccattgacatcccggacgccaagaagaggggcaagaagaagaagcgcggccgggccaccgacagcttctcgggcaggtttgaaggtgagcggggatggcgggcattgggggagccgggagcggggaaaagccagggtccctctcacgcccgccccgctgcccggcagacgtctaccagctgcaggaagatgtgctgggggagggcgctcatgcccgagtgcagacctgcatcaacctgatcaccagccaggagtacgccgtcaaggtgggcccgcgccgcgccctggggaacccagcgccttgggatcggtgttgagcgggggtggaaacagtgtgtggcattccggctgtccgtcctacagccgggaagacccgtgtctaaaagtggccaccgggccctgagtccagtcgggaatgacagtgagggtggcccctctggtaccagggtgggggcttcagacagaggcactgtgcccattgggtcccctgggccgtccctgcctctgagctgtccctgagggtacatgacagtttggtttcaaggatcaaaatgcaatgtcatatcccagggcccagaggggctctgcgtttggggaacctcagtgcaggcccgtgagagccccctgtgtcactctagccctgggcggctgctggacccagggtgtggccgaagggctgggagcaggagccctgttgaggctctggttgtgaccctgtgaccttgtgggccggttggatcccgtgttccaagaaatcttccaggcttccctcgtgacctggcatccggctcccgggctgggtggggtcccaggagggctggctgcctgggaaagagggccaggtgtgccctggcgagcagggctcgccaggagcctgtgggtcctggtggacggccaggctagagctttcctctgaggagaaggaggaagaagaggggtggccaacctggggaggttactggctaggtgctgggaccacagtggcagcaggcagggacagacacagtacggacggtccctgcctcctgggagcccccaggcaggccaaggcaatggtgcaggagcactaggcccctccggaagcacttccacacagcaggcgttcctctgagcacagccctctcctggtggcccagccttgcttcctgtctttgtttgacagatagggacactgaggctcagggggttaggtagcctgactcatgctgtgtggcctctgggggatcctaactggtgtctcagagccacctccctggtcatcttgccacattgacctggtgtggtcagtgttgggatctgcagagcctgggggacttcctgctggaggtgttgttggccactgacgtccgggagttggtctggccaggtggcagtgggaggaggaggtgtcctgggcgagtcagagaggcgaatcgctgggcctgtgggtctgaggagcgttgtttcgttctatggggactggggtgtgggccctctgccctcggggtcatgctgcgggaagccaccctggggtcacctggtgccgtgaggctgctggctggatgcagagcccccatgctgggacctcagaataggccccttccatgccaggaggggctgcgccccctccctgaagcagcattctagccagccacccaagggacaggacgaggttcagttttgtccagaaccatctgcagtgcctgctgggcacagctttcagcagcggcctgggtggtggtatttcaggacaccctggcgtccagttgttctcttgcccctcgctgggacagtgttgtctgtcagtatagacatgggactgcagaggcaggagccagggactcaagggtggaatgccacatccctgctgccaccaggccatcgcactgggcagggaaccctgggcagagtgctcatgcagccaggcacccgcccagtgagaggggctaacatgtccagcctggcaggagggtcccagcaggtgccaggggaagctgcagacgcctcctcaccccacctctgtgagtgaaggtggcagggagcagctggagctgctgggggcagtagagtggcttcctgaggctctggggctcagggaggctggatccgccagtggctgggacagccaaccagggtgggcccgaaacagatattggctgaggcggcaggcaagtgtctgcccaggctggcacggagctggggagcaggacttggtgctgtggccacatgtgaggtggggcctggtgggctggcagccaggtgtcctgaggcctccctagttctatgggtgaccaggtacccaccctgtggggaaagaggactacagctgactgtctctgggtcagggagggtggccgcccagggcagggaaccctcacgtcctgtgggggtattttgcagaagtcataggtctcaaatgtgtctctgagggctgtcagggtcacaggtggagagcagcctccactggctttttttttttttttttttttttttttttgaggcgaagtctcactctgtcaccaggatgctggagtgcaatggcgcgatctcagctccctgcaacctccacctcccgggttcaagtgattctcctgcctcagcctcacaagtagttgggattacaggcgtgtaccaccacacccagctaatttttatattttcagtagagacagggttttgccatgttggccaggatggtctcaatctcctgacctcatgatccacccgccttggcctcccaaagtgctgggatgacaggcgtgagccctgctttctagagttgcagggcgttaagtgtggtgaattccagccgtggcagtggagtttctggccccttctcgactatgagcgtcccaccaacccaggtgctgtgtcctttcgcctgtttcagatcattgagaagcagccaggccacattcggagcagggttttcagggaggtggagatgctgtaccagtgccagggacacaggtaggtgagccacccttgccaccgcactggcctgagctgtctttcagtggatgaagggcctgagtgccacatcacccccagcaagcgtctgtagggcacccagtttcccaggccctgcattcccctccctgaagcaggctggctgacagccccaggcgggcagtgtgaagctggcctattgccccagtcccagcttccggtggacaggccagcaccaagagggtgggcccctcctaggccgggcagcaggtacccaggggcctcaggaagcctcagctcctctcctgcccccacccccaccccaggaacgtcctagagctgattgagttcttcgaggaggaggaccgcttctacctggtgtttgagaagatgcggggaggtacctgggggctccaggctgtgaggagggagggagctgggaggtattacgggatgggggcctagtgccacctgcaggagggggcttgtggggtgagtgtcctgcccaaatggtggctcaggggtgaggcctttgtgctggaggaagccagtgtgggggcgtccccgccaaagtggaggtgggtgctggccttgaggggactttgaggtgacctgcgtgttccccctgtcctgccctgccctgccctgcccaggctccatcctgagccacatccacaagcgccggcacttcaacgagctggaggccagcgtggtggtgcaggacgtggccagcgccttggactttctgcataacaaaggtaggtggtgaccccgcccggagtctcctagggccgcctgccaaggactcctggaagacctccagaccctcaccccgtcgtggttctgtggcttctcccccaggcatcgcccacagggacctaaagccggaaaacatcctctgtgagcaccccaaccaggtaggccagttccggcagggtggccccgcgggaggggtggaccgcgtgggaccccaggctcacggaccttttggcccctcccaggtctcccccgtgaagatctgtgacttcgacctgggcagcggcatcaaactcaacggggactgctcccctatctccaccccggagctgctcactccggtgagggcccgcggggagggctgggggctcggccgcctgctctgcggttgcataacctcgcggagcctgggccatccagcagctccaggccgcggagctcgggcttccgcctagcaacagccgctgattggttgggcggggtgtcgcggcggggcctcgagcaggcgccccaacgcgtcggtgtttggccgggtggggcggggccgcggcgggggaggggcgagctctgcacctgctgattgggcgggggcgcgttcccggcagccgctgattggtcgggcccggcggggcggggtccgagccggctggcgcaggtgacccgcagttacccgggctcggttcccacgtaatgctgggaaaccccggctgacgcgcccctcccccgcccgcagtgcggctcggcggagtacatggccccggaggtagtggaggccttcagcgaggaggctagcatctacgacaagcgctgcgacctgtggagcctgggcgtcatcttgtatatcctactcagcggctacccgcccttcgtgggccgctgtggcagcgactgcggctgggaccgcggcgaggcctgccctgcctgccaggtgcggcggcccgcgcaccctcctctcctgggcaccctcctcccccgggcctgccctgaacaccccctaaccccaggggacctgccctgcgcaccctctaagtccaggggacctgccccctgaccaccccctaaccctcggggacctgccctgtgtgctccccagacccccggggacctactctgtactccccctaacccctggggacctgcccggtgtgccctactccctgatgccatccacagggcagtgccgccctgtctgccagtttcccgaaggcttttcaggtttgcctgcccaagggaaaccccagacagggttcagagagctgagaggtggagtgaggcccctggtttggggggatcaggctcaggctccctgcccgcggcttaaggctcagcatctgtggcctgtggtccctggaaccaggtccctcagagctgcttttttgtaaatccagctccacttgggtggagctgactctcctggtccggctcccagccccctctgccccaggcgtgcgtggtctagggcctggtctagggcctggttggggtccggttggagccacgtgtcagtgcacagtatccaggcccttgggcaggtctaagctcccctgtgttctatgtccccagaacatgctgtttgagagcatccaggagggcaagtacgagttccccgacaaggactgggcccacatctcctgcgctgccaaagacctcatctccaagctgctggtccgtgacgccaagcagaggctgagtgccgcccaagtcctgcagcacccctgggttcagggggtgagtaccagccgcacgggcggcaggaggggtatgggggcgctgcagggtggcctcagagcgagcatgggaagccctgagggtgtagcctggacaccctgagatgc

SEQ ID NO: 8243 - DNA, 6000 bp, Homo sapiens
gcgatggcgctaactgaagaatcttgctctaaaacctcctgtggctccctagtgccctccaggtaaaatcccagctcctcagcccagcagcacgtgctgccatcgtgtcccggccagaagccacactgcagagtgctcaaaggcccaaggtcaagatcaaaggcctgggataacatcgtggttctgccccctacccacttggccaagtcacttcacttctctgtgactcactttccccattttttttcgttttctttttttttattttttatttttggagacagagtctcattctgtcgcccaggctggagtgcagtggcacgatctcggctcactgaaacctccgccttccgggttcaagcgcttctcctgcctcagcctccagagtagctgggattacaggcgcccaccaccacgccttaatttttgtatttttagtagagacggggtttcgccatgttggccaggctagtatcaaactcctgatcctcaagtgatctgcttgcctcggcctcctaaagtgctgggatgacaggcctgagccaccctgccggcctgttttccccccatctctaaaatgggtgtgacaactgtacctaaaggttaaagtgcttaaggcagcccctggtgcggagcaaaaacatacagacctgtgtggcttggttgattatttatagtgtgggccaccattctgggctgccttctatgcagaaaaaaaacctattttctaaaaacgatgatttcacaatgactctctccttcacaggcctaggtccctgtgggtggcccagccctcacctcaccgtgctcaaggtatctgtgtccagttctgcttcccctgacagtgtgggggcttcgaaaatggggctgtttggtcactgggcgggcacactgataccggaaggcgcctgcctaaataaacactggcaggtggcctcccaggagagggggtgtctggtccccacggcagtgggggtggggtggcaggggtgctagcggcaggactggcttcaggggcagtctaggaacgcagtctctcagggccctgcaggaaaaacaagggtgttgcggttggttgaaggcttggctgttactaagtagtattaatctctgtttctttgtttcttttttttttgagacagagtttcgctcttgtcgcccaggctggagtgcagtggcacaatcttggctcaccgcaacctccacctcccaggttcaagcaattctcctgcctcagcctcccaagtggctaggattacaggcgtgagccaccatgccaggctaattttgtatttttagtagagacggagtttctccatgttggtcaggctggtctcaagctcctcacctcaggtgatccgcctgcctcggcctcccaaagcgctgagattacaggtgtgagccaccacacccggccaccaagtagtagtaatcttaaaaatccaaaatcctaatcctttctagcctcatcttttttttttttttttttttgagacagagtctcactctgtcacccaggctggagtacagtggcgcgatcttggctcactgcaaccaccacctcccagcttccagcgattctcctgcctcagcctccaagtagctggaattagaggcgcccgccaaaacaccccggtaatttttgtatttgtagtagtgacgaggtttcaccatgttggccaggctggtctcgaactcctgagcttgtgatccactggcctcggcttcccaaagtgctgggactacaggcatgagccactgctcccggcttacaaaaaatgttaaaattagctgggcatggtggtgcactcctgtagtcccagctactcaggatgctgaggtcggaggatcacttgagcccaggagtgggaggctgcagtgagctatgattgcaccactgcactctagcctatgcaacagaggactgtgtctgaaaaaatttttttaggccgggtgtggtggctcgcgcctgtaatcccaggactttgggaggccgaggcaggcagatcacgaggtcaggagatcgagaccatcctggctaacacagtgaaactccgtctctactaaaaatacaaaaaattagccgggcgtggtggtgggcgcctgtagccccagctactcgggaggctgaggcaggagaatggcataaacccgggaggtggagcttgcagtgagccgagatggcaccactgcactccagcctgggccacacagtgagactccacctcaaaaaaaaaatttttttttaataaaaatattaaaacactgctttaaagattattaatcttgatcactgaaggctatcacccttacctgccaaggtaaggagcctggggttccaagtctattttacagatgggaacacccaaggcccaaatcaattgcattcattcaagggagcaggctgcctagtggatgacgatgatgaagagactgtgtttcgcacctgccaaagggggaccttaatgtcatagccttatttcagtagcctctttgggacctgttctctgcgtggcagagagagggatcctttaataaccgccaccaggtcccatccctcctcttcccacggctctccaggattcccacctcactcagagcaaaagcccaagtccagggccaggcgcagtggctcacacctgtaatccctgcactctgggaggtggaggcgggaggatcacctgatgtcaggatttcaagaccagtctggccaatatggtgaaacctgtctctactaaatatacaaaaattagccaggcgtggtgatgcgcacctgtaatcccagctactcaggaggcagaggcaggagaatcacttgaatccgggtggcagaggctgcagtcagccaacatcacatcactgcactccagcctgggcaacagagtgagactccatctcaaaaacaaacaaacagctgatcacggtggctcacgcctgtaatcccagcactttgggaggccgaggcgggcagatcatctgaggtcgggagttcaagaccagcctgaccaacatggagaaaccccgtctctactaaaactccaaaattagcggggcgtggtggcacgtgcctgtaatccagctactcgggaggctgaggcaggaatcacttgaacccaggatgcggtgagctgagattgtgccattgtactccagcctgggcaacaagagcgaaactccatctcaaaaaacaaaccaaccaaccaccaggtcccgtccctcctcctcccacagccttccagggctcctacctcactcagagcaaaatcccaagtcctccccaagacccacaagtccttgctggactggcctgcttcaccagctacagagttagcagggcccagtgcaaaagaaaactcaaaggccccttgttcaaaaatgattagaaatctcaaaatgcagcagtaaatattaacccaagcacaagccctgctgtggggtgggggggccctggacaaaagcacgaagcccccggccctgcctccctccggccttcctgacctccccccgggcactctgctgccaggcacagtcctgccccagggcctttgcacctgttggtcctgcctctgactacctctgtaccccatccccctgttctccctccttcttcaggtcgctttaggggtggaggaagccgtctctgatcctccctcccacctctttaactttgcaccttcctaccctgccattctcccggctggtttttctgcagaactgtccccaccatctgacctgccaggaattcagcttgtgaatttgtctctgtctgtctccaggcaccaccaccagggcagggacccacccccgccccgccccaccccagggccctggagcagcggggcctggcacacagtaggcgttctataaatgtgtcacaagaatggcttccctcaggaaggcggcattaccgctgcctttctgcagaaaaggaaactaaggctcagcaagaaccaccgcccagccagagccaaggtcacagagcacgtccgtggcacgcgtccaggtcgtgccacagcagggccggcggcttcgacgcgggcagccgggtcccttttctttgacagatggggaaaccgaggcccggccggctgccgggtaggagagggtggcgggggccgctgcccggggcgggggcgggccgggcccaaggtcaccgcggcgggcgggccacggggaggcgggccggcgtggggatccgcaggcctccccgggcgcgcgcgtcccccccctcggcggcgcgcacggggcacgggcggcggcaggtggagccgaagcctccgcagcagccgagccgcggccactgccggcgtcgccgccattagacaatagcggtggggccggggagcggggaggcgggcggcggggaggggcggggaggggcgccgggcgcgcaggaagcggggcccggggcgcgccggggccgggcgcgcggggagggggcgcaggaagcgggcgaggccgggcgcgggaggcggcggcggccccgggagctgccgatcggcgccgggacaaaggcgcggccgcccggcgcccccagcagcccgagccggggcgcacagccggggcgcagcccgcgccccccgccgcgattgacatgatgtttccacaaagcaggcattcggtaagcggggcccgtccggccggcgcccccaccccggatccgggccctacgcccccgacccccggctcccggccccgcgccccccaacccccaggcccggtgcctccggcccggcgccccccccaactccccggccctgtcttccctctccagctcccagcccggcgcgacccccctcccctcctgccgccggcccccggacaccccccctccagttcccgatccaccccagcttccgggccccgagcccccccgccgcagctcccggcttggcgccccccccccccaacccgccgggacagtcagggcctcggacggccttggcctcgggcctggggcgctccggaagccccgcgaggcacctctagcccggggatcctttgggggcctgtggtggggggggtgatccgaggcgcacccctcccggaagagcgtgtccccgaggaagggcgctgggaatctggggttgggcccccccggaagatttcgagcaccgagagagagacccctcccccaagaggactttgcagggaggaatcgctgccccccaacttggggagggggctccctagggcgcgtttctacccccctcggatgtgcactccctcccggcgctttggagggcggtagagggcgcaccctgccccccatctagggcgggccttaaaacgcacccccactgcctgggggtggcgggggacggggcggctccgggcgcacccacccgctcggcttcccccgggagaggcggggggcaggaagcgcgggtggggtcgcgccaggggccgtaaacacgggcccaggaagtggggcaggagggggggcgccgcagctgcgcggccgctccctcctagccggcccttgaggggggtccagcccacgcctgggcctgacccgggccgccccatccctacagggctcctcgcacctaccccagcaactcaaattcaccacctcggactcctgcgaccgcatcaaagacgaatttcagctactgcaagctcagtaccacaggtgagctgggggactgggggtccctgcgtcccgagaatgtgagtccccccatttcttctgcgcagatggcaaggctgaggcctggagattgggaaaataatatatgctagactctgacctaatcacttgacaaatactgaattcatttattttaaacagccccattttgtagaggagaaaaccgaggcacaaaaatagttaaataatttgcccaaagattcagctgtgtggcttcagagcccctccctcctccccaatacccccaagtcccccattggataaaagaccttccaacaattggagttacggcacggactcgccatccctcaacccccaaaacagaaacattctgcagcctggtcatc

SEQ ID NO: 8244 - DNA, 6000 bp, Homo sapiens
ttggggagagacacgattgaacccataatagccagtcataccccatactaattaaaaggcatttggtgttacagttacaaacattggcatcaaatggctgctctgtcagtcactagctgtgtgatcttggtcatgtttgcccctctgtggaatggaaaataaaaaaaatcacatgcctgtctcataacccaggtgtctacaagctttttctgtcaagggtcagagagtgaatattttccactttgtagaccccatggtctctgttgtagctactccatcactctagtgggaaagcagccatcgatgtgtgtaaatgagtgaggatgtctgtgttgcaataaaactttatttataaaagcaattggctgggtgtagtggctcacacctataatcccagcactttgggaggccaaggtgggcggatcacacaaggtcaggagttcgagaccagcctggccaatatggtgaaaccccgtctctataaaaagtacaaaaattagctgggcgtggtggcgggtgcctgtggtcccagctactcgggaggctgaagcaggagaatcgcttgaacctgggaggtggaggttgcagtgagccaagatcatgccactgcactgcagcctgggcgacagagcgagactctgtgtcaaaacaagacaaaactaaaaaacaattggccggcacagtggctcacgcttgtaatcccagcactttgggaggcagaggcaggcggatcacctgaggtcgggagttcaagaccagcctggccaacacggagaaaccccgtctctactaaaaatacaaaattagccgggcatggtggcgcacgcctgtaatctcagctactcgggaggctgaagcaggagaattgcttgaatccgggaggtggaggttacggtgagctgagattgcaccattgtactccagcctgggcaacaagagtgaaactctgtctcaaaaaaaaaggctggacggggtggctcatgcctgtaatcccaacactttgggaggccgagacaggcagatcacctgaggttgggagttcaagaccagcctgaccaacatggagaaaccccgtctctactaaaaatacaaaattaaccaggcatggtggtgcatgcctgtaatcccagctacttgggaggatgaggcagaagaatcgctagaacccgggaggcggaggttgcggtgagccgagatcgtgccattgcactccagcctgggcaacaagagtgagactctgtctcaaaaaaaaaaaaaaaaatcgtgggccatattttgtggcccctgtcaaagggagatctgcacggtgggatcaggacaggcttaaccaaaaacatgaaggagggtaagggagtgagccatagggatatctggggggtaacagagatataggcagagggaacagccagtgcaaaggtcctgaggcaggactgtgcccagtttaaagaacagatggggagcacaatatagcatgtagtaagccctcaaataagtggttgcatgtaagtgtgtgtgtgtatccacacatgcccgttatattgtcgtatgtaatatatatgatgcttatatattacatataactaacataccattagacagtcagttgctccagggaagagtccattgctgtttttccttgtctgcatactggtgtattcactagtacccaatacatggcagatgctgaaaaaattacttttttttttttttgagatggagtttcactctgtcatccaggctggaatgcagtggcgtgatctcggctcactgcaacctccgcctcttgggttcaagtgattctcctgcctcagcctcccaagtagctgggagtacaggtgcccaacaccatgtctggcaatttttttttttttttttactagagacgggagtttcaccgtgttgaccaggctgatcttgaactcatgacctcaaatgatctgtccgccttagcttcccaaagtgctaggattagcagcatgagccaccacacctggctaaaaattacttctttttgtttgttttttgatggagtcttgttcttttgcccaggctggagtgcagtggcacgatctcggctcactgcaacctccacctcccaggttcaagcgattcttctgcctcagcctcccaagtagctgggattacaagcacacgccaccatgcccggctaaattttttattttttattttttttatttttcttttagtagagacagggtttcaccatgttggccaggctggtcttgaactcctgaccttgtgatccacctgcctcagcctcccaaagcactgggattacaggcatgagccaccgcgcccggccaaaaaattacttcttaaatgaatgaatgaatgctatgtatgtatccttccctgcagcctcaacttccttggctcaagcaatcctcctgccttagcctcccgagtagctgggaccacaggcacacaccaccaggcctggctccaaacttttttttttttttttttagatggagtctcactctgtcgcccaggctggagtgcaatggtgcagtctcggttcactgcaacctccgcctcccaggttcaagcgattttcctacctcagcctcccgagtagctgggattacaggcgcctgccaccatgcccagctaattttttgtatttttagtagagacggggtttcaccatattggccaggctggtctcgacctcctgatctcgtgatttgcccgcctcagcctcccaaagtgctgggattataggcgtgagccactgcgcctggcccaaacttttttttaaactcacaaagtctcttaaaaatattggaattgattgtcatcccgagaagaatgagcggatttctaaaaatctagatctctggcttctcttgaaaaatgagtggatgtggtgcctggctcccttgccatattctgttaatgtcatagtccaacgctgggacagtgttggaaggactgctcaagactgcaaataccaggatgttgggtccttgaggaccatctagaaggctgactatttatttatttattgagacggggtttcgctcttgttgcccaggctggagtgcaatggtgcgatctttgctcactgcaacctctgcctcccggattcaagcgattctcctgcctcagcctcctgagtagctgggactacaggcgcggaccaccacacccggctaatttttttgtatttttagtagagatggggtttcaccatgttggccaggctggtcttgaactcctgacctcaggtgagccgccctccttggactcccaaagtgctgggattacaggtgtgagccaccgtgctcagccgaggctatttagcaagcatgtattgagcacctactggctttcagtcatcaagctcagaagtatctctgtgttaatccaactcaattccccaaaacaagtctgtaagtgtatgccattaggcacacagcctccacagccagactgcctgggttgaaatccgtcttctgccatccactgatagtgtgactttgggcaagtgacatcacctctgtgtgtcttgctttcttcatctgtaaatggggaaaatagtgtaatagtgtttacctctcaggtaacaccaggtaagtctcagatgacagcattttttttttttttttgagactgggtctcactctgttgcccaggctggagtgcagtggtaccatcatagctcactgcagcctcaacctcctgggcttaagcgatcttcccatctcagcctccggagtagctggaacaacaggcacgtgccaccacgcccagctactttttttgttttttgagccggagtttcactctgctgcccaggctggagtgcagtggcatgatcttggctcactgcagccaccacctcctgtgttcaagcgattctcctgcctcagtttcccaagtagctgggattacaagaatgcaccaccactcctggctaattctttgtatttttagtagaaacggggtttcaccatgttggccaggctggtctcgaactcctgacctcaggtgatccccccgcctcggcctccacaactgctgggattacaggcttaagccccctcacccagcccagctaatttttaaacttttagtggagacggagtctggctgtgttgcccaggctggtctcgaagtcctgggcttaagtgatcctcctgcttcagcctcccaaagtgctgagatcacaggcctgagccaccacactggcctcatagcattttgcagaggaagaaatggaagttgaaggaggcgacgtgttgccgaaggtcacctggctaggtctgggtggcaggcggggaaagcaggcgggggtgtgtgggccgccttcccgtgctgacctttcttgggggtaagtgtgtttgcttctcctgtttcctacagatctgcttgggcagctcctgcagaacctggaacagtgaatgggtaggggacactgggcgtgcagaaggcggggggcagtgtggaacatgccttcaccacctccagcttctgctgccggaggctgcacccacctgtgcccatggcctgcacaggcccatcacttcctagcgccttcgacattctaggtgcagcaggccaggacaagctcttgtatctgaagcacaaactgaagaccccacgcccaggctgccaggggcaggacctcctgcatgccatggttctcctgaagctgggccaggaaactgaggccaggatctctctagaggcattgaaggccgatgcggtggcccggctggtggcccgccagtgggctggcgtggacagcaccgaggacccagaggagcccccagatgtgtcctgggctgtggcccgcttgtaccacctgctggctgaggagaagctgtgccccgcctcgctgcgggacgtggcctaccaggaagccgtccgcaccctcagctccagggacgaccaccggctgggggaacttcaggatgaggcccgaaaccggtgtgggtgggacattgctggggatccagggagcatccggacgctccagtccaatctgggctgcctcccaccatcctcggctttgccctctgggaccaggagcctcccacgccccattgacggtgtttcggactggagccaagggtgctccctgcgatccactggcagccctgcctccctggccagcaacttggaaatcagccagtcccctaccatgcccttcctcagcctgcaccgcagcccacatgggcccagcaagctctgtgacgacccccaggccagcttggtgcccgagcctgtccccggtggctgccaggagcctgaggagatgagctggccgccatcgggggagattgccagcccaccagagctgccaagcagcccacctcctgggcttcccgaagtggccccagatgcaacctccactggcctccctgatacccccgcagctccagaaaccagcaccaactacccagtggagtgcaccgaggggtctgcaggcccccagtctctccccttgcctattctggagccggtcaaaaacccctgctctgtcaaagaccagacgccactccaactttctgtagaagataccacctctccaaataccaagccgtgcccacctactcccaccaccccagaaacatcccctcctcctcctcctcctcctccttcatctactccttgttcagctcacctgaccccctcctccctgttcccttcctccctggaatcatcatcggaacagaaattctataactttgtgatcctccacgccagggcagacgaacacatcgccctgcgggttcgggagaagctggaggcccttggcgtgcccgacggggccaccttctgcgaggatttccaggtgccggggcgcggggagctgagctgcctgcaggacgccatagaccactcagctttcatcatcctacttctcacctccaacttcgactgtcgcctgagcctgcaccaggtgaaccaagccatgatgagcaacctcacgcgacaggggtcgccagactgtgtcatccccttcctgcc

SEQ ID NO: 8245 - DNA, 6000 bp, Homo sapiens
ctccagagacccccgagcacaaccctgccccggtctggatagacccccactgagagcctggggcagaaactggagaatcaggaaggaagaataatttgtatgcaaaacaggttctgggaagtgaggcctgatgggaagaggagggatttggcaagatgacagtaagggaggacatagtttggtgagtgtccatagtggctgctgtcaaagaaaaattgcacaggcaaggcagactttattcaaggagattgcaatagggaaagagactgaactcaactccactgaaacaaatatgctagggtggttaagccctaggtgagttaatggaaaaatattggaggacaatgggggaggtgggtcaatgggatgtgtccatcacatggagttattctgtcaatgggatgtgtccatcacatggagttattcctgagtctgcaaatgtttttctctgtgattgggccatctgagtttgctgattgtcaattatcaaagtgaggctcctaccctcccacagagactgggcgataggggtgctatctcccttgatgatttcaaagggataattcccaggtccttgaaaaagacattcctgggttgtaacgctggcaagagaccaggagaagatttacctacatttcaaaggcgcagagaaggccgggcacagtggctcacgtctgtaatcccagcaatttgggaggccgaggcgggcagatcacttgaggtcaggaattcaagaccagcctggccaacatggtgaaattctgtctctactacaaatacaaaaattagccaggcatggtggcacatgcctgtaatcccagctactcgggaggctgaggcagaagaatggtgtgaacctgggaggcggagcttgcagtgagccgagatcacgccactgcactccagcctgggcaacagagtgagacgccgtctcaaaaagaaaaagagagggggtgcggggggagcagagaaagaatttgcaattatatttggccctctgtgtctatggggttctgcatccacaggttctacctccacgcattcagtcaactttggataaaaaatattttgaaaccaaaaaacaataaaaaaaatagaaatagaaaacaataccgagggatgactgtacaagttttctaaagtaagtgtcctacaaaaagcgtgatccagggccgagaggaagaaacctgtctaaagtttagtcgatctgaggggaccattaaggctcttttggtcaccagtgttacgtggactctgccatccagatgtgggtctgagactctgggtgtctgcacatggctggtgcccactctgtggctagtatccactagcctgatccagcaggcagcatctccaggcagcaagaagtgagacaaaccaggaggtgctagcctggggtctctgcctcagcaccaaccacctgctggggcctcctctggacctcctcacctgctgagtgtctgagcatccacatgtgtctgcctgtgtcctcgggggacagtgaccctctggttgtctgctgtatctccatcttcttgatttcattcatttaataaatgtttctgaaacacctgggggcatgtcgtgtctatcggggtgtccctcttcacctctaggtttgtctgtgtgactacacagtcacatctgttcacagcaggctgtgtctgtctttctgcatctcatgtgtaattgcttcctcgaaggcacactctctctctctctcttcctctctctctgtttctcttttgtgtctgtctctccctgtatgtctcttggtgcctctctgtttgtgtcttcattcattgattcattcgttcagtcatacggtatctcagacattcctggaggcccccgaagagttcacagcccggtaggggagacagacgctagcccagcctagtttgatcagggctgggagacaggaaggtgctggaggctgagggtgtgtggatgagtggggagatggggttcagagaaggtttagatgatgggacgatgaacgtgtctttgggtgtggagacatcccaggattggaagctgtgtgggtggtgtgtgttggggtagggggagggaagggaagtcaaaaggccatatgtgccaccctcagattagagcagagtgctgggaggggtgaaggaagaaggccaacaagacaccaatcattcaaaattaagggttccagacttctagttctctcctccctcagacccagaagtgtagatctccagcaactgaggatcaccctgtttccatcacgattacctaggaagagacccgcccacatagggagggtgggacgaagaaatactggccaggctgggtggccgggatgcttaggactcagtaaggagaaccagccaggcagcacatcacagcgggaggagctgtcccaggtggcccagctcagcaatggcaatgggggtccccagagtcattctgctctgcctctttggggctgcgctctgcctgacaggtacgcaaacttctgaatccagtagtgagaaggggcaggtggcctggactcctagatctgagggaggagagactgggggcctggactcctgggtctgagggaggaggggttgggggcctgatctcctgggtctgagggaggagggggctgggggcctgaactcctgggtctgagggaggaggaggctgggggcctggactcctgggtcttggtgggcaggagcctggaggctatgtcattttcatttctcttccctgcctttgttcttctcccatcagtcatttttcctggtgtctctcttcccaccatcccagcctttcttctcttccttgcccaacccccaattcaaaggtatttccagggagccctcaggactctttccgaaactggcagaaaccctggcttcaccttcaggcaacctctaccccattgtgggctaggacaggaacataactcatttcagaatggaagtggttacaaagacagggaattagaaatgtagaaaggaggctattcctgcacacaaccaaatctgtgtgtttctgctccttaatgggagagagtttgatttctgtatgtgtccaggttcagtatgtcctatgagtctctgtgcttgtgtgtgtttctctgtataggttttaaagtcttagtctgaacaaatgcgtttgtgggtctgtttctgagtttgctttctttgtaaaagagatgcgtgtgtaattttgtgtatctgtgtctgtgtttatgtatctgtgatttgtaagcctatatttatctctatgtatatatgctcagtttttgttttttgttttgttttttgagacagggtcttgctctgtcgcccaggctggagtgcagtggcacaatcacagctcactgaagtcttgacctcctgggcccaagcaatcctcccacctcagcctcctgagtaactgtgactataggcatgtgccactgcgcctggctaatttttgtatgattttgtagaggtggggtttcactatgttgcccaggctggtctcaaactcctgagctcaagcaatccactcacatcagccaatgagactggccttttttcttgtggttgtttttaaaatagagataaggtctcactctgttgcccacactaaggtgtagtagcacaaccatggctcactacagcctcaaactcctggctcaagcaattctcctgcttcagcctcccaagtagttgggcctgcagggggacaccaccatgcctgaccaattgtttgggccttttgatgtgtttttttttttttttctctccatgtatctgtgttacatgggtctatacattttgtatccatatgtgattttgattttttttttttttttgagacagagtctccctctgtcgccgcccaggctggagtgcagtggcgcgatcacagctcactgcaacctctgcttcccaggctccagcaattctcgtgcctcagactcctgagtagctgggaccacaggcgtgcaccaccatgcccagctaatttttgtatttttagtagaaacggggtttcacctgttgcccagactggtctctaactcccgagttcaggtgatcctcctgcttcagcctcccaaagtgctgggattataggcatgagccaccacccctggcctccatatatgattttaaactgtatgtttttgtgatctcattttcctgtatctctaaacatcgcataattgtggcctctggttttatttgtgcttctgtgatttgggacctctctgggtatgattttctgtgcatctggtccctctctgtgttgatatggttatcatacaggcacaagcatcctcacagacatacgctttgtgtctgtgtgattttccatgtgtgaagtgctgtgccttagttagggaggtttatattgcagggtccagatgcgtacttgttttgtgtgagaatgtaaaactctgcctgggtgcattcaggatattctgtgtatatttgtgagacttggatgaacctgtgtatgtgttgttattgtgtgtttatgtcagtttgtgtgttgctggggctgatgtatgggtttacagggcactacaggaccacacttcactctacctgtcctggagtgcatgtttcttgtcaggggtctcttactgtgctgtccactttgtgagttaagcttggggaaggatgggcagagcaagaatgaatcacttttccttcctattctaagtcatagctagggagagggcttcctggaagagggtggagacctggagtgtcctggagggaaaaaactggactgtcagctgcagagaggtcattactctgccatgagacagacacagctgtgaccagctgcaatagcagcacctggtctctcaaggcgtgtcttccctgggagcagaggggccaggcccgtgtgcctgtcatttgctgggtggagctctgagttcctgggacaggctcacactggccctgctgactctgccacgcctctctccccagggtcccaagccctgcagtgctacagctttgagcacacctactttggcccctttgacctcagggccatgaagctgcccagcatctcctgtcctcatgagtgctttgaggctatcctgtctctggacaccggtaaggagcgggagccgggggacagggatgagagattagggaggaaaaaggggggagaggggagcagaaagggaggggaattgagtagaagatgaaaagataaagatagaaagatggggagggagaggaagaagaggaggaagaaaaagaaaagggtggatgagggctggggcagtggctcaggcctgtaactctagcactttgggaggcagaggctggcgaatcacgaggtcagaagtttgagaccagcctggccaacatggcaaaaccccgtctctactaaatatacaaaaagttagctgggcgtggtggcgggcacctgtaatcccagctactcgggaggctgaggcacgagaatcgcttgaatccgggaagcggaggttgcagtgagccgaaatcgggtcactgcactccagcctggcgacagagcgaggctccgtcctccgccccacaaaagaaaaagtggatgagggacgagcggtgaggggaggaaacaatggggaagcaaggaagagaaggtgggagaggcgcacagggaggaagagtggaggaagagaagaactcgggggaaaaggtctgggggtgagaggaaggagggaaggagggaggggaggaggtgtaggtgaaagtgaaaggatagagggaggaggaagaacgctgagactggagggagaagggtttcgggaagcagagcacgagccccgatcccgcccccagggtatcgcgcgccggtgaccctggtgcggaagggctgctggaccgggcctcctgcgggccagacgcaatcgaacgcggacgcgctgccgccagactactcggtggtgcgcggctgcacaactgacaaatgcaacgcccacctcatgactcatgacgccctccccaacctgagccaaggtgcgcgggagagcggggctgg

SEQ ID NO: 8246 - DNA, 6000 bp, Homo sapiens; identical to SEQ ID NO: 2013

SEQ ID NO: 8247 - DNA, 6000 bp, Homo sapiens
gctgggactacaggagcccacgaccatgcccagctaatgtttttgtaattttagtagaaacggggtttcagcgtattagccaggatggtctcgatctcctgacttcatgatccgcctgcctcggcctcccaaactgctgggattacaggtgtgagccaccgcgcctggccaaaaagatttctttcaaaatatgactgctcactgacaacgcacctggtcacccaagatccctagtggagacgtacacgatcagtttccggccgggcgcggtggctcacacctgtgatcccagcacttcgggaggccaaggcgggcagatcacgaggtcaggagatcgagaccacagtgaaaccgcgtctctactaaaaatacaaaaaattaaccggccgtggtggcgggcgcctttagtcccagctactcaggaggctgaggcaggagaatggcatgaacccaggaggcggaggttgcagtgagccgagattgtgccactgcactccagcctgggcgacagagcgagactccgtttccaaaaaaaaaaaaaagatcattgtttccatccctgctagcacaacatccagcctgtagcctgtggatcaatgaatgaatgaatgactcggaaatcaagatgactccttgacatgtcattcattcatttatttatgcatgacaaggtgtcccactgtcacccaggctggagtgcagtagcacgatcttggctcactgcatcctccacctcccgggttgaagcaattgtctttcctcagcctcctgagtagctggggctacaggtgcgtgccaccatgcccagctaatttttatattttttcatagggggtttcaccatgttcctcaggctggtcttgaactcctgagctcaaagcagtctgcccgcctcagcctcccaaagtgctgggactacaggcctgagccactgtgcctggccaagtcttagtgtttttgaggcacggtctcactgtgtctcccaggctgcagtggagaagcagaatcacagctcactttagcctccacctcccaggctcaagcgatcctctcacctcagtctcctaagtagctaggaccacaggtgcgcaccgccatgactggctaattttgtttttatttttgtaaagatagggtctccctgtgttgcccaggctggtcttgaactcccggcctcaagcagtctgcctgcgtcagcctcccaaagtgtcggggttacaggcaggagccaccgcagccgcccatgactctcattattgagaaatacatttgtaaggctctaggtgcctgtaggtgccgtggagagcaattcctctgatggagctggggaaattgggtaaattgaaacccccggaaaggctttgccgttctagaggctgtgaaggacacgcgtgatccatgggaggaggtaacatgtcaggatgagcggaagtttggaagaagttggtcccaggcctgaaagatcactgtgagggttcaggacttcagtggaggagggactgtagaggttttagaagcagcaagagaactagaatgagaaggacttggagatgtgactgcattgtcgctgtctcgcgagaaaactttaacacgtgaggagttgcctctgaagggtgagcaggggagttgcttcagttgcgctctagtcccagtgaagattctgtgaacctgggggtaatgaggacaaagaacttggaacagcccggaacctcggttgatgaagccgcggccgggttgagaggaccgactgcagttctgaaagacgttctgctgtgggtaatcaatgctatcagacagcatcacgccccacagagaaatctttcatgaaaggaagagtccatcgctgtggccaacttttttgtggtcatagtttaagaagttgccccagcctccagcagccaccgccccaacgagtcagccgccgtccacattgaggcaagacccttctccggggagattagggccactcccggttcccatgatcattaccattgcttagcagtaaagtatttttatttctttattatttatttaagatggggtcttgctgtatcccccaggctggagtgcagtggtgcgatcatagctcactgcagcctccgcctcctgggctcaaacgatcctcccgcctcagtctcccgagtagctgggaccacaggcttgcacaccacgccccgcttaattaaagtgtgtcctttgattagacacaacgctactgcacacttcctagaccacggtatactgtgaacgtaacttgtgtgtgcactgggaaaccagaacattcgagcggctgttgccgtgcggaacccaaggcctgtgatccccacagggtgtttctggcaccggaacgcaggggccacatccaggggggcagtgcttgtgacgccggtgccttcgtttctgatgtggcttactcagctgggagttcctgtcctaacattttcggcgatggctgtgcacccacggcccctcttcacccgcggcccctacgtcctgccggttggcaggaaacctcttcccctgcacatctggggcacagcagcaaactgtggtcccccttcttcagtgagggtggggcttctgtctgtctggagccctagaatggggccaggggtggctggggcctgggtcagggaggacccggcaggatctgtgcagacaggcaggtggctgcggtggctcccggtgcagggttcttggcctcctgggcgggtacctggcttgagggcgacgaggtgacagccgcgtccctggggttgcaccacccgagcgtccagttaacaccacagctgccacccttcagttctgcaggtggggctcctccctcctccccaggctgcccccaccacccttcagttctgcaggtggggctcctccttcctccctcctccccaggctgcccccgaccacccttcagttctgcaggtggggctcctccttcctccctcctccccaggctgcccccgaccacccttcagttctgcaggtggggctcctccctcctcccttctccccaggctgcccccgaccacccttcagttctgcaggtggggctcctccctcctcccttctccccaggctgcccccgaccacccttcagttctgcaggtggggctcctccctcctccccaggctgcccccgaccacccttcagttctgcaggtgggggctcctccctcctccccaggctgcccccaccacccttcagttctgcaggtggggctcctccctcctccctcctccccaggctgcccccgaccacccttcagttctgcaggtggggctcctccccaggctgtccctgaccacccttcagttctgcaggtggggctcctccctcctccctcctccccaggctgccccagaccacccttcagttctgcaggtggggctcctccctcctccccaggctgcccccgaccacccttcagttctgcaggtgggggctcctccctcctccccaggctgcccctgaccacccttcagttctgcaggtggggctcctccctcctccctcctccccaggctgtcccgaggctccttgctggggaccgtcctgcctcccgtcggggcctgcgctgagactgggctccatgccagccggggctggctggccccctcgctccagagagcgacctgcacagagtcccctcagccatgagcccctgtccagacacggcgtttctctgtgggtggcaacaggctctggggccctcagctctgggctcgggagcatttaaggtggtgcagactcagcgaggggctgtgggctggggtcccaccatcccgggagcagggactgcgtgttccttctcaggaccagaggcttctgtcttttcccctggggtagaagtttgctgcctgccccgtgcccagccttgcttaggtggctgttggctccgctggtccctcaagccccgccattccctcctcagctccgctctgcaccgaaggggatgggtccgacccagcctggcatcatcacagcctcgagtggcgtccagcctgccccgctccaccagtggctgctggagaagaacccgagcctgggtcaggccctgggggctcctgcatcagtgcccggctctccggggcctcctgccctccggcccactctccccgctctcagcatcaaccagtcgccatgggcaggggcagctcggtggctcctgtgtccctgcctcgggcctgcctgctgtcatctgcctccctccctctttcccagagcggccctgggcctggatacggggactgttgtgtggcccctctgtgtctgggggtgcgactgctcccctggcttcaggatcctcagggcttctacccgggattggcagtcatgctctcctggcagtacactctcccacctgtgccacccacccacccacccacccatcccgctttacagaaagccccctgagccctaccctgttcgtccccaggcagccacgccgagatctctggcctctgatgtcatgtgatgtgtgcttcccagctgggttccgggcagggacggtgctcatcatgccccggccttcagagctccttccagcccagcagtctcctggctgtgtcctctgtggcctccgccccgtgtcctcagtggccccgcgggggccttgccggtgctcacctgtgcctctgtttctctgcagctgtgagccgtgagctttgaggcggtgggatgtgtcagcagaatgtctcctgcccccgagagcgaccccgaggccactgagaagagcagcgcggcctggccggcccgaacgcctgcgtctcagtagctgggagccacgggcccacgcccgcccaccggccgcagtgatgttctagccacagaggagccaagacctcaggtttccagagacttgggatttgcacggcagcagagtcaccgtggagaggccagggtatcacaaacttatggattttgacaagaaaggagggaaaggggagacggaggagggccggagaatgtccaaggccggcgggggccggagcagccacggcatccggagctcggggaccagctcgggggtcctgatggtgggccccaacttccgcgtcggcaagaagatcggctgcggcaacttcggggagctccgcctaggtgaggccctgctcggtggtaggtggggtcgggaggctgctggcagggccgccccgagtcaccggagcctctggtggggccgcccggggtcactggagcctctggcggggccgccccatgtcactggcaggtgcgttgaatcatcagtccgtcgtggtgcgagtgccacttcccttcgaggaggttctgtggggagagtgggtttctggccctgtcaccttttcgggaaacagttctgttgggaggcaggtggcccagagcaggccaggccacgccgcaaggagcccgatgttaagttgtgaatgactttcatggcccatgtgcacgctgggcgaagccccggctttaacggcaggtgcctgcccggcactcagctcgtgggaggtcttggccagcccggagctggcgtcaggtggctggagtgactgttctgtggtgatgatactgctgtgtgccactcccagcttcaccatgtaaaaggccgcacctggcccacctggctccgtcccttctgctcacaccaacctctcccgggtcggggtctgattgcccgggcaggcgtgaggagcagggccgaggactgagcctctcattggccaggggtgccttccctggggtgggggtgcctgaagatgaccatcaggcctgggggagctctgagcacctttggggccgttcccagtctgtgattagctgggccagggagctgaatcatccccggaaatgtggttaaatttattgctggtgctgccggagctcctgcgggagggcatttggcgtctgttgctggggttgtccggggaacccaggtgcacccccagtcagtgtctgtcgtggtgggaatcagggtccctgggaaagagcgcaggatgggcaggtccgagaggccacggcag

SEQ ID NO: 8248 - DNA, 6000 bp, Homo sapiens; identical to SEQ ID NO: 2033

SEQ ID NO: 8249 - DNA, 6000 bp, Homo sapiens; identical to SEQ ID NO: 2053

SEQ ID NO: 8250 - DNA, 6000 bp, Homo sapiens
tacaggtgtgtaccaccatgcctggctaatttttgtgtttttagtagagatggggtttcaccatgttggctaggctggtctcgaaatcctgacctcaaatgatcccccgggctcagcctcccaaaatgctgggattacaggcgtgaaccaccgcacctggcctcatgttcttaaatgtaaaagattcccagtgaagtgttctacataatgttttccttcccccggttctaggttctaggcccattcattttctgtcattttttccccagtgcagccttagtttagaacttgtcccctggtggatcgtgggttttctcctccatctgccactttggcattctaagcttgttctaggctctctcttcttctggagccttcagcctagaaatgtccttatttccagaacagcccccctcctttgccagcctcagtctttattccaggaaatgctcaattctcaacatgcatccttttgatccctccccctccccgccctatagacacttgtaagttccaagcaaactcttagacacatgataaaaccaaggatgtgactcctgctatattcttttttaaaaatgtaattaaatttttaaaaaatctatttatttatttattttgagaccaggttatgagactggttaatttttgtatttttttgtagagacagggtttcaccatgtttcccaggctggtctcaaacccctgggctcgagtgatcctcccaccttggcctcccatagtgctgggattacaggcatgagccaccgcgcctggccccctgctatattctgtgttataccttcatccctagcaggctctgagttctagattttatctgctgactatgtttgttatgtgttgcattaggtatattaatgggtgtcattatgtatgtggggttctggggtgacctggacactaagttattgggttgctcttggctggttctagattataggcttcagaacttagttctagattacttaggcctatgagcggttcttaccccaagccattgaaagcgtggaagcatacgtctattccccaccctgtactgtgtgtagtaaccttctaggttctatgtccagccttgctgtgttttttatttccttctcggtcaatttaaggctctggaacaggctccccaaaacatctgtgttgcatcgtcagagtgggttgctggttttagatatcatgttggggctgggcgcggtggctcatgcctataatctcagcactttgggaggccgaggcgggtggatcacgaggtcaggagattgagctcatcctggctaacatggtgaaacccgtctctactaaacatacaaaaaataattagccgggcgtggcggcacgagcctgtagtcgcagttacttgggaagctgaggcaggagaatcgcttgaacccgggaggcagaggttgcagtgagccgagatcacgccagcgcactccagcctgggcgatagagtgagactccgtctcaaaaaaaaaaaatagagatcatgttggttttttgcctatggctggcttgccctcttagaatcgttttcctgaatctttcctctgagtgctgggattcgcctgcctagattctcagatgcaccacttcaaacacccaaggggacaggaacccagctgcctcctctcccagggcccacggccctcaggccctcctctcctcacagaagtccaaggccccattcccaggctttggacacagtccgcatattgggcggggctgggaattatccacgctcagaccggttatgcgttgcccgcagggagagaaggaaaagaaggaactgagtgaaagtccctcctgctttccgccgggccagctggacccgtcggacctgatgtgtgtggagggagcggttcagggggcctggcttcatctccgccctgcccctggctctagggacccaagtccaggcttcccgccccagaaaccccgccccttccttgtcccccgcccttgggtatagcttcaagagggctggggctggggttggtgggagcgtcccagaactcctgggtcctggaggaggagctgtgcacccaggggcctgggggaggaggagcctgaagcctgggacttctgggtctaagcgaggaagctgagagcccagactgttgtctcttaggggaggagaggggtgcggtctccgactcctgggaatggggaggtgggggctggaggcgcaggctcctggggtctgagagacgaaagggactgggtcttagactcctgtgacctgagggaggcgggagctagttcttggacttctgggtcgtgaagagggtgaagaagtgacaagcatggtcctggccatactggtattttttttgtttttttttgtttgtttgtttgttttgtttttttttgagactgggtctctctatatcgccaagctggagtgcagtggcacgatcttggctcaccgcaacctctgcctcccgggttcaagcgattctcctgcctcagcctcccgagtagctgggactacaggtgcgtgccaccacgcaagctaatttttgtatttttagtagagatggggtttcaccatgttggccaggctgggctcaatctcttgacctcgtgatccaacagcctcagcctcccaaagtgctgggattacatgagtgggccaccttgcccggccgttactgtgttttttttttgaaatggaatctcacactgttgcccaggctggagttcagtggtgctatctcggctcactctaacctccacctcccgggttcaagcgattcttgtgcctcagcctccccagtggctgggactacaggtgcatgccaccatgcccggctaattttttttgtatttttagtagagacgggggtcaccatgttgcacagcctggtcttgaactcctgacctcaagtgatctgcccatctcggcctcccaaagtgctgggattacaggcatgagccactgcgcccagtcctggccttgcttttttttttttttttttttcttttcccgaatggagtaggtctttagattcttagggagccggggtccagatttctgggaaattgaaggaggcaggagttgggctggctagtaggtgagaccaaccctgtgacattatacaggtaaccacatcctagtgacctaatcctgggtcccttggccctgtggccttcttaaggcatggttctggtctgggcctcagttttcctacccatgcagtgggttgagggggattctcagtagagccagaataggtagacactgattttctccacattcactcatacgataccagggtcggccagctttggttcctttgagtgggctaggcttaggtttgctgccactgtctgttggagtctgacctcagttttcccaaatcctctcacccaggtagccaggactgttttcctaagagcaatggcacaggcacagtggcatactttgggatgctgaggcaggaggatcccttgagtccaggagtgagacctcatctccacaaaaaaaaaaaaaaaaaaaaaggtcaggcgcggtggctcacgtctgtaatcccagcactttgggaggccgaggcgggcagatcacgaggtcaggagttcgagaccagcctggccaacatggtgaaaccttgtctctactaaaaatacaaaaattagctgggcatggtggcgggttcctgtaatcccagctactcgggaggctgagggaggagaattgcttgaaccgggacccgggaggtggaggctgcagtgagccgagatcgcatcactgcactccagcctgggtgacagatcactccagctaaaaaaaaaaaaaaaaaaaaaaaagaaagtagggaaaggaaaagaaaagaaaagaaaagaaaaaaattagccaggtatgctggtgtgtgcctgtagtcgcagctactcaggaggctgagttgggaggactgctcgagtctgggtcgttcaggctgcagtgggccgtgatcgcgccactgaactccagcctgggtgacagagtgagaccctgttaaaaaaaaataataataataataggcctcagtttcccctggcagcacctggtggccaatctttggtttccccggtggagtgacagggtggcggtgcctgtttccctgtgtcatgatcacagtgcctgggcctcagtttcttctgtgcagtgcttggtttgcccccaactatttcccctacgtggtatccgagtggctgtgcctcagtttctctgttgtgccttgacaaggccggtctgttccttgccctccccgccccgcaggcccgcaccgccgccatgatgtgcgaggtgatgcccaccatcagcgaggatggccggcggggctcggcgctgggcccggacgaggcgggcggggagctggagcgcctcatggtcacgatgctcacggagcgcgagcgcctgctggagacgctgcgcgaggcacaggacgggttggctacagcgcagctgcggctgcgcgagctcggccacgagaaggactcgctgcagcgccagctcagcatcgcgctgccccaggtctgggcgggacaggggcggggcatgagggggcggggcctcggggggaagaaggcggtccggaaggggccgggcttggcgcctggaagggaggagtctgggcgaggcttgccgttaatgggcggggcctgagtggcaagggacagcgggacttagcagggagggcgggaccttcaaacttccagtcccagtgaatgaaggagacagggaaaggattgagccgaatgtccagatcctgccaatgtctggacaggagtttgcagctctgacgaaggagctgaacttatgtcgggagcagctgctggagagggaggaagagattgcagagctgaaggcggaacggaacaacacgcgggtgaggggtgttgagggcggggcctaagtgggggcggggcctcgtggtgttgaagtggggggcggggcctctcagtgttgcagcgtgacctatttttttcccccatctcgcctttctgtcttctcctcttccctgctcccacttcctggctggtctcccactctggtgccactccttcctccctgtctccataacttttctcttttctgtaccaccggttccttgaccccgacctcctctcttttcctgacctgtctcggtgctcctttatatggctccatcttttcctccatgtgtccgccctacctgtcaccctttttctcacatctgccccttttcccttgcctcttttccttgaccccatgccgtgtgcttgcagctgctcctggaacacctggagtgcctggtgtccaggcacgagaggtcactgcgcatgaccgtggtgaagcgccaggcccagtccccgggtggggtctcctcggaggtagaagtgctcaaagctctaaagtctctcttcgagcaccacaaggccctggatgagaaggtatgagaattagaagagcaggggtggagaatggaaacctatagttgactggggctgttctgagtgggagagattctggccgtgattggttggggatgttctgagttggaagaatgttgactgtgattgattgggacaggatacatagactgggacctgactggttgatagcagaaaaataaaccaggatgggggctaacagtggatggggcagattggatagctggttgcggctgcatacccgttatggagacaggagccccaacgctgccctatcggatccgtcccaggggtgttctggaccaggggcaactgtcctaaactggatcttgtctccagctgactgttgccctgccccgatccccaggtccgggagcggctgcggatggcgctggagcgcgtggcagtgctcgaggaggagctggaactgagcaatcaggaggtgtgggtgtggccaagacagggaatttgaatccaaggggaggggctaaggggctgcccacggggcggagccggttgggtgggttccagagagaatctattggggcaggactagggcagacaagc

SEQ ID NO: 8251 - DNA, 6000 bp, Homo sapiens
ctgtgtctgtgtacagaatgctaaagaataagacataaaaaataaaagtacagttataaacacctcttttaaaaggcagagactgttcgcttgggcaaaaaaaagcaagatccaactacatgctatctacaagaaacccaccctaaatacaacaggtaaaaggaagctaaatggaacgtgggtcctggcttgtaccctggcatgtaaagaaaacattggaggaaaaggtggtgaaatcccagtaaagtctgggttttagttacagtaatgcatcatgtcagtatctacaacaaaccacttttgttggtgcttgtgatgacagcatcagaagaaactgagcataaaacatggtggactgcgtatgatctttgcaacttttcttttttttttttttgagacaagaatttcactcttgttgcccaggctggagtgcaatggtgtaacctcggctcactgcaaccttggcctcctgggttcaagcgattctcctgcctcagcctcccgagtagccgggattacaggtgcacgcgccaccacgcccagctaatttctgtatttttagtagagacgggacttcaccatgttggccaggctgatcttgaactcctgaccccaggtgatccacccatctcggcctcccaaagtgttgggattacaggcgtgagccagcgcgcccggtctttgcaacgttttgaataaatccaaaattattccagaacaaaaagcttagtaccaaaaagaaaacaaaaacaaaaacaaaacaaacccccccccccccacagagtaaaataacggaaaaagatctactatgctagcactaacaaaataatacgtagttatgaaaatggtatgtatttttcaagctagacgttcataatggtagaacatgaggaggaaaactgcctcttaaatcccaccacttactgtgacgcagtgaccggtccctgcagcggactggatagttgtatcagagtcctggacggaaacagatggcactcaaaaggtggcgcgcagttcagagaaatgcctatgtacggatttggtccaatgcctcagcctgacctcagggaccttcgggggtctgctccgcgcccacccttacacatctgtgaccccacacacttccaccccagcgccactgccaacagctacacccatccccctccaaccgcgtcagcttccagcctcggtccatctgaactcgccgtgccccctcccctgcgcccttccagattcatttgctagggaagcccgctcttccgggtggagctgttcctcatcccctttctttatcattctctccccagggcttccacatcaccgtgctgtggacaatcccggaactcctgtcacgccagtttacatttaggaacagtaatggctcccactgactcagtcaaaacaaggctgcggccgggcacggtggctcacgcccgtaatcccagcactttgggaagccgagacggagggatcacgaggtcaggagttcgagaacagcctggccgacatggtgaaaccccgtctttactaaaaacacaaaaattagccgggcatagtggcgcgcgcctgtaatcccagctactccggaggctgaggcagaattgtttgaacccaggaggcggaggttgcagtgagcagagatcacgccactgtactctatcgtgggcgacgacagagcaagagcaagactccgtctccgagaacaacaacaacagcaacaagaaaacaacaataaaaaaaataaggctgcgtgggaggcagaaagagctaatgcggccacgcttgtcccctcggggccaccgtccccacccagacttccggtctgccttaaaatgttcatgcgtaagtgcgtgggcaggaaggcgggctcaagcgcagctcgtggcgttcattggctgtgcagggccgagggaggcggtgcaaggccgccgcgtgacgtcaggacgccgcggtcaggacgtcgaagccaaagaagaccagagccagccgggtggcacagcggtgtcgtggccgtgttgctgatcgcctgggtggttgttggcgtgtccctgcagcgaaggatcctggttggtaaggggagcggcgggcgagcaggcgggcggggatagcatctccttttggtcttgcgccccgcgagccccgaggccttctcggccgtcgcagcagcagacgccgcgcgcgagcgtcgacagggtgtggcggcgcaggggcagccactgcgcctgcgcaccgggcctggggccgcgcgttcgggcactagcgcgcgtgcgccgtcgtcttctactttccgttcctctcccttggagttctcggggccccggggcgcccctcactcgccgttgaccgggtgttgccccgggcgacgggcggctcctgcgcgtctttctggggcgtggtgcgcaggcgcggcctgggcagtggctccgtggctagtcgtggggatccgagcggcctcctccacccggcgtcctcctttgccttcgcccagcctgcgggacggccaggtgctcccgggacctcaggcctcgcgtctgatgcctgtctctgttcttgagacccgtctgggagtcctctgtccagcccccaactcctgaccttacctctaatctcccttctgccctggggctcctcttcctgtgtccccgccacgatccctcgtctccacccacgccctgtgtcctgtttaagttaagcctttgcgtttctagggcttttccccagctccagactcccgttcctatcccgtcaactcgtgagaattccggttctcctgcgggattaattatcctacttatcagttactctctctcgggagtttaggctcctgaatccttgctccggagacactccacttttcttccaattctctctgtaccccactcttaattcgttgaacatgttttgggtcttctttggcattcccaaagctttatgtccagacacccaaccaaggtgatcccttttctctcccagccctacccctgcttccgggaacctcccgtggaagcaggcaggggtagtcccactgaggactcccacgtaggtctctttactgcccttcggagacctttttgaaatcagtctgtcagtgctaagaacccatttcttcacgttggggttcacgttggcattctcaggagcgctcaacgaccacttgcttccagggttaacttccggaaaatccccttttcctctcaaaattttcttctcttctccaatattcttccagccccctcgatgctccctgaaaggcctcccttttcacagagttctcggaaacctttccaccctctcagccttaagggttccctcagactcttctcattatagcatccatcctcttggttcaggttcctttcacaacccgtactccttagcttttttttttttttttttttgagacagagtttcgctcttgttgcccaggctggagagcaatggcgcagtctcagcttaccgccctccacctcccgtgttcaagcgattctcctgcctcggcctccctagtagctgggattacaggcatatgccaccatgcccagctaatttggtatttttagtagagacgtggttactccatgttggttaggctggtctcgaactcccgacctcaggtgacctgcccgccttggcctctcaaagtgctgggattacaggcgtgagccaccgcgcctggcccctagaattttttgtagaccttttccccttgatggaggcacccctaccctctggacctttcatcacagcctctctttgctcacatgggtttcagacccttctcctttcctttgggaagtctgctctggcttccctgtttccaaatccttcgttttccacctggagctctacaaaggggccaggggcttcccctcactccagcctttctagtccacacccagaactcttcagatccttgaccccagtggcttttcagtcagcctccccttttctgcccagcttctcttgagtccatctacttttcttccccactttgtgacgtgtttttagctcccccttaagtctccctaactcattctttttctcataggcagtgaaaaagcagtctggctcccgaggtccaccccttataccccaaggtccagatggcggccaacgtgggtgatcaacgtagcacagattggttagtgaggcgagagggacggaggccagtcgggagggaaagaggaagcaagacccagtgctgtcctctggggtgggacctcccgtggccttaggggaggtgatgccacaatccctgtgggtgggggtggtggtaaggcaaacacagagggaagcatttggttgtggtgtggagaggggcaagctttcacctctctgagctttcgtttttcacagtacagcgcttgctttgcagaattgtgatgattcattcaagcaagtgtaattaggaggcagcttcccaacactcaatacacagtcatttatttgtttttctgctgattccttattttttctcaaaatagtgtgataacctgccgactggggtgatgtcagacagaattcattgattcatgaaagacatagccctaggaggtgccagggcctgtgttcagttctgtgggttctgttaattgttttgtttgtttggttttaacaactgctgtgtgccaggctctgggataagtaccttaagtaggtgatctcatttatccctcccagcagactctgaagcagaaaccctttatcagcatagtacagattagaaaacttaggcttagactggtagtaacagttagatatgggatccaggggctggaatttgcctcccaacttgcccacctgtgtacagtggggagaacaggtgtgacttgatgtcctctctctctgcaggtcttctcagtacagcatggtggctggggcaggccgagagaatggcatggagacgccgatgcacgagaacccggagtgggagaaggcccgtcaggccctggccagcatcagcaagtcaggagctgccggcggctctgccaagtccagcagcaatgggcctgtggccagtgcacaggtgagaaggcctcatggggctggggtaccctgagccagaggttgtgggagggacacagtctggcgtcctgttgtatcattcagacggggtgctctgaggggaaacataaaaagacgttccagggtatctaaatctgaacgggaaaaagttctgtttccttgaggaaattagggcgtgatgtggttctgaagagggaggccatgcccatgcccctggtctctaacgtgcgtgagtctcatggtagagacagtggctcactttgcagatacatggacccagtttcatcccttggcaattggccaccagtaaacaggcttgccctttgggggccgtgtgcctgtggatttgggctgctgacggcacatgtgcctctctgcttccacagtacgtgtcccaggcagaagcctcagctttgcagcagcagcagtactaccagtggtaccagcagtacaactatgcctacccctacagctactactatcccatggtgagtgcccagccagtggggcggggcagggcgaggtggagtctgctgggtcggggcgaggtgaagtggagtctgccgggatggggccgggtggtggatggactggagatcgcagtgataactgctcagaaaccctctaacttgcccaggaggtaaattcctaggtccccgccatgagccacaaggtcctacatacccggttctggtcccttctctcctcatgctcattctgccatggccatcgaagcagagacctccttgatgcccgcacccgccaggcccgctctcgctttgccctggctgcagtgctccctgtgttgccgcctcttggaggtctctgctcagatgccgccttcagagagcctctacctgacacactgattgaaagtagcattcctgcctcgcagcctgtccctctccctttctttgccatcttattgtttcatgatccttattgctggatgtattacatgttgatgtctccagc

SEQ ID NO: 8252 - DNA, 6000 bp, Homo sapiens
cgccattctcctgcctcagcctcccgagtagctgggactacaggcgcccgccaccatgcctggataatttttgcatttttagtagagatggagtttcgccatgttagccaggctggtctcgtactcctgaccttaggtgatctgcccacctcggcctcccaaagtgctgggattacaggcgtgagccactgcgcctggccatgcctgggtaatttttgtatatttagtgaagacgggatttcaccatgttggccaggctggtctcgagctcttgatctcaagtgatcagctcacctccacctcccaaattgctgggattacaggcatgagccgtcaggcccggccaaataaaaatactttcaacatcaaaaacaaacaaacaaaaacaccaaagccaaatacaaaccaaaaaaaggccttttctctaaataaagtcacattctgagctactggaggttggcacttcaacatatgattttggggagagacacgattgaacccataatagccagtcataccccatactaattaaaaggcatttggtgttacagttacaaacattggcatcaaatggctgctctgtcagtcactagctgtgtgatcttggtcatgtttgcccctctgtggaatggaaaataaaaaaaatcacatgcctgtctcataacccaggtgtctacaagctttttctgtcaagggtcagagagtgaatattttccactttgtagaccccatggtctctgttgtagctactccatcactctagtgggaaagcagccatcgatgtgtgtaaatgagtgaggatgtctgtgttgcaataaaactttatttataaaagcaattggctgggtgtagtggctcacacctataatcccagcactttgggaggccaaggtgggcggatcacacaaggtcaggagttcgagaccagcctggccaatatggtgaaaccccgtctctataaaaagtacaaaaattagctgggcgtggtggcgggtgcctgtggtcccagctactcgggaggctgaagcaggagaatcgcttgaacctgggaggtggaggttgcagtgagccaagatcatgccactgcactgcagcctgggcgacagagcgagactctgtgtcaaaacaagacaaaactaaaaaacaattggccggcacagtggctcacgcttgtaatcccagcactttgggaggcagaggcaggcggatcacctgaggtcgggagttcaagaccagcctggccaacacggagaaaccccgtctctactaaaaatacaaaattagccgggcatggtggcgcacgcctgtaatctcagctactcgggaggctgaagcaggagaattgcttgaatccgggaggtggaggttacggtgagctgagattgcaccattgtactccagcctgggcaacaagagtgaaactctgtctcaaaaaaaaaggctggacggggtggctcatgcctgtaatcccaacactttgggaggccgagacaggcagatcacctgaggttgggagttcaagaccagcctgaccaacatggagaaaccccgtctctactaaaaatacaaaattaaccaggcatggtggtgcatgcctgtaatcccagctacttgggaggatgaggcagaagaatcgctagaacccgggaggcggaggttgcggtgagccgagatcgtgccattgcactccagcctgggcaacaagagtgagactctgtctcaaaaaaaaaaaaaaaaatcgtgggccatattttgtggcccctgtcaaagggagatctgcacggtgggatcaggacaggcttaaccaaaaacatgaaggagggtaagggagtgagccatagggatatctggggggtaacagagatataggcagagggaacagccagtgcaaaggtcctgaggcaggactgtgcccagtttaaagaacagatggggagcacaatatagcatgtagtaagccctcaaataagtggttgcatgtaagtgtgtgtgtgtatccacacatgcccgttatattgtcgtatgtaatatatatgatgcttatatattacatataactaacataccattagacagtcagttgctccagggaagagtccattgctgtttttccttgtctgcatactggtgtattcactagtacccaatacatggcagatgctgaaaaaattacttttttttttttttgagatggagtttcactctgtcatccaggctggaatgcagtggcgtgatctcggctcactgcaacctccgcctcttgggttcaagtgattctcctgcctcagcctcccaagtagctgggagtacaggtgcccaacaccatgtctggcaatttttttttttttttttactagagacgggagtttcaccgtgttgaccaggctgatcttgaactcatgacctcaaatgatctgtccgccttagcttcccaaagtgctaggattagcagcatgagccaccacacctggctaaaaattacttctttttgtttgttttttgatggagtcttgttcttttgcccaggctggagtgcagtggcacgatctcggctcactgcaacctccacctcccaggttcaagcgattcttctgcctcagcctcccaagtagctgggattacaagcacacgccaccatgcccggctaaattttttattttttattttttttatttttcttttagtagagacagggtttcaccatgttggccaggctggtcttgaactcctgaccttgtgatccacctgcctcagcctcccaaagcactgggattacaggcatgagccaccgcgcccggccaaaaaattacttcttaaatgaatgaatgaatgctatgtatgtatccttccctgcagcctcaacttccttggctcaagcaatcctcctgccttagcctcccgagtagctgggaccacaggcacacaccaccaggcctggctccaaacttttttttttttttttttagatggagtctcactctgtcgcccaggctggagtgcaatggtgcagtctcggttcactgcaacctccgcctcccaggttcaagcgattttcctacctcagcctcccgagtagctgggattacaggcgcctgccaccatgcccagctaattttttgtatttttagtagagacggggtttcaccatattggccaggctggtctcgacctcctgatctcgtgatttgcccgcctcagcctcccaaagtgctgggattataggcgtgagccactgcgcctggcccaaacttttttttaaactcacaaagtctcttaaaaatattggaattgattgtcatcccgagaagaatgagcggatttctaaaaatctagatctctggcttctcttgaaaaatgagtggatgtggtgcctggctcccttgccatattctgttaatgtcatagtccaacgctgggacagtgttggaaggactgctcaagactgcaaataccaggatgttgggtccttgaggaccatctagaaggctgactatttatttatttattgagacggggtttcgctcttgttgcccaggctggagtgcaatggtgcgatctttgctcactgcaacctctgcctcccggattcaagcgattctcctgcctcagcctcctgagtagctgggactacaggcgcggaccaccacacccggctaatttttttgtatttttagtagagatggggtttcaccatgttggccaggctggtcttgaactcctgacctcaggtgagccgccctccttggactcccaaagtgctgggattacaggtgtgagccaccgtgctcagccgaggctatttagcaagcatgtattgagcacctactggctttcagtcatcaagctcagaagtatctctgtgttaatccaactcaattccccaaaacaagtctgtaagtgtatgccattaggcacacagcctccacagccagactgcctgggttgaaatccgtcttctgccatccactgatagtgtgactttgggcaagtgacatcacctctgtgtgtcttgctttcttcatctgtaaatggggaaaatagtgtaatagtgtttacctctcaggtaacaccaggtaagtctcagatgacagcattttttttttttttttgagactgggtctcactctgttgcccaggctggagtgcagtggtaccatcatagctcactgcagcctcaacctcctgggcttaagcgatcttcccatctcagcctccggagtagctggaacaacaggcacgtgccaccacgcccagctactttttttgttttttgagccggagtttcactctgctgcccaggctggagtgcagtggcatgatcttggctcactgcagccaccacctcctgtgttcaagcgattctcctgcctcagtttcccaagtagctgggattacaagaatgcaccaccactcctggctaattctttgtatttttagtagaaacggggtttcaccatgttggccaggctggtctcgaactcctgacctcaggtgatccccccgcctcggcctccacaactgctgggattacaggcttaagccccctcacccagcccagctaatttttaaacttttagtggagacggagtctggctgtgttgcccaggctggtctcgaagtcctgggcttaagtgatcctcctgcttcagcctcccaaagtgctgagatcacaggcctgagccaccacactggcctcatagcattttgcagaggaagaaatggaagttgaaggaggcgacgtgttgccgaaggtcacctggctaggtctgggtggcaggcggggaaagcaggcgggggtgtgtgggccgccttcccgtgctgacctttcttgggggtaagtgtgtttgcttctcctgtttcctacagatctgcttgggcagctcctgcagaacctggaacagtgaatgggtaggggacactgggcgtgcagaaggcggggggcagtgtggaacatgccttcaccacctccagcttctgctgccggaggctgcacccacctgtgcccatggcctgcacaggcccatcacttcctagcgccttcgacattctaggtgcagcaggccaggacaagctcttgtatctgaagcacaaactgaagaccccacgcccaggctgccaggggcaggacctcctgcatgccatggttctcctgaagctgggccaggaaactgaggccaggatctctctagaggcattgaaggccgatgcggtggcccggctggtggcccgccagtgggctggcgtggacagcaccgaggacccagaggagcccccagatgtgtcctgggctgtggcccgcttgtaccacctgctggctgaggagaagctgtgccccgcctcgctgcgggacgtggcctaccaggaagccgtccgcaccctcagctccagggacgaccaccggctgggggaacttcaggatgaggcccgaaaccggtgtgggtgggacattgctggggatccagggagcatccggacgctccagtccaatctgggctgcctcccaccatcctcggctttgccctctgggaccaggagcctcccacgccccattgacggtgtttcggactggagccaagggtgctccctgcgatccactggcagccctgcctccctggccagcaacttggaaatcagccagtcccctaccatgcccttcctcagcctgcaccgcagcccacatgggcccagcaagctctgtgacgacccccaggccagcttggtgcccgagcctgtccccggtggctgccaggagcctgaggagatgagctggccgccatcgggggagattgccagcccaccagagctgccaagcagcccacctcctgggcttcccgaagtggccccagatgcaacctccactggcctccctgatacccccgcagctccagaaaccagcaccaactacccagtggagtgcaccgaggggtctgcaggcccccagtctctccccttgcctattctggagccggtcaaaaacccctgctctgtcaaagaccagac

SEQ ID NO: 8253 - DNA, 6000 bp, Homo sapiens
attcatttttaaatgacatttctataatcccagaagttgtaaatatttgaaggttttcaaataagggaatcactagtacttccctcttctccctaaatattcaagattaacataaaacctagaactgggttggatttttttttcaaactaagaactaaagagtcttcaattcatttacatcaccaattactataattttattctgcagaaaaaaagaaaaaaaaaacagacccataggctcaaaggaaaaaggatttaaataaaaatattccaaagtgctgggtgtggtggctcacgcctgtaattccagcactttggaaggccaaaggaggcggattgcttgagctcaggagttcaagaccagcctgggcaacatggtgaaaccccatctctatcaaaaacatgaaaaattagctgggcatggtggcacacacctgtggtcccagctaccttccctctgaggtgggaggatcgcttgagcctgggaggtggaggttgcagtgagctgacattgcaccactgcactccaacctgggtgacagaatgagaaactatctcaaaaaagaaaaagaaaaaaaacaccaaaacattaaaaatgattaactctagaggatgcaatttttagcttccttctctatatgtctcctggaccgctgagttttttttttggaccaagcctgcattaattccataattggaactataaagacatttccaaatgtaaaaaactgagtgacaggaggaatatattccagtcattaagaaaactgaacaaacggggccaacactgaaaatcagtgggcctgaaacaatttacacctaccagctctcgaacatcctgtagctgttattcaatgtaatgagacacattcactgtcaagattctcctgtaaatcaacacaaatgagataaaccaccttcaaagtctgaggaagaaaataaatgtgcataaacaaaacagtatttggtatagagtagatactctgtaagtacggctgcacctttccacttcttcagtgaatgaccaattaaagtaacattttaatgtaattcttgaaatatgtcttccaaaaccgtgtcttatcagatgggattgacacataacacaatattcttgagcacttttgttcataactataatgattgcttaaaattatatcatttatatttttccttcctttgactctttataaacttaatttttattaggtgcatatcattccatcactagacatactgcaatttacttgactatttccattctattggacactaatttttttttttttttttttttttttttagatggagtcttgctctgtcactcaggctggagtgcagtggtgcaatcttggctcactgcaacctctgtctcccaggttcaaccaattctcctgcctcagcctattgaatagctgggtctacaggtgcacgccaccacgcccggctaatttttgtaattttagtacagatgggatttcaccatattggtcaggttggtctcgaactcctgacctcaagtgatccacccgcctcggcctcccaaagcgttgggattacaggcataagccactgagcccagctggacactaatatttttcaagctctttcccggcaattacagtcttttttccagaacaatggagctagatctttttgggtcatggtcacttttgataatctcatgaaattatagacactttgcccacttaaaaaaacacatttacacatatttacaaaaatttagtctcaatttcaagggattttggtcacctggaagctcgtcaatggaacaagaagacctcaggttaagacttcctgtcgtaaggctgggcacagtggctcacgcctgtaatcctagcacttgaggagcccgaggcaggcagatcacttgagtccaggagttagagaccaggctgggcaacatagcaaaaccccctctctataaaaaatacaacaaaaactggtcaggctttgtggcacgtacctgtagtcccaggtactcgggagcctgaggtgggaggatcgcttgagcctaggaggccaaggctacagtgagccatgatcatgccactgcactccagcctaggcaaaaggccaagaacctgtttaaacaaacaaacaaaaaaagtgttcctgtcctagatcatttgagcatgtggtcactttttcgtgtctgtgtgtgagacagtcttgctctgttacccaggctggagtgcagtggcgcgatctcggcacactacaacctccgcctgctgggttcaagcaattctcctgcctcagcctcccgagtagctgggactacagccacccgccaccatgcccggctaattttttgtatttttagtagagacggggtttcaccatgctggccaggctggtctcgaacttctgaccttgtgatccacccgcctcggactcccaaagtgctgggattacaggtgtgagccaccgtgcccagcccccacttttttagttaatttgcaagcacccgtcacaatcaacttcatacttctgttactctaatctataaaaagtttatgggaaataatctagaagagcccaataatagcaactcaatattcagtaagcccatatcatggggatgacactgctctacgaagctttacatataatatctcatcttacatcatatcaactccattaggtaggtactatcctgtccctattttatagatgtggcacagagggcctgaatcaattgtctaagcacacacagctaccaacaggcagagccaggatttgaattcagatactttggatccagagccttaatttttttgttgttgctgttttttcgagatggagtctctctctgtcacccaggctggagtgcagtggtgcaatcttggctcactgcaacctccaccgcccgggttcacgccattctcctgcctcagcctcccgagtagctgggactacaggcgcctaccactacgcccagctaattttttgtatttttagtggagacggggtttcaccgtgttagccaggatgttctcgatctcctgacttcatgatccacctccctcagcctcccaaagtgctgggattacaggcgtgagccactgtgcccgaccccagggccttatttttaactacaacatagtacggcttcttacatgccacagaaagctggacttcaaacaagtcatgcttggaaatgttacagatttctatctaaagattatctgaaagtccccactcttgttggtgcaaattacaaatccctatgttcaaagctcaatcatatttccacccctaaaagcctcacaaagcagacaacattgtcatttactgccagaaacattcccttacttaaaatcccttataccttgcctttctttaagcatcatgactatgggccaggcatggtggctcacacctgcagtcccagcactttgggacgccaaggccagaggaacacctgagcccaggacttcaaggttgcactgagctatgactatactactgcactcagcctgggcaacagagtgagaccttgtctctaaaaaaagttaaaaaaaaattttaattatgactacagaaaagataaaaaataatgtttatataacaccacctaattactaatctcttcaaataatcatagtataaaataatgctctaatagcaatctacaagaggtgcctttctataactcttcagtgcatcataatgcactgaagtatttgaacaatttgccatatgaacaggtgggtaagaattgtggagaagaacaatagggggccactgggaggaaatatgtaccagcatggcgggtcatgtaactgggaaaacccagtcaagatatttcaggccaaggaaagaaaatgttctcatgacctagaagcaaaggtaattgtatgtgtatgtatttaaaaagtatgtataaaaaacctcacctgaaccttgatttctaaacatgcaaaaatccttttctcctcttcaaactccttcttagaaatctggcaacctggcagcactgggggaaaaaacagtaacatgagacatcagcatttctagcgcgtcacagacttaattaaaaaagaaaaagaagagcaaaacaccctctggggccacttctgccttcatccacacaaaaccaaacggaatgaaaagggaggctagagtctgtctctgtgttgagggcaattcttggggacagaggtctgcttgcaatggctctgaaacatgtagctcaccaccaaagagctcctagaggcccctcttctaggaatcccacctctagaacttccccatcaggtcttgacaagatcctgtcccgcggacacttccagatctaaaattctcatccttcttgcttgaaacgttcattatggggcttagcatagacttctttcttgcggtcatttaattgtggcaggcccgaagacaggctaaagggaacctagagcatttggtcaaagcaaatcacatttacaaatacggccacgcaccctgtcagcccgtcacacattcacaactgcacccacctccgtggggacacgccccgtccctgccacgccgtctgagacacactgtccctcggctgctcgcgtgcacacaggcttgaggatccggacacgacacgctctgtccgtgacccagccctccccacctccagcacccccgatgccacccccaccctcactgccggttccagtcgggccccagtaaagccagccgagccctcccagcttcacccgggctgattacttctacagacacgaccaactcaccatgcagagtccaagaaccttaaggacaccggaaaaggacccagagacctgtggttagtttggacccagaggctgatgggaaacaagagcctggaaatgctcgcaggctgggagaggagcttctggcaggcaagctcgccccgcccctaaaaggcctgtgccccggagacttctgggaaatgtagtccacagcggcagagtctccggaagttgaaacctggacagcagggatgctcccagcatgcaacttggcttcacctgtcaaaggcgcttttttcgaagacgcccgggagctcttgcttttgcttgagggtctttggtgttgactgagagcgaattaaaaggttctcagctttcgctaaggaacgcattctggagtctagaacaggcgaagatgggactggggtgtctggggacttagacgtgagcgagcaagggaatccggggtaagttcgctggaaatgacctgcgcgacactaccagtttacctgggtatgagcgcctggaacagtgtctggcaattgaacagatgggtgtgtcttgctgtgagggagtttcttagttcgattcggtgtctgggaccctgcgtggacctgtttatgttcatgggatgttttctaaatttatgcctgtgtgagtctgttttattaggtgtgagatgaactgtgttacagattttatatgccgctgttgaaagacaacaataagtggtagtgagtggatattgtgaccgtggagacttatggcagtgcaaaggcggccataaacaatgcacaagcaatccagcatggctgtgttccaataaaacttgatggattataaaatttgaatctcattttttatagagtatgaaaccatttattctgaagcacacactcatactccaaaaacaatactatatattccctctctctctctcctgtgtgtttgcgtgtgtgtgtgtgtgggtgtgtgagagagagaaaggttttaaaggagacaactaactgattctgaggttagggcaaaaagattggggctgtggttggtgtggtaagaacctttggatataaatacttttttaaaaaagaattgtctaaaaatattaaagcgaaattttatattaaaactaacagaaagaaaaggaagttactttttaggggctctttctggtcactgatatcacctctctcatcctctgccatctctcacctcctggtctctcttgcttatcaagagaagactagagctcttggatccc

SEQ ID NO: 8254 - DNA, 6000 bp, Homo sapiens
gcgtggccgtggtgtgtgccgtgaggtgtggagggtgccgtctcccggcttgagcgctgagtttgtccccgtggctcaccttgtttctgtcaggttggtttcagcgttgctggggcaaggctgagggtaaacatgagcgactccaaggccagggagccctgtgccaaggtgtggaccttttgggttctcagctgaagtagagaatccagggaggaccccgcactccggccattggagctgtggcgtcctccctcctgtgtgtcccccggaacctcctgagcctctctggagctgttctctgccaggccccgtgggctctcctgccctctgcatgcatcgcgagtactgccggaggaggcccctttggctttcagagcccagagcgcccgacctcctccaggagtctgcagatccacaggcctcagatgctgccacacccacccagcacacacccaggtctctgacacgccagccgcacacagcggtggggttcaggcgaaggtttcttccacagtgcagagtagaagagccgggaaggaccccatcaccatcagatgcatcagagcttcaaaggcccgcccatcaagacgctgccaagagcatgaggccagccaggctggggaggacgttggcgagcatccgcctgcccgtcagggagccacagctggatgatacatcgacagacagcagagggacggtgtagcacacaggcgagggcttgtcctcctcagcctgggggagcgcagctcagtgcttggtggtcagcacgtgactgacactttgccggagaaggggacggctgcccgcaggaagagctacacagccgtgttcgccggaactccgctctggagagtcagaactggagacgggagggcgtgcctcaagggcagatgggcaaaccaaaccccatcctccctgtgagccgcggcacagcaccaggcgggcacacgcagcacgacacggcgaggagcccaccgcaggggcagccttttgggcggggaaggggggatgaatccactgtgaatcccacctccgaagggcagcgcaggaaggacacgcaaatgctggactgaacctgcagctgattcagggggcagtgtcctgagctctaaaacttcaaacctggggcagtgtcctgagctctaaaacttcgaaatctgaccaggcacagtggctcacgcctgtaatcccaacactttgggaggctgatgtgggcggatcacctgacgtcaggagttcgagaccagcctggacaacatggagaaagcccatctctagtaaaaatacaaaaattagccaggttgatggtgcctgcctgtaattccagctactcaggaggctgaggcaggagaatcgcttgaacccaggaggcagaggttccagtgagccgtgatcgcgccagtgcactccagcctgggcaacagaacgagactctgctccaaaaagaaaaaaactttgaaatccctctaaaaataaaatggaccggtggatggtagctgtgaggatggaccgtgtggcaggtttagttctggggcctcggcaatgagtgttgggtgtttggggcacggctcctgttgttttacgaggagaatttcctaataacgtgttacactggggagaacgtaggaggggagcccatttgttctgaaaacgcggggaccagccctggtccccggctcaggactggaggggttgccctggtccctggctcaggactggagagaccagccctggtcccgggctcagggctgcagggaggcacctggtcttccctcgtcctcacgatcctgcaccctcaagatgccacgttgttgaggctgtttagggaacttgacaagctgattggaaactgtgctgaaatagagcccaggtagtgatgcggacagggcagtgccagaaggagccccagcgattcctgtgctgcaaggcacgcccaggacggggcactagccgggggaagaggctctcagggcccaggtgggaccccagcctcagactatgaggtcatgactgtgtacagctcagccaccgggctttgggactttgaatccaccttagcagggtttccaaacccattgtctccacggccaccctgccagtccagctgcagcagggcggaacaaagtggaggcctctttcttgctttctttttttttttttttgagacagagtttctctcttgttgcccaggctggagtgcaatggcaccatctcagctcaccacaaccttcacctcccgggttcaggcaattctcctgcctcagcctccctggtagctgggattacaggcatgcatcaccatgccaggctaattttgtatttttagtagagatggggtttctccatgtttgtcaggctggtctcgaactcccgacctcaggtgatccgcctgcgtcagcctcccaaagtgctgggattacaggcataagccaccgtgcccggccacagaggcctcattctgcagcgtatgctactcgggcaaaggcagctgactgcagacccaacacggtgacccagctggatggtgcctgagagacggggctgccccacatggtgccctgtcatgccgcgggacaggtcgcccagcagatggtagctatggccccagtgccatcctgggctggagacacatgggtgccagacacgttcatgcctgtcgtctggcccagctgccgtggggagccctccagggccgtgtgcctgcagggaccggcctgttcacctctaggctcacccctcgggtgctgagtcaccacagtgggtggggccgtgccccctcccaggccggcttccacagctgcccctgcagagcgcctctgtgttaagggctggccgcctccttcctcagggggtgtaacatgtaaaaagctgcaccctggcctgtacaggggctcccgcctgttatcccagccctgtgggaggctgaggcaggcagatcgcttgagctcaggagttcaagatcagcccgggcaacttggagaaaccccgtctctactaaaaatacaaaaattagttgggtgtggtggtgcgcacctgtagtcccagctacttgggaggctgagatgggaggatggcttgagcctgggagacaaaggctgcagtgaactgcgatctcgccactacactccagactgggcaacagagcgacaccgtctcaaaaaaaaaaaaaaaaaaaaggttctgggcctcgtaccttctgcgctttcatgagactcagccctggaagtcctatgtggctggtggccccagggaacaggacctgggctcctctcttctaacccatgtgggccacaggtccctgtccatctgtgctggggctcacctgggggccgagggcctcgggcatgtgggagatttgtctttgagaaaggggtggaggagtgtggagcccttggggctgcctgcaggccgtgagagacctccccagtgccgcttctgtcctgggctagggaggtgggggggcgggggaggaggagtggcagacactgaggcggtgaccacacgggcagggtgcaggtgtcgggatgacttggcaggccatggtgcagtgctctggcaggctgggcccaggccctgctgctgggcagtggtgtcatttggagggtggtccttcagggaccccctcctgcctcctgcctcgggggtgggctggggaggtcggggctaggtgggccctgcgctggcggtgctgatggtctctgtccccgcaggaaagaatctctatacaaatgaatacgtggctatcaaattggtgagtcggcccctccaccccacccccgctgacgtgccccccagggatttcagggcagcgacccggtcccctggtgactcgctcttgtgcccccaggagccgatcaagtcccgggccccgcagctgcacctggagtaccggttctacaagcagctcagcgccacaggtaccgggcggcccgcgggtggggcgggggctgcgcaggggcagggagggggctgccgccgcacgcccgtgcgtctgtcctccgccgcagagggcgtccctcaggtctactacttcggtccgtgcgggaagtacaacgccatggtgctggagctgctggggcccagcctggaggacctgttcgacctgtgcgaccggaccttcacgctcaagacggtgctgatgatcgccatccagctggtgcgcggcgggcggggcggggcggggctcggagggaagagggtggccctggaggggagcgcgtgggacggggaggggcccggccgacaccgccgtgcccccctgcagatcacgcgcatggagtatgtgcacaccaagagcctaatctaccgggacgtgaagcccgagaacttcctggtgggccgcccggggaccaagcggcagcatgccatccacatcatcgacttcgggctggccaaggagtacatcgaccccgagaccaagaagcacatcccgtaccgcgagcacaagagcctgacgggcacggcgcgctacatgagcatcaacacgcacctgggcaagggtgagctgcgcgcgcgcggcggggggcgggcgcccggaccccgctgaggctgcgcccctgtccccgcagagcagagccgccgcgacgacctggaggcgctgggccacatgttcatgtacttcctgcgcggcagcctcccctggcaggggctcaaggtgggcgaggaggccgggcaggcgggcggggacgcagggcgggagcaaggctgaccacagacccccgcaggccgacacgctcaaggagcggtaccagaagatcggggacaccaaacgcgccacgcccatcgaggtgctctgcgagaacttcccaggtaaggggtccctgcgcccccgccctgtgccccccaccccccaccccccacccccacccccgccgaggccccgctggcgctctctctgcagaggagatggccacgtacctgcgctatgtgcggcgcctggacttcttcgagaagcccgactatgactacctgcggaagctcttcaccgacctcttcgaccgcagtggcttcgtgttcgactatgagtacgactgggccgggaagcccctggtaggtgggggggtgccggtatgtgggagcgggggaccgggaaactgccctgagggagatgggaaccggcgctgcagcccatcctgacccctgctccctcacccacagccgacccccatcggcaccgtccacaccgacctgccctcccagcctcagctccgggacaaaacccagccgcacagcaaaaaccaggtgaggcccgggcgggaccgaccgccccagggaggggcatgggcggccagcgtgaccccctactgcccccaccaggcgttgaactccaccaacggggagctgaatgcggacgaccccacggccggccactccaacgccccgatcacagcgcctgcagaggtggaggtggccgatgaaaccaagtaaggctctggggcggtgccttcggggaggtgggggtgccctgggtccccatgggggtgggagggcctgaggcctgggctgcccccgccctgcaccccggtcctcctacctgagccactgccctcctcagatgctgctgtttcttcaagaggagaaagagaaaatcgctgcagcgacacaagtgaccctgggcgcgtgcagccccctgaatcttctccgtgcagccccttggggcgcgaccttgtgcgaggccctcggggcccacccacagcggcccagggccagaccctggctggaagccagaacgcagactgcaggggccgcgcctggctcaggcggccccacccccgggacgtggggtcacttccttcatgtaagactttggccgaaatttctacacctgtgtctagtcctcccctccaagagcattaactatttaaaacaaggaaaagaggaaaaaaaaaacagaggcccgccctaccccactcctgcccctccgtttctttgctgaagtgagtagtgtgatcctggaggccccccggcctggccccgccccgccagccgcccccgttagcg

SEQ ID NO: 8255 - DNA, 6000 bp, Homo sapiens; identical to SEQ ID NO: 2052

SEQ ID NO: 8256 - DNA, 6000 bp, Homo sapiens
ccgcctctgcctcccgaagtgctagaccactctcagcctaatttttgtatttttagtagagatggggtttctccaggttggccaggctagtcttcaatctccaaaagtgatgtgcccgcctcagcctcccaaagtgctggcactacaggtgtgagccaccacgcctggccacagttgttaatttcatttactattcactctgtattcaaatttccccaacatacttaaaatatgttcattgtttctcccccactaggacgaaaagtgtctgtcgtgtcccttgccatatcccacaccctatgacggtgactggtgcctgacactcaccagaagtacataaatgtttttatccttgtatggattcctaactcgtgaggttgttgggagcagaagctcaataaatgtgaaccccccccgccatactccctaaacatttgcaccatggctgtgtctgtcccccacttctgaatcctcattctgtacctctgtgtgaggtcagcgaggtgacgtcatttgcacagggccacacagcaaaatgcatggcagggtcccaattccaacctgaatttgttcaactccaaagtcacattgcctggtacatggcaggtgccctataataagaatcattccttttctctgttactgcttgccccagaaagcaggagggacataaacgtgtggcccagggccttcaggaggacaccctccttcctctcccccacgcgaagccctctcccaccatccattaacactccctgcccctcagtccacaggaaacgtgtggatgacacacgaggagatggagtcccttacggccacgaccaagcccgtgagtgccccctgccggccgccttgggggtggcactaaccttctttgggggtgggggcggggaccgagtctgtggccatccctaagtccgctccttgcgtcctcctctgcctgccccttaactcaccccttctctcccctcttcctactaacgggtcaggagaccaaggagatcagctgggagcaggtagggggcgcggggcggggcgtgagcgcatgaacaggctgtgcacgacgcatggatgcccctcctccgagccctgcccctgccttcaccagaacatgccatcatccccatgggggggcgctgcgccaagcttggctctggactgttccattatggcttggcggtggggagggtagaggggatgcgatgtggaagcccagactgttgcatagtcagccttatgcatggaccatttcatcatcgtgggttgtgggggctctaaggggcttcaattctgtagctcaggagagactgagcagccggtgtccctatagtggagggggcgggggctacagtggactgctcagtgtaccagggccaaggaggacacactggctgtggtggtggtgaggcagccaggctgaatgagaagttggggaggaggagctacactttgttctcaagaaacaagaggcggccgggcgcagtggctcacgcctgtaattccagcactttaggaggctgaggtgggcagatcacctgaggtcaggagtttgagaccagtctggccaacatggtgaaaccctgtgtctactaaaaatacaaaaattagccgggtgcagtggctagcgtatgtaatcccagctacttgggaggctgaggcaggagaatcgcttgaacccaggaggtagaggttgcactgagccgagattgcaccattgtactccagcctgggtgatagagccagattccatctcataaaaaccaaacaaataaactaacaaaaaaacccaagaggcatgaactcactgtccacggaggaattatgtttgactgtggtcatagatcacatatttccagccagggggaggcgtggattttgtgctgatgctgaaaggagtgagggacttgggactcatctggaatattgtcctgggccagatataacattagacaagtattttcaggacattgcaagagtgatggccctttcttagtgggagagctgccttgaaagagtccattgtcctgacttgggggtttagtgacgttggactgcagtgagacagagttaaagcagtgcttccccaaatttaatgtgtagtggggtggcacacacctgtagtctcagctacttggaagactgaggcaggaggaccgcttgagcccacgaagctgaggtcaacctgggcaacatagtaagaccctgtctctaaaaaataaacaaatacagccaggcgcggtggctcatgcctgtaatcccagcacgttgggaggctgaggtgggcggatcccttgaggtcaggagtttgagaccagcctggccaacatggtgaaacgccgtctctactaaaaaatacaaaaattagccgggcgtggtggctcgtacctgtaatcccagctactcgaaggctgaggcaagagaattgcttgaacctgggatggggaggttgcagtgagacgagatcgtgccaccgcgctccagcctgggtgacatagcagactctttcagaaagagagagagagagagagagagagaaagagagaaagaaagaaatttaaaaataaatataatgtatatttcgaatcacctgagggtcttgtgaaaatgccgataccgacttcagtaggtctggagtaaggtctgagattctgcaattccagcaagtccacaggtgatggtgacgctctaggtctcaggacaactgtttgagtagccaagagtatatgctgtcatgaagggctaggagacaactctggattggtccattatcctgagcagagattggtcattgtcctaccatggggtgggaaaaaaccttggattgggaggttggactgtacccctctcatgcacagtgggaaggggccagagggcctgactcttccctcacctgcccatggccccagatcctggcatatggcgacatgaaccacgagtgggtggggaacgactggctgcccagcctggggctgccccaataccgcagctacttcatggagtcgctggtggacgctcgaatgttagatcaccttaacaagaaggagctccggggccaactcaagatggtggacagctttcacaggtgggggctgcctggccagtggggacagtccaaagggaagccccaccccagagagtctttggccaataggattggccatgggagattcccaggcttatcttggcccttttagcctgagttctcaggaaatcctgactctgtgctcctttcaccaatgagatggtccacaggaaaagttcagatcctgaaatggcttggctagttaaccctggaccccttccaggctggccagtaggaagtgcctattattgaaaatgcctcacctcctgagggggtcaacagtcaatagaacttatcagctccccaccctttccaagaagagcgcagccagtggggagggacccgtaggagcagcagtctaggggactggaaagctcatccgtgactccacttcccctgctgctcagggtgagtctacattatgggattatgtgcctgaaacggctcaactatgaccggaaggacctggagcggaggcgggaagaaagtcagacccagatccgaggtgagtagagcctaagggtccctttgggagccaggtggagggcgtggagctggatggggaggagagggggtagggggagaccggagaagcaaattggcaccataaccgtgggggtggagccagcgtggggggcgtggcccgaagagaccaaatggaggtggaggtatgggctaaactgaactctccaggccacgggaggggcacggctgagggtcccttccgtccccagacgtgatggtgtggtccaatgagcgggtcatgggttgggtgtccgggctgggcctgaaggaatttgccacgaacctcacggagagcggggtacacggggcactgctcgccctggacgagaccttcgactactccgacctggccttgctcctgcagatccccacgcagaatgcacaggtgagctgccgctgggcccggagcatgctgggcgtccccacctcgcagactgcacgctccaaccgccccctccacctcctctttccaggcccggcagcttctggagaaggaattcagcaaccttatctccttaggcacagacaggcggctggacgaggtgggcgcggcaacagctcagagggctctgctcccagcggctcctcgagaggctgagctgagggggcggggcctgactattaatggtcacggttggaggcggggccaggagaggggcggggttaaaggagaggtgagacccggagaggggtggagtcaaaggaaggggcggagtcagacaaggcaggagtccctcaccggctgtccggctcctatacctaggacagcgccaagtctttcagccgctccccatcctggcggaagatgttccgggagaaggacctccgaggcgtaactcccgactcagctgagatgttgccccccaactttcgttcggctgcagcgggagccctgggctctccggggctccctctccgcaagctgcagccagaaggtggggggctcccaaatgcgacagcccttcctcgcttccctagggtggggcatggaccacctcagtagtccgggttctggaatggcctagtcctttctcgcccacccctgaggaatggactgctccaacgttccggactcccccgtcaggatgaaatggataaatcccactcccccttcccagggcgggagtgaactcgcccaatgcgagtttgagtccttggctgcggggaagggagggaaacccatgtggagcccggcgatcgttgtgacatcgggaagggaagtccaaagggaggaatcctggagaggaacagggaggagggtgctccaggctgaaccgctgctcgctctccctccaggccagacttctgggagttcccgggcagacggcgtttcggtccggacctattcctgctagtgcaggcctccaggtgaggaccgtgctgggcgaccttgggggtgcggggcggcacggtggatcttcactgctccacgcgctgcccggcgtcatgcaggtgacctcactcggacggaagaatcttcccgaggctgggctgttccctctcctgcccggactgtggcctcgccggggagagcgggcgggggagctcgcgccgaggactggaccatctgtacagaccagcgggagtgcgcgcgcccgcctcgcacagggccggggcctggaccaaaccacatgaactggactgagagggggaagaagcggggaggaagaaatcccgccccaaacgtccgctttccttttctctactttgtaatttattgatcagtttctgttgggagacgggtgtcctttacccgcgggaagggggcggggcttccctcccgggccgcatgcggggagaggctgctccctcccctttttcctgcccagtcgcggggcccaagtcttccttcttcgtccgaaaggaggggaggggggactcgctgctacaagcctcgccccctgtgccactcagctccgccccgccgcgtccggtcgccggtcccccgggtcatctgcgggcgggttcccctctccctcccccgtgtctcgtgtccccggggcctcaccgccccccgtgctgtggccgtgtccgtgccccgggggtagggggcgcagaatggcgcttccccttctcctctggctccggggtttgcatgggagaatcctctttccacgatgccgctgggcgacgtggcgtgggggcagggggacggtgggggagccctcgcccccgactctcggtcggcctccccgccccaggcgtcactcagtgatcacgggtaaagagaactgtttcaaaaagcttccttgttgactgattttttttttgcggggggggggggggctgttcaaccaaccacctcgagccaggagtccaggcccctcatccctcaagtctaggtccaggtctctagaccctacccgcattccccgatgccctgagattcccag

SEQ ID NO: 8257 - DNA, 6000 bp, Homo sapiens
gactgtacaagttttctaaagtaagtgtcctacaaaaagcgtgatccagggccgagaggaagaaacctgtctaaagtttagtcgatctgaggggaccattaaggctcttttggtcaccagtgttacgtggactctgccatccagatgtgggtctgagactctgggtgtctgcacatggctggtgcccactctgtggctagtatccactagcctgatccagcaggcagcatctccaggcagcaagaagtgagacaaaccaggaggtgctagcctggggtctctgcctcagcaccaaccacctgctggggcctcctctggacctcctcacctgctgagtgtctgagcatccacatgtgtctgcctgtgtcctcgggggacagtgaccctctggttgtctgctgtatctccatcttcttgatttcattcatttaataaatgtttctgaaacacctgggggcatgtcgtgtctatcggggtgtccctcttcacctctaggtttgtctgtgtgactacacagtcacatctgttcacagcaggctgtgtctgtctttctgcatctcatgtgtaattgcttcctcgaaggcacactctctctctctctcttcctctctctctgtttctcttttgtgtctgtctctccctgtatgtctcttggtgcctctctgtttgtgtcttcattcattgattcattcgttcagtcatacggtatctcagacattcctggaggcccccgaagagttcacagcccggtaggggagacagacgctagcccagcctagtttgatcagggctgggagacaggaaggtgctggaggctgagggtgtgtggatgagtggggagatggggttcagagaaggtttagatgatgggacgatgaacgtgtctttgggtgtggagacatcccaggattggaagctgtgtgggtggtgtgtgttggggtagggggagggaagggaagtcaaaaggccatatgtgccaccctcagattagagcagagtgctgggaggggtgaaggaagaaggccaacaagacaccaatcattcaaaattaagggttccagacttctagttctctcctccctcagacccagaagtgtagatctccagcaactgaggatcaccctgtttccatcacgattacctaggaagagacccgcccacatagggagggtgggacgaagaaatactggccaggctgggtggccgggatgcttaggactcagtaaggagaaccagccaggcagcacatcacagcgggaggagctgtcccaggtggcccagctcagcaatggcaatgggggtccccagagtcattctgctctgcctctttggggctgcgctctgcctgacaggtacgcaaacttctgaatccagtagtgagaaggggcaggtggcctggactcctagatctgagggaggagagactgggggcctggactcctgggtctgagggaggaggggttgggggcctgatctcctgggtctgagggaggagggggctgggggcctgaactcctgggtctgagggaggaggaggctgggggcctggactcctgggtcttggtgggcaggagcctggaggctatgtcattttcatttctcttccctgcctttgttcttctcccatcagtcatttttcctggtgtctctcttcccaccatcccagcctttcttctcttccttgcccaacccccaattcaaaggtatttccagggagccctcaggactctttccgaaactggcagaaaccctggcttcaccttcaggcaacctctaccccattgtgggctaggacaggaacataactcatttcagaatggaagtggttacaaagacagggaattagaaatgtagaaaggaggctattcctgcacacaaccaaatctgtgtgtttctgctccttaatgggagagagtttgatttctgtatgtgtccaggttcagtatgtcctatgagtctctgtgcttgtgtgtgtttctctgtataggttttaaagtcttagtctgaacaaatgcgtttgtgggtctgtttctgagtttgctttctttgtaaaagagatgcgtgtgtaattttgtgtatctgtgtctgtgtttatgtatctgtgatttgtaagcctatatttatctctatgtatatatgctcagtttttgttttttgttttgttttttgagacagggtcttgctctgtcgcccaggctggagtgcagtggcacaatcacagctcactgaagtcttgacctcctgggcccaagcaatcctcccacctcagcctcctgagtaactgtgactataggcatgtgccactgcgcctggctaatttttgtatgattttgtagaggtggggtttcactatgttgcccaggctggtctcaaactcctgagctcaagcaatccactcacatcagccaatgagactggccttttttcttgtggttgtttttaaaatagagataaggtctcactctgttgcccacactaaggtgtagtagcacaaccatggctcactacagcctcaaactcctggctcaagcaattctcctgcttcagcctcccaagtagttgggcctgcagggggacaccaccatgcctgaccaattgtttgggccttttgatgtgtttttttttttttttctctccatgtatctgtgttacatgggtctatacattttgtatccatatgtgattttgattttttttttttttttgagacagagtctccctctgtcgccgcccaggctggagtgcagtggcgcgatcacagctcactgcaacctctgcttcccaggctccagcaattctcgtgcctcagactcctgagtagctgggaccacaggcgtgcaccaccatgcccagctaatttttgtatttttagtagaaacggggtttcacctgttgcccagactggtctctaactcccgagttcaggtgatcctcctgcttcagcctcccaaagtgctgggattataggcatgagccaccacccctggcctccatatatgattttaaactgtatgtttttgtgatctcattttcctgtatctctaaacatcgcataattgtggcctctggttttatttgtgcttctgtgatttgggacctctctgggtatgattttctgtgcatctggtccctctctgtgttgatatggttatcatacaggcacaagcatcctcacagacatacgctttgtgtctgtgtgattttccatgtgtgaagtgctgtgccttagttagggaggtttatattgcagggtccagatgcgtacttgttttgtgtgagaatgtaaaactctgcctgggtgcattcaggatattctgtgtatatttgtgagacttggatgaacctgtgtatgtgttgttattgtgtgtttatgtcagtttgtgtgttgctggggctgatgtatgggtttacagggcactacaggaccacacttcactctacctgtcctggagtgcatgtttcttgtcaggggtctcttactgtgctgtccactttgtgagttaagcttggggaaggatgggcagagcaagaatgaatcacttttccttcctattctaagtcatagctagggagagggcttcctggaagagggtggagacctggagtgtcctggagggaaaaaactggactgtcagctgcagagaggtcattactctgccatgagacagacacagctgtgaccagctgcaatagcagcacctggtctctcaaggcgtgtcttccctgggagcagaggggccaggcccgtgtgcctgtcatttgctgggtggagctctgagttcctgggacaggctcacactggccctgctgactctgccacgcctctctccccagggtcccaagccctgcagtgctacagctttgagcacacctactttggcccctttgacctcagggccatgaagctgcccagcatctcctgtcctcatgagtgctttgaggctatcctgtctctggacaccggtaaggagcgggagccgggggacagggatgagagattagggaggaaaaaggggggagaggggagcagaaagggaggggaattgagtagaagatgaaaagataaagatagaaagatggggagggagaggaagaagaggaggaagaaaaagaaaagggtggatgagggctggggcagtggctcaggcctgtaactctagcactttgggaggcagaggctggcgaatcacgaggtcagaagtttgagaccagcctggccaacatggcaaaaccccgtctctactaaatatacaaaaagttagctgggcgtggtggcgggcacctgtaatcccagctactcgggaggctgaggcacgagaatcgcttgaatccgggaagcggaggttgcagtgagccgaaatcgggtcactgcactccagcctggcgacagagcgaggctccgtcctccgccccacaaaagaaaaagtggatgagggacgagcggtgaggggaggaaacaatggggaagcaaggaagagaaggtgggagaggcgcacagggaggaagagtggaggaagagaagaactcgggggaaaaggtctgggggtgagaggaaggagggaaggagggaggggaggaggtgtaggtgaaagtgaaaggatagagggaggaggaagaacgctgagactggagggagaagggtttcgggaagcagagcacgagccccgatcccgcccccagggtatcgcgcgccggtgaccctggtgcggaagggctgctggaccgggcctcctgcgggccagacgcaatcgaacgcggacgcgctgccgccagactactcggtggtgcgcggctgcacaactgacaaatgcaacgcccacctcatgactcatgacgccctccccaacctgagccaaggtgcgcgggagagcggggctgggctccgggagggacgatgagaggcctggcagcctcggggaaggcgtggcctccgctgggcgcctgctcttggcgcgctaggatcccaacccccgagacgtgctaggcgcgggctctggcgcagtgcgcagcccgcacgactgtgccagggtaccactgcctgagtgtgcatctacgctctcttgccagcacccgacccgccgacgctcagcggcgccgagtgctacgcctgtatcggggtccaccaggatgactgcgctatcggcaggtcccgacgagtccagtgtcaccaggaccagaccgcctgcttccagggcaatggcagaatgacagttggtaaggggctggaagggtggaagggcctgggcaagggatatggaggcagggcagccatgagggtagtgataccagacaggcccaacagggagacatggccctgctctgaggtgggaggcatgaccctggtctgagggagaaggtttgaccctggtctgagggagaagatttggccctggtctgagggagaagatttggccctggtctgagggaggaggcatgaccctggtctgagggaggaggcatgaccctggtctgagggaggaggcatgaccctggtctgagggaggaggcaagaccctggtctgagggagaagcctggccctgctctgaggaaggaggccatgccctggtctgagggaggaggcataaccctggtctgggggaggaggcatggcccctggtctgagggaagaggcatggccctggtctgagggaggaggcacgaccctgttctgagggaagaggcatggccctggtctgagggaggcctggccctggtcttaggaggaaaacctgaagcaagtctgaggaccgaggcatggccctagctaccaaggtgaaggttcaggtgcagctgtctccctcagttctgaccgttcctcactgctttgcccacctccaggcaatttctcagtccctgtgtacatcagaacctgccaccggccctcctgcaccaccgagggcaccaccagcccctggacagccatcgacctccagggctcctgctgtgaggggtacctctgcaacaggaaatccatgacccagcccttcaccagtgcttca

SEQ ID NO: 8258 - DNA, 6000 bp, Homo sapiens
atgggtgaatggataggtaggtggatggatagatggaagagtgggtgaatggatgcatgagtggattggtggatggatggatgatgggtgggtagatgtatgtatgtatgaatggatgatttgatatgtggctgggtggatggggaggtggaaggatggatgaaaggatggataatttggggacaaggtaactgattcgggctggagctaggactgatgacaaatgtccccatctcctgccagagctcagggctccaggccaggatctttccagagagaagctgcccctactttgagcctggctagcactgctctctgctggtcaccctggaggttgcagccagcccaccaactcccagtgatggaagaatcagcactcttgtcaaaaccattcttcctttttcttttttctttttttttttttttgagacggagtctcgctctgtcgtccaggctggagtgcagtggcgcaatcgtggctcactgcaagctccgcctcccgggtacacgccattctcctgcctcagcctcccgagtagctgggactacaggcgcccgccaccaagccgggctaatttttttgtatttttagtagagatggtgtttcaccgtgttagccaggatggtctcaatctcctgacctcctgatccgcccacctcggcctcccagagtgctggcatgtcagccgtgagccaccgcgcccggcccattcttcctttttcatcaagttaaacattttttaaatgtccacccatacagaaaacaaaaggacaaagtcccaatatcatagaatttgtgttcaggtgggaggaggaggtggagaccaataataaacaaaatgctaggtagaaaacacagtgtgttggaaaataggggaaaagtccagcagagaagcgggcagggagtatgatgggtacttaatttttttttttttttttttttttttgagacagagtctcgctgtcacccaggctggagtgcaggggcacaatttcggctcactgcaacctccacctcctggatacaagtgattctcctgcctcagccttctgagtagctgggattacaggtgtgtgacacacccagctaattttttgttttttttggttttttttttgagatggagtctcactctgtcgcccaggctggagtgcagtggcgcaatctccactcactgcaacctctgcctcctgggttcaagctattctcctgcctcagcctccctgagtagatgggactacaggtatggcaaccacgcctggctaattttgtttttttatttttattttcatttatttgagagagttttgctcttgtcacccaggctggagtgcaatggcgcgatctcggctcactgcaacctccacctcctgggttcaagcaattctcctgcctcagcctccggaagtagctgggattacaggtgctcgccaccacgcccggctaatttttgtacttttaatagagtcagggtttcaccatgttcgccaggatggtctccaactcctgacctcaggtgatccacccacctcagcctccggaagtgctgggaatgcaggcactggccgccccgcctggcctccttttgggttttaatggcagcttcattaaacagacatgactcacaatcataaagaaacgtaattgggccaaaaattagtatgatctcatatgaatagactgactggggagccaggcagggcctgtctgtccagatttgtcttggtctctctgtagcttttcttcctccagggtatggggcatgaccttctctggaatgaggtgtttgggctcccaatcagattagagtcctgccttgggcagtgaaaagggacagaaagtggagagagaaattctgtttccctagggcttcgcctgaggactaaagaacctataaataggatggggcgtggtggctcacgactgtattcccagcactttgggaggctgaagcaggcagatcacgaggtcaagagatcgagaccatcctggccaacatggtgaaaccctgtctctactaaaatacaaaaattagctgggcgtggtggcgagcgcctgtagtcccagctattcaggaagctgaggcaggagaatcgcttgaactagggaggtggaggttgcagtgagccaagattgagccactgcactccagccctggtgacagaatgagactgtctcaaaaaaaaaaaaagaaaaaaaaaaccataaataaataaataaatatttctgaggctggtgcagtggctcacacctgtaattccagcactttggggaggccaaggaaggcggatcacctgaggtcagtagtttgaggccagcctggccaacatggtgaaacccagtctctactaaaaatacaaaaattagctggaggtggtggtgggcagctgtaatcccagctactcgggaggctgaggcaggagaattgcttgaacccaggaggcagaggttgcagtgagctgagatcgcaccactgcattccagcctgggcaacagagcgagactctgtctcaaaaaaaaaaaaaaaaaaattcaggctgggcacagtggcagaggccgcagtgagcggagatcgcgccactgcattccagcctgggctacagagcaagactctatctcgggcgaggggaaagaaatcacaaggacgcccggaaactgtttagcactagcttgcaatgctaacgcacacatattctattacccagcgattcctctactgttcccgatagaaatgcatgaatacatcctccaaagatatggagccaccatgcccagcagttcccctccttttttttttttttttgagacggaatcttgctctgtctcccaggcttgagtgtaatggggcaatctcagctcactgcaacctccgccccctgggcggagccattctcctgcctcagcctccccaatagctgggattacaggtgcccacaaccatgcctgactaatttttgtatttttagtagaggtggaatttcaccatgttggccacgctggtctcaaactcctgacctcaagtgatctgtcctcctcggcctcccgaagtgctggggttataggcgtgaaccgctgtgcccggtccccccccccacttcttttttgagaccatgtttcgctcttttgcccagcctagagtgcagtggcgcaatctcagctcactgcaacctctgcctcctggactcatgtcattctcctgcctcagtctcccaagtggctggaattacaggtgccctccaccacgtctggctaattttttaatttttagtagagatgggctttcatcatgttggccaggctggtctcgaactcctgacctcatgtgatctgtccctttaggcctcccgaagtgctggaattactggtttgaaccactgcgcccatcctcccctccccctgcctttttttttttttttttttaagatgggtgtctgactatattgctctagctgtcctttatctcctgggctcaagcaattcttcctaaactctgggattttacaggtgtcagccatcctgccccaccaggatataagtcatttgtcagatatatgtattgtaaatatcttaccccagtttttttggtttgttttgtttttttgagacaagagtctcgctctgttgcccagagtacagtgcagtggcgcgatctcggctcactgcaacctctgcctcctgggttcaagagattcttctgcctcagcctcccaagtagctgggattacaggtgcatgccaccacgcccggctaatttttgtatttttagtagagatggggtttcaccatattggccaggctagtctcgaactcctgacctcatgatccacctgcctcggcctcccaaagtgctgggattacaggtgtgagccaccgcgcctggcccatcttaccccagtttttattgcgattactttctttctccctctcttttttttttagacggagtcttgctctgttgccaggctggagtgcagtggcgccatctcggctcactgcaacctctgccttctggtttcaagggattctcctgactcaccctcccgaatagctgggattacaggtgcccaccatcacacccagctagtttttgtatttttagtagagacagggtttcaccatgttggcctggctggtttcgaactcctgacctcaagtgatcttcccgcttacggcctctcaaagtgctgggattacaggcgtgagccaccacggctggccaagtttccagagcttttttttacaatctcaatgatgtatctcggaaggcagggactcagtatatctcatttaccgctgcatgcccagcaccccttaccatgcctggcacacaatgggccttcgacaaatgtttactgaatgaatgacaatgtcgtagtcctgtctctggcctcattttcttcctgtgggcatgttaatgtctgtcttgcccatttcacaggatgttgtgaggctgcgggaaccacaggatccgttcccccacccacccaggagttgggtttggaggctctcaggccgcgtcagctattacattcaggaaaggcggagctccagtcttcctcgggaacttgccggctaagctccacgtgggcgccccgcccacatccagccacgctcacacctgtcagctggtgggagggtcaggaccagcctctaaggggcgtggctagggctcagaactaggaagaaggcggagttccggaggccactgaccaatgagagcgcaagttttggggccggaaaaggcggggccgcgcgcaggagaaagaggtgccacatttccattggactacctgtcgtcgtcagggaaacgcagcgtctccctgccggggaggtggcggggcggggctttctgggaggcggggcttccggggccggctcggctgggaccgggcgctcgtcgtcagctgacccgccgccatcttgtccgccatttgcaaggggcccggagcgggatcgcggcacctgccgagcgggtcgccgcctctgccgcggtccttggaccccgccgccgccctggcctgggagcttgccccgccgcagcggccggcagcgcggcgctccgcgggcggcaggcacgggccccgggccccctcacggcgcccagccgcgggcctcccgaggcaaaagcccgtgggccgccgcgatggccctcaagatggtgaagggcagcatcgaccgcatgttcgacaagaatctgcaggacttggtccgcggcatccgtaaccacaaggaggacgaggtgagcccggcgcgccaaggggctgctcggcctggtcacagccccggcccagggcccagccctgctcactgggcctgctcggcctgccgcccgcccgggctctgtcttagttggaggtcccgcttagggctccggccctgcctggcctgggcctggggcgccgcccacctcctcggtcccccagcatcagtttccccacgaggggcgaaggccttggagcagcacatctcggatcctcgcctcatcggatcacctgggggaagcgctgttcaaaatgcaatgccctgggccccgcctataggtgccctccccctggaccctcagtttactctctcagagggagattcgggcccacctgcccccgtctcgggccaccctcccaggagacttgcgaggtctctgggcagagcttcttcaacctgagtgtgtttccgaatcaccgattaaaaatgcaggggcccgggccccgcccccggaccctccccgggagaccgaggcagggggtcctgggccgtccctggagaaactccttcttccttctgggtcgtgtaaatgcgtgtccaggtcgctccctgaggcctggctcggaaccaggcagggtcttggggcgttgcctccagtgcccccgttcccaggaaggtggggctgctgccaggagggaggaaggacagcggcatcctgatccccagtgaggtagcagcttgcgggaagctggaatggggaagctgacttcaagtaggaacctgaaagccagggcgag

SEQ ID NO: 8259 - DNA, 6000 bp, Homo sapiens
tgcgcccggctttcagtgaattttcttatgctcttcacctagattcacttattcttcacattttaccaaatttccttttttctcttcttatgtgtgtgtatatgtataataattattatttttttgccgaacaattcaaatgaaagttccagacatcatgtattttgtatctcctaagaacaaggacattctattacataaatacagtataattgttaaattcaggaaattaaacattactgaatattgacatgattatttaataaacagtctacattcagattttttcaattttttctctgttttttttgtttttgtttttgaagtggagttttgctcttgttgccagactggagtgcagtggaccaatctcagctcactgcaacctctgccccctgggttcaagtgattctcccacctagctggtattacaggtacagctaatttttgtatttttagtagagacagggttttaccacgttggtcaggctggtctcaaactcctgacctcaagtgatccgcctgccttggcctcctacagcactgagattacaggcgtgagccaccttgcccagccgtttttgttgttgttttgatgttgttgtttgtttgttttgggtttttgagacagggacttgctctgttgcccaggctggaggtcagtggcatgatcatagctcactgtggccttgatctcctgggctcaagcaatcctccctcctcccagtagctggggtgacaggcatgtgtcaccacacctgggtgattaatttattttttattttttatttttttcttttgaagagacagggtttcactatgttgctcaggctggtcttgaactccagggctcaagttatcctcttgcctcagcctcccaaagtactgggattataggtgtgagccaccgtgcctggccccttgttttattttgtattttcatgattatcttcatggattgagactcttttcttatatttattcacctcttatattggttcccctgtgaattgctcattcatcacccttcctatttttattttaagatgtttattttctattttctatcaagggctctgtctcatatagtatcaacatttttctcccagtctgtcacttgtctattaagcccattcatggtgttttttactatggaagatttttgaaatactgaagtcagtcaatttgtcagtattttttttttatagagatagggtctcatcatcttgcccaggcttgtctccaactcctgggctcaagagatcctcctacctcagcctcccaaagtgctgggattataggtatgcaccactgtgctgcttttatgttattttatattttattagtattttttttctgttgcgctctgaagacatctgctcctacatggcttctggtgcacaggaggttttcaaaaacacgtactgaatgaatcaaagcccaaagcttacgtagctctttccctgagcaggctgattctccaaacaattatgaataaatatcgcatgctatgaattccccttaggaaggagtcgtcctgtggcgtctacctggtgtgcttatgttacaagccatctttttcttgtcgtgagttatggaaagcagaaacagagtcagatcactctgcatctaataataaaaatagctaccagaaacagtgtgttccacatgatgacatcagcgccacgcaggcagaaaatggcattaaatgctaagaacttgtagatgtctcatttatagcctctgtgaaactgaactctgtcttttgacgctttcaatctctgtgcctcctccagtctttcctattttagtgagcaccagaatccatcggatggctcaaagcagaaaaccagaagtcacccccaacacctccttctcctgcaacccacacagacaaaccagtgctaagtcctgtcaattcaccctccaaaatatttctcaaattcacccactgtcctttctcctgtcaatgccctcagctaaactaccgtcaagtcttttcttagaaatagagatagggtctcactatgttgcccaggctggtctcgaactcctgggctcaagcgatcttcctgcaatggcttcccaatgtgctaggattacaggtgtgcgccaaggcacccagcccaactcttgcccagagggctctgaagtagtctccctgcttccattcttgcttctctataattcagcctttctttacacacgagtcaaaataatcttaagaattaaaattagatgacaaccttcacctacttaaaatccttcaatgaatcacactgtaattacggtaaaatccaagttccatagcacggtctatgggactgtccctaatctcccatctccctactgctcacgaacattcagccaggctggctttccaactcctcaaatgcagcaagcccttctccatctttttgtcaactatcctctcttctctccccacttctcagtacttttttttcttttttttttttttttttgagacggagtcttgctctgtcgcccaggctggagtgcagtggcatgatctcggttcactgcgacctccacctcacaggttcaagcgattctcctacctcagcctcccgagtagctgggattacaggcgcccaccaccacgccctgctaatttttatatttttggtacagacagggtttcaccatgttggccaggctggtcttgaactcctgacctcaagtgatccacccacctcagcctcccaaagtgctgggattataggtgtgagccaccacacctggccttctcagtacatttgacttggctaattcctgcacagaagtctctctcattctttcttcacagaacttagtacaacctatagtttttctagtatgtatgtgtattagttacctactgccatatgacaaattttcccccaaacttagtgccagcaggcattgtggctcatgcctgtaatctcagcactttgggaggctgaggtgggagggtttcctgaatccaggagttcaagactggcctgtgtgacattaggtaaaaaattagctgggcatggtggcacatgctcccagctactcgggaggctgaggtgggaggactgcttgagcccaggaggtcatggctgcagtgagctgtgattgcaccactgcactccagcctgggtgatggggcaggaccctgtctcaaaatacaagcaaacaaacacaaaactaagtggctagaacagcatgtgttatctcagtttctgtgggtgaggaattcagatgcagttcatatgggtcttctgttttcagggtctttgtttttctttctttcttcttcttcttcttctttttttttcttttgagacagggtctcactctgttgcccaggctggagtgtaatggtaatgatttcagctcgctgtcacctctgcctcctgggtccaagtgattctgatgcctcagcctccttagtagctgggactacaggtgcccgccaccatgcctggctaattttggtatttttagtagagatggggttttgccgtgttggccaggctagtctcaaactcctgactttaagtgacctgcctacctcggccttccaaagtgctgggattataggcatgagctaccacatgcagccctgttttagggtgtttcaaaggctgcaattgaagtgaagcagtcatccaaaggctcaactggggcaggaccctcttccatgatcacgttcatggctgttggtagcatttggttccttatggacgcttgtgctgagggtctcattgccttgctgactgttggctggaggacaccctcagttcctttccctctggatctctccagcatcttagcttgctttgtcaagacacgtaggctgagaaggcgagagacaggctctgctggcaaaacagaagtcacaatctctcatagcctaatcgcagaatgacatcccattcatttgccattttctatttgttagaatcaagtcatcaggccaagcgcagtggctcatgcctgtaatcccagcactttgggaggccaaggtaagaggatcacctgaggtcaggagttcaagaccagcctggccaacatggtgaaaccccgtctctactaaaaacacaaaaattagccggcatagtggcacacgcctataatcccagctactcgggaggctgaggcaggagaatcgcttgaacacgggagtcggaagttgcagtgagccaagatcgcgccattgcactccagcctgagtgacaagagcgagactctgtctcaaaaaaaaccttttttttttttttagagatggggtctcactatgctgcccaggctggccttgaactcctggactcaagcgatcctcccgcctcggtctcttaaagtgctgagattacaagtgtgagccactgcgccctgccaagatttggtttttaacttacgcgttacctcctatacttattttttcatggtttgaacatgtaacatctactttcttagcaattttgcagtatgcaatgcattgttacgagctgtagccaccatgatgtacagtcgatctcttggacttactcctcctgcctatcaacagagatttgttgaagggatgaatctgcttcttcagccgtcggtaaggggatcagcagcgaggacgctgagagaggagccgcctccgttggaaatcccttcccatccacctccaagcctctttccaagcgggattcagcaccaggcgcccctggacagctctggaaacccaaccctgccggaaccgttcctcgccaatccgggtttcccgccggggccgcttggtggctgcgcccgccgctcagcgggaggaaacccctttcctgtgccggtaggagaggtggagtcgcatatgagtggcaggtttcgcagccaatagtatggaaagttctgccagcgggtctcggggaggccaatgggcaggggcgtgggcggggcgtggaccagccgcgccgagcggggcctctccgggccgcgtctgtggggtcgagactgcgcggccgttgggcgtgcagcggcgccagtcggcggacgaggggcccccgggaggtaggtgcgggcagagagaggacctggggcggcggggcggggcggcgctgagcggccgggggtctgttggactctacccgcacgttagccgaggcccgtctccggtgcccggtagcgcgaggcacacagaaggcgctcaataagtgctgattgaatgaatgagcccgtgccctcctcatcccggcccgagcagcctccggtttgagagcgtgcaggccaccctcaccttcactgtacagactgaggtatccagatgccggacaggtctttattgggcgcctactgtgtgcctgggtggctctgcgctgggtgcagctggccctgagcaagacagacagcctggtcccgcccagctcaccgccgggggggagggacgactttaaatgacttaaaataatgtaattcctagctccctctgtagcacaaaataaaagaaaataacaccagggaagggggcggggagagctctgagtggagacatctgagcagtgacccgaagacctgaatgcagtgaggtagcggggccatgaggcgcttggggctgatggtgggggagaaaacccagttggggaaaactcaaggacaggggaggagctgagattcctcctaagaacggtgacattttggggtccagggtgaaaccgacttcactttggcccattgcatcaggtaaaatgcggcccttatcagtggccacacgcttcccctcgtccatgtgttcagccagcggtttttgagtatctgttctgcagcaggccttccggcgggtacagggatatggtttagggcaggagtcagccaggggcagagagggaggccctttttttttttttttttttttttttgagacggagtcttgctctgcagcccaggctggagtacaatggcgcgatctcggctcactgcaagctccacctcctgggttgaagcaattctcctgcctcagcctcccgagtaact

SEQ ID NO: 8260 - DNA, 6000 bp, Homo sapiens
tacaggcgtgagccaccgcgaacagccaacctctctctctttctctctctctctcttttttttttccttgagacagtctcgctctgtcgtccagactggagtgcagggcgtgatctccgttgactgcaacctccgccttccggattcaagcgattctcgtgcctcagcctcccaaacagctgggactacaggcgcgctgattttttgtagttttattagagacggggttttgtcatattgcccagggtggtcttaaactcctgagctcaggcaatccacctgctccggcctcccaaagtgctaggattacgggcgtgagccaccgcgccctgccacaacctctctatctttataaacgtttaaaattgaggccgggcgcgctggctcgcgactgtaattccagcacgttaggaggctaagggaggaggatcacttgaggccaggaggagttccagaccctgtctagcaaaataaaaaaataaataattgttccttcgggacttatcttttctatgtctgtgccatgtagccccagactcgaaaccactcaagccatgagactcctgagggtagagaaaatgttttgatcttctccctacctgtgttcttctgcccagcactctgccccatcctggacactaatccttgcttggttaatttccactcgtctttttttttttttttttttttttttttttttttgagaaggaggcttgccctgtcgcggaggctggagtgcagcagcgccatctcggctcactgcaatctctgcttcccggattcaagcgattctcttgcctcagcctcccaagtagctgggattacaggcgtgcaccaccacacccaactaatttttgtatttttagtagagacgggctttcaccatgttgtccaggctggtgtcaaactcctgtcctcaagtgatccgcccaccttggcctctcaaagtggtaggatcagaggcatgagccactgcgcctggcctttatttatttatttatttatttgtttgtttatttatttatttgagacggagcagcctgtcgcccaggctggagtgcagtggcacaatctcggctcactgcaacctctgcctcccaggttcaagtgattctcctgcctcagccttccgagtagctgggattacaggcatgcaccaccatgcccggctccactcgtccttctgatctcagctcaaatgtcaccccttctaggaagctgtcactaactcttcaactcagctaggtgcctgttatgagccattgtggcagccagcctccaagatggaccccaatgagtctcacctggtatttgcattgcctcctgcattggacagggctgattaggtaccaatggaacattgtggaaatgacagtgtcataaaagatctgaggcaaggccataaaagacatagcagcttccgccatgctctttcttagatcactcactctttgggaaaacagctgccatgtgaggacattcatatgtccttgtggacagattcacgtggtgaggagctgaggtctctggccaatagccagcattcatttgccaaccacaggagcgagccacctggaatacaggtccttcagctccagtcaagcattcacatgccagcctggaaaatatagcaagacctcttctttccaaaaaatttaaaaattagctgggcatggtggcacgtgcctgtagttcccactactcaggaggctgaggtgggaggattgcttgagccccggaggttgaaactgcaatgagctgtgattgcaccactgcatgccagcctgggttatagtgcgagaccctgtctcagaaaagaaagaaagaaaaaaagatagtgttctcgtggctgtagcactggctaatatcttttttttttttttttttttttttttgagatggagtctcgctctgtagcccaggctggaatgcagtggcgcgatcttggctcactgcaacctctgcctcctgggttcaagcagttctcctgtttagcctctctagcagctgggactacagttgcacaccaccatgcctggctaatttttgtgtttttagtagagatggggttttaccatattgatcaggctggtcttgagctcctgacctcaggtgatccacttggctctgcctggccttcttttttttttttttttttttttttgagacagagtttcactctgttgcccaggctggagtgaagtggcacactctcagttcacaacaacctctgcctcccgggttcaagtgattctcgtgcctcagcctcccaagtagctgggagtacagtcacacgctaccatgcccggctaatttttgtccttttaatagagatggggtttcaccatgttggccaggttgctgttgaactcccaacctcaggtgatccacccacctcggcctcccaaagtgctgggattataggcatgagccactgcacctggccttaaatttatttatgttatgtcatttaagtccatttttcctgctagactgtgaatgctgtgagggtgggggcagtgtctgttttcttgctgcaaatgcattcattcattcagcaaatgtttattgaacaccagagttgtgccaagtattaagttgaacactggagatcaggactgggactaaggggaggcaagtgacgtgttgagggcacaaaatttaatgaggcacatattctcagtcctgtgtaagacaggaattggcatctaagagtgaggtccttttaaaattttgcaacctggacactttgcttgtgtcatcctagtatcaaccctgttggagacagaaaagtacacaagacagaaatgatctctggcctctttttgcccctataatattcaacaactatgtgttggttattctgccagtactataccttaaatttacataattctacaatacattttgttttatttatttaatttattattattatttctttgaaatggagtctctctctctctctgtcccccaggctggagtgcagtggcacgatctcggctcactgcaacctccatctccagggttcaagtgcttctcctgcctcagcctcccaagtagctggtattacaggcaagtgctaccaagcccggccaatttttgtatttttattagaggtgctgtttcgccacgttgggcaggctggtctcgaactcctgacctcaggtgatctgcctgccttggcattccaaagtgctgagattactggagtgagccaccatgcctggcatgctttgttcttattagggccaatctcccctcagtactaatagtaataactttattgactgcttaccatctgtcatgttctaggtaatgaagatacagttatcagacagggtccctgccctcaacaactcactacctaatgagagatctagacaaacatacacacatactcatagggcaaataaaataatttttaaaatgtaataaaggccatttaaaaaatcacgcctgtaatctcaatactttgggaggtggaggagggaggatcgcttgagctcaggagttcaagagcagcctaggcaacatagcaagaccctgtctctacaaaaagtacaaaaaattagccaggtgtgacggcatgtgtatgtagtctcagctactcgggaggctgaagtgggaggatcacttgagcccagcaggttgaggcttcagtgagctgagatcatgccactgcgctacagcctgggtgaccaagggagaccctctttcagaaaaaagcaaaaacaaagacacaccaaaaaaacactaaactaactgctgacctggagggttttttttttttttgacagagtttcgctcttgtcattccagctagggtgcaatggtgtgatctcggctcactgcaacctctgcctcccaggttcaagcaattctcctgcctcagcttcccgagttgctgggattacaggcacctgccatcacacccagctaatttttatatttttagtagaaatggtttcaccgtgttggccatgctggtctcgaagtcctgaccttaggtgatccacccacctcagcttctcaaagtgctgggattacaagcatgggccatcatgcccccgccaaactagagatttttttttttttttggagtctctctctattgcccaggctggagtgcagtggcgagatctgggctcactgcaacctctgcctccgggcttcaagtgattctcctgcctcagcctcccgagtagctgggactacaggtgcgcaccaccatgcctggctaattttttgtatttttagtagagatggggtttcgccatgctggctaggctggtctcgaactcctaaccaagtgatctgcctgcctcggactcccaaagtgctgggattacaggagtaagccaccgcgccgggccggttcaaatttatgcttttaaactgttgtctcccgagagacacacgcaacgtattttaagcaaaacactggcttggtgttgtggtggctcatgcctgtaatcctggtgatttggaaggctgagggtcgcttgaagctgagttcgagatcaacctaggcaatatatctagacccctgtctctatttttaaaaaaattaaagaaatcactggatgaggaatggaaagacattttctatctccccaggacagttttttaaaatttaaaactactattcccagcatgcccttctcccctgggtggggggaggggacctaagagaactacatttccctgaatgcaacgccttcaccgctggttcttcagcatctcgggaattgtagtcctctgtaaagatgtttgtccacaaatcccagcatgcacttgggatctgactcgtttggtaggaaaaggactggctctgactcttcacccatcttcacccaggctggcccctttggtgaaactacaactcccaggggtctgtgcgcgagaaggcaggcgggtttttctaccggaagtccgctctagctctgggccctacaactgcaccctgagccggagctgcccagtcgccgcgggaccggggccgctggggtctggacgggggtcgccatggtaacgggggagcgctacgccggggactggcggagggggggcccacgcgtaaatagccgaggctggatcgggcgctgacaagtcccttctctgccgcggatggtctgggtcaggcgcgggctctggggattgggaccgatccagggccgggaaggagggcacagggcggtgattctgcgcgcgggggttaccaggggtctcgcggcgacgggcattgggggtggtgttccaaggggaaagggctgtgcaggtgggaaacgttgtagatggttggaagctttgaaacgagaggaaactcgtgagacacagtcttgtgggtagcgagaaggcattggaggtggggagagggcgtccgaaagaggaaggcgctctggaagtgtggcgggagcgctgggacgagaacgcgagaccttggaaaaggggagggaggttttcttgatgggaggagtctctagagacaaggatctgattgcaggtggagaggggatgttgagacaggggcaggagactgcctgtgagagagggatgatctcaagaagagacctggcacaggaaaccaaaaggaggcaactgtagggaatgaaacttaagggtctgggaaagcgctgtaaaaggagagaggacctggaggtaagatggacactcggaaagaatggggagcaactgaataggtctttccaagaggagagatcttgtggggtggggagtaggcttgaaagtgtgagacctggggaggaatctttgttggggcaaagactcaacattggatttaggagtgcccctatcccccaggttggggctttggatctaggaaagggttctttgggctggaagttgggaaagaaaacgaatgagaaagagtgtcagagcgggggcggagtctcctccaggaacagggtccttggaggcaaaatgtgaccttttgaagaagggaggaagcttgggagtgggacaagggatgtcaccagt

SEQ ID NO: 8261 - DNA, 6000 bp, Homo sapiens
cctggatcctcattctctttgctctgtctcctcagcaattaatggtggccatgccgcttctgccggtgccttcttgatcagggtgtctccttgtgcttctgagatgtggagaagaggctgctggcttccctaaaagttgaaataaaagatttttgcctttgttctgtctctgactggggatatgtgggtgttgggagggaagagggacattgggctgtgcccctccagtcctatagaggtcactgccccagctcaggcctcatccttccccctggatcctccctgaagcctcctggcctccagtctcccttgttaatcctccccaggccccagagctggccctgcactttccttcttcacagccctcctgtggctccccagccgccctgggagaaggtccaagcccctcagccaagcactcaaggctctgtgtgatctgagccccgggtcatggctcacttttatgtttaagagacagggttgtcaggcacggtggttcacacctgtaatcccagcactttgggaggccgagctgggtggatcacctgaggtcaggagttcaagactagcctggccgacatggtgaaacccggtctctactaaaaatacaaaaattagctgggcatggtggcgcaaacctgtaatcccagctactcgggaggctgaggcggaggttgcagtgagccgagatcgtgccattgcactccagtctgggctacaagagcgaaactccgtctcaaaaaaaaaaaaaaaaaaaggatctcactctgtcactggagtgcagtggtgcaatcatgtagctcactgcagcctggaactcctgggttcgagtgatcctcccacatcagcctctgagtagctaggatgacaggcatgcaccattgtgcccagctaattttattttttgcatttttttagagatgaggtcttgctatgttgcccaggttggtcttgagttcttggcctcaagtgatcctcccaccatggcctccccaaatactgggattacaggcgtgagccactgtgcccagcctagttttgacctcttcctctaactggagcccagtcatactgaacagtgtcctgaccacacccattttccctcatctcttagtttctgctgttcctgctactttgtatcctcttcccagtacatctgcagaagtttctttctttattctttctttcttttccttccttccttccttcctttctctctctctttctttctttctttttttttttgacagagtctggctcttaggcccacgctggagtgcagtggtgcaatcctgactcactctgcaacctcccgagttcaagtgatggttgcacctcagcctcccaagtagctgtgactacaggtgccaccatgcccagctaatttttaaatattttttatagagacggggtctccatctgttgcccaggctggtctcgaactcctgagctcaagtgatcagccctcctcagcctctcaaagtgctgggattacaggagcgccctgccttgataaatatttcttgagttaataagtgattgttgaggccgggcacagtggctcacacctgtagtcccagaactttgggaggccaaggcgggcggatcacccaaggtcgggagtttgagaccagcctgaccaacatggagaaaccccgtctcttactaaaaatacaaaattagcctggcgtggtggcaagcgcctataatcccagctactagggaggctgaggcaggagaattgcttgaacccaggaggcggaggttgctgtgagcccagatggcgccattgcactccagcctgggcaacaagaacgaaactccatctcaaaaaaaaaaaaaaaaaaaaaaaagtgatggtctataccctcctcttctttagtgaatcctaggatcatcagtagatggaggaacttcagtggtaaatgctcaaagcacaatgtgagttagtggggcatggtggtgcacacctgttgtcctcagctactcgggaggctgaggtgggagcccagggaggttaagactgcagtgagctgcccctgggcgacagagtgagaccctgtctcaaaaaggaaggaagggaggaaggaaaggaggaaggaaggaaagaaggaagaaagaaggaaaaagaagagaaagaaaaaggaaggaggaaggggaaaggaaggaagacagagaaagaaggaatgaaggaaggaaagaaaaaagaagagaaagaaaaaggaaggaggaaggggaaaggaaggaagacagagaaagaaggaatgaaggaaggaaagaaaaaaagaaaaaggaaggaggaaggggaaaggaaggaagacagagaaagaaggaatgaaggaaggaaagaaaaaagaagagaaagaagaggaaggaaggaaagaaaaggcaggcaggcaagcacaatgtgtctgcaatggggtgaattgtgagggagggggagaaaagacggggaagaggtcagggtgggagtgacttcaggtagggtctttccggccgcggaacggatgagcgaacgtgggcgccgtgtccaccagagggcgcaacctttccctgcccatcgtctcagagaactacatctcccagcggccctcggagtgcgcggcccttctcaaacgagcgctgaggctcagaggccgctgggacttgtggttgggacggtgagccgctggagggggccgagtaactcattcccaggtcctgaaaaagtgtgcggctgagtcctttcctccttcctcggtttccatggcgatggtttcggcaaaggcccaagttttggcagcggcggggcccgcttcccactccctcctcttcaccatctgctccaccctcacacctggccccaagccgcaaccaccgcctccgcacccgggccggggactctgcagccactgggtggcgcgtgtgagcggctcccgcgctgctacttcagccccacgagtcccagttcctacctccctcctgcctcagacccgcagcgtcctccgttctggggtcccaggggtttctcaaagctgtgagacccagagacacagccagtcaaggctggaagcgagaggctgcggcggtcagtggcttcccggccaccccgtccttggcgcccgcccgacgcgccgtctgctcctcccaccccaccgcgggccgcatcatgaaaatttaataccaaatgcatttgcggcccgacgcggggaggtagtggggaaaggatcaccctcctggggcctggatctggaggtggactcagcgccgggagatgggctggtctgaggacaggagcggggcgggaccctgtctgcgggcccaggacagggaagggccgggctctacccaacggggcggcgctggaattccggcgtggagacagagttcggtgggcggggacagattccgggggtgggagcaggactgggagggcagggacagatcccagaggcggaggcggtgggcgggggacagatcccatggggcaggggcaagactgggagggcggggacagatctcaggggcggaggccagagctcggtgggcggggtcagattccgggggcggaggcaggactgggaggtcgaggacagatcccagtggcgagggtcagaagtcggagggcggggacagatcccatggggccggggcaagactgggagggtagggagagatccagggggcggggagaactgggtgggcggggacagatcccatggggcaggggtagaacacagagggcggggacagatcccagggacggaggccagaactcggtgggtggggacagattccagggggcagagatagatcctgtggggaaggggtagaactcagatggcaggaacagattccagggggcaaggacagaactgagagggcgggaacagagccagggacagatcctaggagaaggggacacaactccaacggtggggagagaactcagagggcgggggcagaactcaggtcagcgacagatcctaggggaggagacaaattcagagggcgggtgaggatgccagggggtgcggatcacaatttagggggcgggacagatctcagggggtggagacagaactcaaatagaggaatggatcccccggagctagggaagaactcagagcgcggacagatcccagaggagcagagaaataacacaatggggagactatggggtcgcagctggcactggcggggtgtgtgaaatataactgtggggggcggaagccagagggaagaaaatcggggttagggaatgaaactcagggagagaagcaacagggaggagagagacgccggagggagaatagagctggaggagtatgggattcaaaggggaaagatggaaactaaggaggagatggagctcaagggtgaagaacccgggtggcgaaagggactagagggggacgacaggtggatcgaagtaggcgttggacttgaggggaaagaatttcccttgaatgagaaaacaaagaactccctggatgagactattggaactggggacgaggtgggatggggatggaattgcggggtgggggcggggaggagtgaaggaactggaggatgaacgcagagggaaagtcagagaagacaggattgtaagggacgcaattagggggaacagaagtcggggagagaaatgatggggatgagaactcaggagaggagagaaaatctgggtaggagccaggggtgatggaacagggatagggggagtagcctggggaaggaacagaattggggggcgtgaactcggaggcgtgagttcagaacccacaggcgtggtcttggaaggctcaggaggggacaggacgaggatgaaagggctgcgagagggggcgggtctgacagacgaggggaggggcctggtggggccggggcggggcctcccgcgccccgcccccggcgctgagtcctgtgacagcccccgggccgcctgcacttgcagcctccttccccccgagcggagctgcggggccggccgggccggggctggaccccgggaacccggacgcggccgcccgggcccgcgggcggggggatcggcgggggggacccgcggggtgaccggcggcaggagccgccaccatggagttccgccaggaggagtttcggaagctagcgggtcgtgctctcgggaagctgcaccggtgagcctggcgggggtcccgggagaagagtgggaggatctgaggaggatgctaattcccacctgggcgcagactgacagatgaacgggcgataccccggcatgggggtccacccatctgtccagttttctgccgtgggctccgacggcgctgttctccctggtcgagccttgtccattatcctgttcctttttctgcaccccaccccacccggctccactctctctggtgctgtaaatgcctctctcccgggtctctggctcctcccccaccacttctgggtctctgtccccgtctctttctggatgtctctgccccttttctctctgggtctccgtctccctctttttccagatctcggctcccttctctctgggcccctccttctccctagatctctgcctccgcttctttgcgtctctgtgcccctctctctggttctctggccattgctctcactggatctctatcaactcctgactcagagtctctgtccccctctttctgggtctctcctcttccctggatctctggtccccacttctctgggtccctgtccccgtctctgtgttttaattctcccaccatgggtctctccgtctctctgtgtctttttccgtttctgtctggcatggagtttaatctgcagctaaagcggattggggctcatagcccgttgtccttgagggggtgaggctgggtggaagaagtcacagcaccctgggtccctgggagagaaaggagttagaggccaaaaatttcggctcctggggtaggacagccttcccaaaggatacaggctggggctgacagggactccctcccaaccaggttgatgaccccagtgaaccgagtgtcc

SEQ ID NO: 8262 - DNA, 6000 bp, Homo sapiens
gcctgcctggaggtgggaatgtgttgctgagactcacggttctcacagcagtctggatttccaggctctcttggaaatttatgagatttgctgctatgcctcactgcctcgggcccggccccatcaccaccactggccgctacctgctgctcatcacggccacaccgagcactccccaccctgggcctgccccggctcaggaaggcgcctgacttctgggatcccgaaagggtccccagccagcctgcatcctggagatgagcacttctgtcattttctttttttcccctcgccccgagacagagtctggctatctcccaagctttgcccaggctggagtgcagtggcgtgatctcggctcactgcaacttctgcctctcgggttcaagtgattgtcctgcttcagcttcccgagtagctgggattacaggcacctgccaccaagctcaagcctggctaatttttttgtattcttattagagatggggtttcaccatgttggccaggctggtctcttaactctttttttttttttttttttttttttgagacagagtcttgctctatctgttttccaggctggagtgcagtggcatgatctcggctcactgcaagctctgcctcctgggttcacgccattctcctgcctcagcctcgcaagtagctgggactacaggcgcccgccaccatgccctgctaattttttttgcattttttagtagagatggggtttcaccgtgttagccaggatggtctcgatctgttgacctcatgatccgcccgcctcggcgtcccaaagtgctgggattacaggcgttagccaccgtgcccgccctcactttctgtatttttagtagagatggggtttcaccgtgttggccaggctggtctcaaactcctgacctcgtgatctgcctgcctcggcctcccagagtgctgggattataggcgtgagccaccacacccggccacttctatcattttcttattgggaaaaaagtggactagaaacatattcaagtcccaaggcattgtgtcagacgccagtgaggcgcaccccgaggccccactgtcccacagatcagggtctcccggttccgtctgttccctgcccatcctgcttatcctcccagggccagctgcacagttgaccccgttgtcctttttcctcttctgacctttcctccattcagtggctctgtcatctccacatctctgccttgtttgtgttacgggctgttgacggcctgtggtttcttctacttcgtgtctcagcccctggagaccgctcagggaatgggaagggcccagagtcaccttgttggtgacgagcccaggcctcctaggtcctcacctgctagagaggagccccgggattggcatcctgggggctcacagtgtttcctgtcctcaggcatctgcaggaaccacaccacactttggaggccatgctgcggcccagagtcaccacgctgccaggccacatccaggccgtgtatgtgcagaacgtggtcaagctctacgcctccatcctgcagcagaaggagcaggccggggaggcagagggcgctcaggccgtcacccagctcatggtggaccggctgccccagtttgtgcagagcgcagacctggaggtgcaggagcgggtaagatccaacactccgtgttgggccgagcctcagggagccctcagtgcctttctgtccagtggcggccaggtcgacggggcctcgcttcctcttccgaagccactcactgagattcttttgttgccacttgtgccagctggggtttggggttagtcagtgggacctggaggtcagcaggacgggggatccgtcagtaggactggggcaggtctctggggtgctgggtatgtgagggtgctgctcctggccacaggaagaggttgtttcacatgcggcgagacagcaggtgtgagagcctggggctggcagtggctctttctggtggctgcaggtgacgtgggttctaggttgagcagactgtacacctgtgccaggcggtgcccaccacttcccaggtgtctgtttttctgcttgttttttgttttgttttgatttttcgagatggagtttcactcctttgcccaggctggagtcaagtggtgcgatctcagctcatgacaacctccatcccctgggttcaagggattcttctgcctcagcctccctagtagctgggattataggtacccgccaccacgcccggctaatttttgtatttttagtaaagacggagtttcaccttgttggccaggctggtctcaaactcctgacgtcaggtgatccacactccacagcctcccaaagtgcaaggattacgggtgtgaaccatcgcacctggccatctgtgagagaggtcgggagtggcgtcagcctgtccaatggctgaggagacccagcttcaaggctgcatggggcgtggccccgggctcctctgtgcggtggcattagctcggggctggccatgatccttggcccatggtcactgttggagctgcccagcctggctgtgtctgagttggagccagcacagaggcggggagcccgcgggggccgagggaggtggtgcttctggtgtcggggcactgacctgatgggaggcatttctgcagtgggcaaagctccctgttgtgcccccatctctgttctgtttccggactggtctgtttctgccgcttcctggcgaggatgatgacgacagagacggcatgaaggctgggctctctgtggctatgtggctgtaccagggggcccacacgtcactgtgccaggggctgagccaccccgtgtccctgaaggtggccgagtggccttccgggcaggtgccagcagtgacccctgtgtcccccacaggcgtcctgcatcctgcagctggtcaagcacatccagaagcttcaggccaaggacgtgcctgtggcagaggaggtcagcgctctctttgctggggagctgaacccagtggcccccaaggcccagaagaaggttccagtccccgaagggtaaggatacgggggtgggggcattgcaaccatggccctgacatggtcccttgatgcctggtggcacagcgggggctcctgcacccctgaacagccaggagggtgtggggctgattggaggcctcaggcgggtatatccctcacacggactcaccaggtctctcactggttctgggatctggcttctgcctggggatgctccctgcgaagtgggcctgctcccacccttgccataaagctctgaggcagcctgagcctgccgtgggggccccactgtgaccctgccgcagtcttcctgggtccctgcgtcctcttaaggggcagtgacacctgcctcgctggccctgtgtgggtggcaggccccactgtttgggatatcacatggccaggcacgtggtgagcctgctcagggcggacgcctgcaggcgcgtgctcggtcacacactgccttgtgtggccctcctgtccggtgcagcctggacctggacgcctggatcaatgagccactctcggacagcgagtcagaggacgagaggcccagggccgtcttccacgaggaggagcagcggcgtcccaagcaccggccgtcggaggcggacgaggaagagctggctcgggtgagctgctggctgcccctggcgagccctcgtctcctccctcctgtcccagggagtctttgaggcaggtcagcggcctctgtgggtcctggccctgaccctggcagtggaggcatgggcgtccctgcctcccagagcgttagcgattccttttcccccaatacgtgctcttcccaattgcgggccttggtttccctgttagtgaaagctcagtagtgaaaatagccagagatccagccttccccagctgggtggctggtggtggacgtccacagaggggtatcctgcccgcttctctcgggctcatgccaagctgtgtcccacagcgccgagaggcccggaagcaggagcaggccaacaaccccttctacatcaagagctcgccatcgccacagaaggtgaggcccgtccccgggtgcctgtccctcagcaccctctaccctcaccacccgagccccgcggcatccatctgagtttcgggttccctcaggaagatcctgggaatggagctggggccacacggtgactgtgcggagcctttgaggggcaggcgcctccctgtgggccccattcattcgagcctccagccggggggccctgttccctgcgcctggcagcccagctgctgtccagccctgaccccacggtcgtgggcaacctgctgcctcactctgggcttgaggccgcattacttttctcatttgaggagaaaacagaatattcacgtaaaaaaagtgaacgaggatttgcttctctctgctcataggcctgtggggtcactcgtgtgacaagctttccagtcctcactgtcttaaagagtcgggtcctcgggatgcgctcgctcacggcgctcctcgcggcccagggctctggcaggaccccagctccttaggatgttggggctgcgtcacgctccctgcatccccgaggcttgtcttgcacgtgtgtcacccctcggtgcaccggtaacgcctgggtgttgcctttgcagcggtaccaggacaccccgggcgtggagcacattcccgtggtgcagattgacctctccgtccccttgaaggttccaggcaagtgtctccggtgtgtcggcgccgcatttgtcacatgggctgtggggtgctcccgccgccctccccgtgagcccctggggtgcagtgctgagtggctgcccgctgccggcccgcagggctgcctatgtcagatcagtatgtgaagctggaggaggagcggcggcaccggcagaagctggagaaggacaagaggaggaaaaagaggaaggagaaggagaagaagggcaagcgccgccacagctcgctgcccacggagagcgacgaggacatcgcccctgcccagcaggtggacatcgtcacagaggagatgcctgaggtcagcctcgctggaggtcccggtcctaggatgtctatctttccgcatgtgtgtgtcctggggccatgcacagtggcctctccccatggtcttcgttggtggctgggatgaggccccaccccggagagcataggaggagaggcctctctgtcctcgagcacgcgtcccgacgcaccgccccagggccagcagcttcagaggcagatgcaggttggctgcgtcctggggcccagccgcccttagtgcctagacgctgagcggagcctctggtggagccacgtcactgcccacctgtgcgtgtggcccgcatgggcagtcccactgcgtcccagatagatggcgttccaccaggccacaagggcgggttccagtgatggggttcctctcttcctgtcagaatgctctgcccagcgacgaggatgacaaagaccccaacgacccctacagggctctggatattgacctggataagtgagtccatatgggttcagggtgagggtggaggccacatgtggttgcttcccttcctctcgtcctcccttccgggtggggccgggctctgcagggtgggcaggctggggtggggtgcgggcgggccttccccagaccacgtcctcactgcactgctcttggctggccctcccaaccaagactcttaagtgtggactctgaagtctccaggcctggggtgctcgggaggtctccatgccttgacagggcagggtgtggccaccacagaccctcccatgagagcctccagcaggctgtgttgagtagatctatgttgggccatggctggggccaggggctggaggagcaggtcccgcactgccacatgcttggacacggcatgtactgagtggtcctggggggtggccagtggtgctgatgtgtggcccggtcattcctcctccaggcccttagccgacagcgagaaactgcctattcagaaacacagaaacaccgagacct

SEQ ID NO: 8263 - DNA, 6000 bp, Homo sapiens
agccccagactcgaaaccactcaagccatgagactcctgagggtagagaaaatgttttgatcttctccctacctgtgttcttctgcccagcactctgccccatcctggacactaatccttgcttggttaatttccactcgtctttttttttttttttttttttttttttttttttgagaaggaggcttgccctgtcgcggaggctggagtgcagcagcgccatctcggctcactgcaatctctgcttcccggattcaagcgattctcttgcctcagcctcccaagtagctgggattacaggcgtgcaccaccacacccaactaatttttgtatttttagtagagacgggctttcaccatgttgtccaggctggtgtcaaactcctgtcctcaagtgatccgcccaccttggcctctcaaagtggtaggatcagaggcatgagccactgcgcctggcctttatttatttatttatttatttgtttgtttatttatttatttgagacggagcagcctgtcgcccaggctggagtgcagtggcacaatctcggctcactgcaacctctgcctcccaggttcaagtgattctcctgcctcagccttccgagtagctgggattacaggcatgcaccaccatgcccggctccactcgtccttctgatctcagctcaaatgtcaccccttctaggaagctgtcactaactcttcaactcagctaggtgcctgttatgagccattgtggcagccagcctccaagatggaccccaatgagtctcacctggtatttgcattgcctcctgcattggacagggctgattaggtaccaatggaacattgtggaaatgacagtgtcataaaagatctgaggcaaggccataaaagacatagcagcttccgccatgctctttcttagatcactcactctttgggaaaacagctgccatgtgaggacattcatatgtccttgtggacagattcacgtggtgaggagctgaggtctctggccaatagccagcattcatttgccaaccacaggagcgagccacctggaatacaggtccttcagctccagtcaagcattcacatgccagcctggaaaatatagcaagacctcttctttccaaaaaatttaaaaattagctgggcatggtggcacgtgcctgtagttcccactactcaggaggctgaggtgggaggattgcttgagccccggaggttgaaactgcaatgagctgtgattgcaccactgcatgccagcctgggttatagtgcgagaccctgtctcagaaaagaaagaaagaaaaaaagatagtgttctcgtggctgtagcactggctaatatcttttttttttttttttttttttttttgagatggagtctcgctctgtagcccaggctggaatgcagtggcgcgatcttggctcactgcaacctctgcctcctgggttcaagcagttctcctgtttagcctctctagcagctgggactacagttgcacaccaccatgcctggctaatttttgtgtttttagtagagatggggttttaccatattgatcaggctggtcttgagctcctgacctcaggtgatccacttggctctgcctggccttcttttttttttttttttttttttttgagacagagtttcactctgttgcccaggctggagtgaagtggcacactctcagttcacaacaacctctgcctcccgggttcaagtgattctcgtgcctcagcctcccaagtagctgggagtacagtcacacgctaccatgcccggctaatttttgtccttttaatagagatggggtttcaccatgttggccaggttgctgttgaactcccaacctcaggtgatccacccacctcggcctcccaaagtgctgggattataggcatgagccactgcacctggccttaaatttatttatgttatgtcatttaagtccatttttcctgctagactgtgaatgctgtgagggtgggggcagtgtctgttttcttgctgcaaatgcattcattcattcagcaaatgtttattgaacaccagagttgtgccaagtattaagttgaacactggagatcaggactgggactaaggggaggcaagtgacgtgttgagggcacaaaatttaatgaggcacatattctcagtcctgtgtaagacaggaattggcatctaagagtgaggtccttttaaaattttgcaacctggacactttgcttgtgtcatcctagtatcaaccctgttggagacagaaaagtacacaagacagaaatgatctctggcctctttttgcccctataatattcaacaactatgtgttggttattctgccagtactataccttaaatttacataattctacaatacattttgttttatttatttaatttattattattatttctttgaaatggagtctctctctctctctgtcccccaggctggagtgcagtggcacgatctcggctcactgcaacctccatctccagggttcaagtgcttctcctgcctcagcctcccaagtagctggtattacaggcaagtgctaccaagcccggccaatttttgtatttttattagaggtgctgtttcgccacgttgggcaggctggtctcgaactcctgacctcaggtgatctgcctgccttggcattccaaagtgctgagattactggagtgagccaccatgcctggcatgctttgttcttattagggccaatctcccctcagtactaatagtaataactttattgactgcttaccatctgtcatgttctaggtaatgaagatacagttatcagacagggtccctgccctcaacaactcactacctaatgagagatctagacaaacatacacacatactcatagggcaaataaaataatttttaaaatgtaataaaggccatttaaaaaatcacgcctgtaatctcaatactttgggaggtggaggagggaggatcgcttgagctcaggagttcaagagcagcctaggcaacatagcaagaccctgtctctacaaaaagtacaaaaaattagccaggtgtgacggcatgtgtatgtagtctcagctactcgggaggctgaagtgggaggatcacttgagcccagcaggttgaggcttcagtgagctgagatcatgccactgcgctacagcctgggtgaccaagggagaccctctttcagaaaaaagcaaaaacaaagacacaccaaaaaaacactaaactaactgctgacctggagggttttttttttttttgacagagtttcgctcttgtcattccagctagggtgcaatggtgtgatctcggctcactgcaacctctgcctcccaggttcaagcaattctcctgcctcagcttcccgagttgctgggattacaggcacctgccatcacacccagctaatttttatatttttagtagaaatggtttcaccgtgttggccatgctggtctcgaagtcctgaccttaggtgatccacccacctcagcttctcaaagtgctgggattacaagcatgggccatcatgcccccgccaaactagagatttttttttttttttggagtctctctctattgcccaggctggagtgcagtggcgagatctgggctcactgcaacctctgcctccgggcttcaagtgattctcctgcctcagcctcccgagtagctgggactacaggtgcgcaccaccatgcctggctaattttttgtatttttagtagagatggggtttcgccatgctggctaggctggtctcgaactcctaaccaagtgatctgcctgcctcggactcccaaagtgctgggattacaggagtaagccaccgcgccgggccggttcaaatttatgcttttaaactgttgtctcccgagagacacacgcaacgtattttaagcaaaacactggcttggtgttgtggtggctcatgcctgtaatcctggtgatttggaaggctgagggtcgcttgaagctgagttcgagatcaacctaggcaatatatctagacccctgtctctatttttaaaaaaattaaagaaatcactggatgaggaatggaaagacattttctatctccccaggacagttttttaaaatttaaaactactattcccagcatgcccttctcccctgggtggggggaggggacctaagagaactacatttccctgaatgcaacgccttcaccgctggttcttcagcatctcgggaattgtagtcctctgtaaagatgtttgtccacaaatcccagcatgcacttgggatctgactcgtttggtaggaaaaggactggctctgactcttcacccatcttcacccaggctggcccctttggtgaaactacaactcccaggggtctgtgcgcgagaaggcaggcgggtttttctaccggaagtccgctctagctctgggccctacaactgcaccctgagccggagctgcccagtcgccgcgggaccggggccgctggggtctggacgggggtcgccatggtaacgggggagcgctacgccggggactggcggagggggggcccacgcgtaaatagccgaggctggatcgggcgctgacaagtcccttctctgccgcggatggtctgggtcaggcgcgggctctggggattgggaccgatccagggccgggaaggagggcacagggcggtgattctgcgcgcgggggttaccaggggtctcgcggcgacgggcattgggggtggtgttccaaggggaaagggctgtgcaggtgggaaacgttgtagatggttggaagctttgaaacgagaggaaactcgtgagacacagtcttgtgggtagcgagaaggcattggaggtggggagagggcgtccgaaagaggaaggcgctctggaagtgtggcgggagcgctgggacgagaacgcgagaccttggaaaaggggagggaggttttcttgatgggaggagtctctagagacaaggatctgattgcaggtggagaggggatgttgagacaggggcaggagactgcctgtgagagagggatgatctcaagaagagacctggcacaggaaaccaaaaggaggcaactgtagggaatgaaacttaagggtctgggaaagcgctgtaaaaggagagaggacctggaggtaagatggacactcggaaagaatggggagcaactgaataggtctttccaagaggagagatcttgtggggtggggagtaggcttgaaagtgtgagacctggggaggaatctttgttggggcaaagactcaacattggatttaggagtgcccctatcccccaggttggggctttggatctaggaaagggttctttgggctggaagttgggaaagaaaacgaatgagaaagagtgtcagagcgggggcggagtctcctccaggaacagggtccttggaggcaaaatgtgaccttttgaagaagggaggaagcttgggagtgggacaagggatgtcaccagtaaaaagcccattgaggccccaaggaggggaactgagactgagaaagtggaggtcaaaagggaacaactccagaggagggggattggagacagggaaggttggggggcatctagaggggacagcagaggcgtgaggatgcagagattcaggacggaggggacttgagattccaaatgggaagaaaacagggagaggtatacaagggaatttgggagtaagaggcagagctttttgtcaactctgtgggtttgcttctagttctcctaactgtgtgaatatgtctccggctctgctcccaggctgtggctgcctggtgtaggccccccaacgtcccttcctgcctgggacccctgccctgctaggaagtggttttccctggctcagcaggagttcttggaaggagagtgtaacatcctgttccggtccagtttggttggttgggggagggaggatagagtgtgtggagaatgaggcttaggaaagactctcaggctggggcggtgactcatgcctgtaatcccagcact

SEQ ID NO: 8264 - DNA, 6000 bp, Homo sapiens
gagtctgtgctactaggagggggtggagtctggacgccctgagggggcggggccaggaacatctccaggggtgggttttattggggcatatcatgggaggggcgtgactaaggtgggcgggcttcctggagccaagcctgcggggtgtggtcagaccccaagagtcctggtgagccggtggagcctatcccgggaggctcttggcccccacaaagggaaccctgacctgtacgatgtttgacggcgctcctgaccctcagaatggcgcatgatgaagaaccggccattcatgggctccatctcgcagcagaacatccgctcggagcagcgtcctcggatccaggagctgggggacctgtacacgcccgcccccgggagagctgagtcagggtgggccttcggtagatccccggtctgatgtttcctcaacgctcttgggaatccctccctccatcctcccacactgggtgatgtcctggggccctgggcactgagagagggaggagagagaactcctgactgggaaggcgtcctgaggccaatagggctggttggagggagaaaagggacagcacgccaggcaaagacctggcagctgtgctcagccctggaccttgttcctcctcaggcctgaaaagcctcacctgaacctgtggctggaagcccccgacctcctcttggccgaagttgacctccccaaactggtgagttttgcgcgctggaccagagcaggggaatgaggtctggaaaggtcagggactgtctctgagtgtgagtgacaaggggttgttgctggacttgtcagttgcgtcctctctgccaggaggcccacaggccaccttctggtgctgtcctgagggcgcccaagggattgtaagtgctcggtcgttgagacttgtaattgctgtcttctgtctcttcctgggagattagacccttcaaatatagtttcccagcgtgtgaggctaccatgcctggtccaggtgatcatcctgttgctggggagggtgacctgattccgccacctctccaggatggagccctggggctgtcgctggagatcggggagaaccgcctggtgatggggggcccccagcagctgtatcatctagacgcttatatcccgctgcagatcaactctcatgagagcaaggcagccttccaccggaagagaaaggtgcctgggggaggggcttggggaagctgggacattggcggggcctggactctgtctcccagggaggggggctgggagctggacttctgggtcctggatcctcattctctttgctctgtctcctcagcaattaatggtggccatgccgcttctgccggtgccttcttgatcagggtgtctccttgtgcttctgagatgtggagaagaggctgctggcttccctaaaagttgaaataaaagatttttgcctttgttctgtctctgactggggatatgtgggtgttgggagggaagagggacattgggctgtgcccctccagtcctatagaggtcactgccccagctcaggcctcatccttccccctggatcctccctgaagcctcctggcctccagtctcccttgttaatcctccccaggccccagagctggccctgcactttccttcttcacagccctcctgtggctccccagccgccctgggagaaggtccaagcccctcagccaagcactcaaggctctgtgtgatctgagccccgggtcatggctcacttttatgtttaagagacagggttgtcaggcacggtggttcacacctgtaatcccagcactttgggaggccgagctgggtggatcacctgaggtcaggagttcaagactagcctggccgacatggtgaaacccggtctctactaaaaatacaaaaattagctgggcatggtggcgcaaacctgtaatcccagctactcgggaggctgaggcggaggttgcagtgagccgagatcgtgccattgcactccagtctgggctacaagagcgaaactccgtctcaaaaaaaaaaaaaaaaaaaggatctcactctgtcactggagtgcagtggtgcaatcatgtagctcactgcagcctggaactcctgggttcgagtgatcctcccacatcagcctctgagtagctaggatgacaggcatgcaccattgtgcccagctaattttattttttgcatttttttagagatgaggtcttgctatgttgcccaggttggtcttgagttcttggcctcaagtgatcctcccaccatggcctccccaaatactgggattacaggcgtgagccactgtgcccagcctagttttgacctcttcctctaactggagcccagtcatactgaacagtgtcctgaccacacccattttccctcatctcttagtttctgctgttcctgctactttgtatcctcttcccagtacatctgcagaagtttctttctttattctttctttcttttccttccttccttccttcctttctctctctctttctttctttctttttttttttgacagagtctggctcttaggcccacgctggagtgcagtggtgcaatcctgactcactctgcaacctcccgagttcaagtgatggttgcacctcagcctcccaagtagctgtgactacaggtgccaccatgcccagctaatttttaaatattttttatagagacggggtctccatctgttgcccaggctggtctcgaactcctgagctcaagtgatcagccctcctcagcctctcaaagtgctgggattacaggagcgccctgccttgataaatatttcttgagttaataagtgattgttgaggccgggcacagtggctcacacctgtagtcccagaactttgggaggccaaggcgggcggatcacccaaggtcgggagtttgagaccagcctgaccaacatggagaaaccccgtctcttactaaaaatacaaaattagcctggcgtggtggcaagcgcctataatcccagctactagggaggctgaggcaggagaattgcttgaacccaggaggcggaggttgctgtgagcccagatggcgccattgcactccagcctgggcaacaagaacgaaactccatctcaaaaaaaaaaaaaaaaaaaaaaaagtgatggtctataccctcctcttctttagtgaatcctaggatcatcagtagatggaggaacttcagtggtaaatgctcaaagcacaatgtgagttagtggggcatggtggtgcacacctgttgtcctcagctactcgggaggctgaggtgggagcccagggaggttaagactgcagtgagctgcccctgggcgacagagtgagaccctgtctcaaaaaggaaggaagggaggaaggaaaggaggaaggaaggaaagaaggaagaaagaaggaaaaagaagagaaagaaaaaggaaggaggaaggggaaaggaaggaagacagagaaagaaggaatgaaggaaggaaagaaaaaagaagagaaagaaaaaggaaggaggaaggggaaaggaaggaagacagagaaagaaggaatgaaggaaggaaagaaaaaaagaaaaaggaaggaggaaggggaaaggaaggaagacagagaaagaaggaatgaaggaaggaaagaaaaaagaagagaaagaagaggaaggaaggaaagaaaaggcaggcaggcaagcacaatgtgtctgcaatggggtgaattgtgagggagggggagaaaagacggggaagaggtcagggtgggagtgacttcaggtagggtctttccggccgcggaacggatgagcgaacgtgggcgccgtgtccaccagagggcgcaacctttccctgcccatcgtctcagagaactacatctcccagcggccctcggagtgcgcggcccttctcaaacgagcgctgaggctcagaggccgctgggacttgtggttgggacggtgagccgctggagggggccgagtaactcattcccaggtcctgaaaaagtgtgcggctgagtcctttcctccttcctcggtttccatggcgatggtttcggcaaaggcccaagttttggcagcggcggggcccgcttcccactccctcctcttcaccatctgctccaccctcacacctggccccaagccgcaaccaccgcctccgcacccgggccggggactctgcagccactgggtggcgcgtgtgagcggctcccgcgctgctacttcagccccacgagtcccagttcctacctccctcctgcctcagacccgcagcgtcctccgttctggggtcccaggggtttctcaaagctgtgagacccagagacacagccagtcaaggctggaagcgagaggctgcggcggtcagtggcttcccggccaccccgtccttggcgcccgcccgacgcgccgtctgctcctcccaccccaccgcgggccgcatcatgaaaatttaataccaaatgcatttgcggcccgacgcggggaggtagtggggaaaggatcaccctcctggggcctggatctggaggtggactcagcgccgggagatgggctggtctgaggacaggagcggggcgggaccctgtctgcgggcccaggacagggaagggccgggctctacccaacggggcggcgctggaattccggcgtggagacagagttcggtgggcggggacagattccgggggtgggagcaggactgggagggcagggacagatcccagaggcggaggcggtgggcgggggacagatcccatggggcaggggcaagactgggagggcggggacagatctcaggggcggaggccagagctcggtgggcggggtcagattccgggggcggaggcaggactgggaggtcgaggacagatcccagtggcgagggtcagaagtcggagggcggggacagatcccatggggccggggcaagactgggagggtagggagagatccagggggcggggagaactgggtgggcggggacagatcccatggggcaggggtagaacacagagggcggggacagatcccagggacggaggccagaactcggtgggtggggacagattccagggggcagagatagatcctgtggggaaggggtagaactcagatggcaggaacagattccagggggcaaggacagaactgagagggcgggaacagagccagggacagatcctaggagaaggggacacaactccaacggtggggagagaactcagagggcgggggcagaactcaggtcagcgacagatcctaggggaggagacaaattcagagggcgggtgaggatgccagggggtgcggatcacaatttagggggcgggacagatctcagggggtggagacagaactcaaatagaggaatggatcccccggagctagggaagaactcagagcgcggacagatcccagaggagcagagaaataacacaatggggagactatggggtcgcagctggcactggcggggtgtgtgaaatataactgtggggggcggaagccagagggaagaaaatcggggttagggaatgaaactcagggagagaagcaacagggaggagagagacgccggagggagaatagagctggaggagtatgggattcaaaggggaaagatggaaactaaggaggagatggagctcaagggtgaagaacccgggtggcgaaagggactagagggggacgacaggtggatcgaagtaggcgttggacttgaggggaaagaatttcccttgaatgagaaaacaaagaactccctggatgagactattggaactggggacgaggtgggatggggatggaattgcggggtgggggcggggaggagtgaaggaactggaggatgaacgcagagggaaagtcagagaagacaggattgtaagggacgcaattagggggaacagaagtcggggagagaaatgatggggatgagaactcaggagaggagagaaaatctgggtaggagccaggggtgatggaacagggatagggggagtagcctggggaaggaacagaattg

SEQ ID NO: 8265 - DNA, 6000 bp, Homo sapiens
tattagagacaacaggttgatctcatttaatcctctagacaaagatggggaaactgaggctccattctggggttggggagatcagtggatgagtatgagccccatgatttgaacccaggtcagtctccctcccaagcctagaacagagctcttccttgagaagagtgatgccacagctggtggggagcttccttgcacccagggtgacttggaacaaggacatgggggaatgggatgccagagagatgagaacccaaggtgcctcctttctgagagccaggtcttgggcagggggatgccgagggccagtaagggatcaggtcccattgctgttcttgtctgtgaccttggagtgccacttcagctccccgagcctcagtttccttagttgtacaatgggaagagaagagagagcagagggacataaggagacaaagacgtgggggagtggacagagatcctgagagaagcagagagagagagagggagagacagagaagttgagacatctcaatttggggtaatggcctcctaagtgttgtttttcctcatcgccaagtccccaggcctgagtttggggtatccagggaggggagggggatttacatctagggtctcccttctctgtccttgtcccctgcaaagcatcagggccaccttcatctctgtgtccttggtcctcttgctctaaaatgattgatatcaccttgaagttccctctttattctcttgcatttttgcccttgtcccattttatagatgtgggatactgagaccccctgtttagacagccttgattagagatctgacatctcctcatattaacaaggaatctcacatcaggggctgcaatcacatcttgagtttcagggtcaaatatcatccgatgtcaacctgggtcagtctaatctctttgggtgatgggttctgatgggtggggggagttactgccatcctgtactattcgtcctagtggcttcaatcccccctatctctggctctctgtcttcttcctcttggggtctcattcctactccttctgggttctgtccactccctggcttctcccacccctgtttcttaactgcccctccccacctccttaagttctaggatggggaggggttgctgtgttctcacagctcttccacctccctccccctggaccgtctggctgttccttcctcccccgtcccagtctccctcgcctccatctgttccagccccttcctgggatccagcccgatcccctggctgcctacccacctcagagaggggctgcacctcacaaatcacgtccccagcctgtctatcctccgtctcccaggctctccatctttctcttgcattctggatctctgttctcatctctctgcatctatgttctatctcctgggtttctgtccccgcctctctttgggactctgtctgcttccttctctaggtttccatctcttccctctctgggtctctgtccccctatttctaggtctctctccccctctctctgggtctctgtctccctctctctgggtctctgtcatcctctgtgtctctgacccctccatctctgggtctctgtccccctctctatctgggtctctgttcctctctctctgggtctctgtctccctttctctctgggtctctgtccccctctttctgggtctctggcccgctatgtctctgggtctctgtcccgctgtatctctgggtctctgtccccctctctctctgggtctctgctcccctgttattctctctccctctctctgggtctctgtccccctctctatctgggtctctgttcctctctctctgggtctctgtctccctttctctctgggtctctgtccccctctttctgggtctctgtcccactatgtctctgggtctctgtccccctgtatctctgggtctctgtccccttctctctctgggtctctgctcccttgttattctctctccctctctctgggtctctgtctcttcctctctagatctctgtccccctttcactggatctctctcccttcttctgtctgtgaccccctctctctgggcctctgtacaactccccccatctctgtcaccctctttttgggtctttctccacctgtctgaaggcacctctctctctctgcagcctctctctgggtttgaggcagccctccaaataccctcttcgtcatcacagacttgattctggatccagaacgggcgggggcgagagtcacgctggggaatgagccaatccccctaccagggccatctgtcccctgccaggacaccacccgccactccccctccctaccccctaggctggcagcctggactcaaggttccctagggatgcctgggacgggctgctggattcccagggtcctggacatctccccaccccctagcaaacgtggctgagaagcatctgttcttttgacacctttgctgaagcatctccttagcaccttttgcttcctcgaatagactcttatccgggagaggcggctggagagtctttgggcctcggagtgggggcacaggctcttgaatcccaaagggttgtctggggtctaagtctcctgagttgaaggatttgacagagctgggagagggggactgaagaccgtcaatgtgaagaaggagggggctgggggcctgaattcccggtctgagggagatggaggatttctggatcaggggggcgaagggagccagggacctggactcttggtgaaggaggaggtgcgggcttagaattctggatgttgaaaagcaggttttgccctggatcctggtcttgggggtgagggggctgggggcctggacttccgagtctctggctcttgctgtcccgcagccttctggagaagcggcaggaaggcgcggagacgctggagctgagtgcggatgggcgcccggtgaccacgcagacccgggacccgccggtggtggactgcacctgcttcggcctccctcgccgctacattatcgccatcatgagtggtctgggcttctgcatcagctttggcatccgctgcaacctgggcgtggccatcgtctccatggtcaataacagcacgacccaccgcgggggccacgtggtggtgcaggtagctcaaggcctgagcccttgcagagccccgccccgctcaccgagctccgcctacgcccccatgacgtcacactcacccaccagacgtccaggccacgccccttccgaaacgctgtcggaatagctccgcccaatccgtgcgccccttagttctgacctcgccttaggggccgcctccgtttcctaagccccgtcctgatctaaatgaagtcccgcccttatttccaggggcttgattgaaaaatgtagagtccgccccaacatcaggttccctaggggttgcccctgccccattttggacctactagcaattttgctcacgcctgtaccccaagctcatgtccccgggtcacatctatttaatctcagtcccatctcaggttcctccctgaatgtgatccttttttgaaaccctgccactgcctacgtcccactgcatgtgttgtgtcccttatctaaagacccacagggtctcccaggctacggtgcagtggggccattgctctgtcgcccaagctggagtgcagtggcaccatcactgcagcctcgaactcctgggctcaagtgactctcctgcctcagccttctgagcagctgggactacaggcgtgcgccggcatacccagctaacatttttatttttatctttgtagagacaaggtctcactatgttgcccaggctggtctcggactcctgggctcaagcgatcctcctgccttggcctcccagtcctgggagtacaggcgtgagccaccgtgccctgtcctttctcctattttaatttcagcataggccttgcccctgcatcagaaaagagtcctgatttgtgcctttgtcctacctgaagttcctccccttgctcccttccaatctggtccgcccccttggctgcttcgtgtccccgcctggaccctgtgcaggtcactccgcaaacgctcataagctggatataagtggagagagtcatcatcatacatgggcccctaggctttcatggaggcaaggaagcaggcaaagcaaggcgtctaggtggtgatggactctgttgttaaggcagcataggccctagcaacgtggaagagcggagtttgtagactttaattgacagaaagatagtgtgagctttgattggcaggcttttggaggtgggaggggttcctcgttgctgataggtcgagacgctaagtctgtgggtgctgattggtggagcggcagagcctggacagggcggctgatttaatgtacattttggcccgcagaaagcccagttcagctgggatccagagactgtcggcctcatacacggctcctttttctggggctacattgtcactcagattccaggaggatttatctgtcaaaaatttgcagccaacaggtacagtggtggggtctcaaagtgggcggtaactacagttgtgtgggtggagttagagggcgtggtcttgaatttgcgggctggctctggtaaatgggagaagcctggatttgggggtgggtcttagagaaaggtggggcttgcgattgaggaaggtgtaagtcagagaggtggtgggacctggggtcccggggaccactgggcctagcttgctgtgggcgggaaaggcagaatcccgggcatggctggatagcttggattcttttctctgacccttcccatcagagttttcggctttgctattgtggcaacatccactctaaacatgctgatcccctcagctgcccgcgtccactatggctgtgtcatcttcgtgaggatcctgcaggggttggtagaggtaaatccccgcctgatatgaccctgccctcgctcggaccctgcctcttctcagtgaccttggttttctcctctttagggggtcacataccccgcctgccatgggatctggagcaaatgggccccacccttagaacggagtcgcctggcgacgacagccttttgtggtgagaggaagagggatcctcactcctgaatctgagggaggaggggttggggcctggactgttgggtctgagcggggaggggctgggggggctgaactcctgtgtctgagggaggaggaggagactctggacctggactcccaggtctgagggaagaggggctggggctggactcctgggtctgagagaggaggggctgggggcctggactcttgggtctgagggaggagggactggaggcccgcactcctgggtctgagaggaggagctgggggcctgcactcctgtgtctgagagaggaggggttgggcctggactcctgggtctgagggaggaggagctgggggcctggactcctgggtctgggggaggaggagctgggggcctggattcctgggtccgagcgaggaggggctaggcctggattcctgggtctaagggaggaggggctgtggcctgtaattcagtgtctggaaagggggaagcggtgggggtccgcactccttgatctgagggaagatgggcctgttctctcccccgcatcctcccccttaggttcctatgctggggcggtggtcgcgatgcccctcgccggggtccttgtgcagtactcaggatggagctctgttttctacgtctacggtgagggacccggatgcctggttccgggtggcgctggggcggagcggggccggtcctcacctcgctcccatccccctcctgacccccccaggcagcttcgggatcttctggtacctgttctggctgctcgtctcctacgagtcccccgcgctgcaccccagcatctcggaggaggagcgcaagtacatcgaggacgccatcggagagagcgcgaaactcatgaaccccctcacggtccgggaccaaatcttcggggaaggggcggggagagatagcaagccacgaacctgcacagcgt

SEQ ID NO: 8266 - DNA, 6000 bp, Homo sapiens
cctgcttccctggcctcccctccttctcctgggtgcttggaagaggtgggtcctggcccgtggttgaggtcttgcctcgtggactggaagcagagggctggctgtgcagcctcctggggtagctcgttttttttgcaccgggtagaatattttttcaggcacggattcctttttttctgggcccccatgggtggtccggcatcctcagggggtgtgagtgtgtgtggggggtctctgagctgaacttgggtggggtggggacttgttcctcgggggccacctttgtgtccttgtcagcggtcgtcctgctgtggcctgggttgcatttcctcttggggggggtattgaggacccccagcctggaatgagaagggtccccggttccatgtcagacccagaaaggtggatccccccactgttggctgcaggaggtttttggtacccccttttgttccagaaccgtcctgcctctcgcttggggacaggggggctttggatggcactggtgtgcacctggacccagccccggcctggcaggatccagggatgggtgcctgggatcctggggggagggaggcaggggacgcccttctggagctgggctcggagggtcctgccccatccagccctcggctctctgtgttctctgtccctagcctcaaaccctcttctggcagcgctagtgagatgccttagtctgtgggggtgggtgggggactggggccccgttttcctttgtgagtcttggttggccccagccctggcaggggcctgtctggagcaggggtaggtagggctgtgggttccagaactctataactgggcccctctccagtgtccaggggcttggagagacctgcgcccacccctccactctcccaggagtcgctgatcactgggacctggttccagccgtttgcaggggaggcggctccgagaggcgtgtgctttccgtgggtggcgcccctcccccgccctgcctggcctcatccttgtatttaattaattaaacaagcccctttttaaaccctactccagcgtgtgtgtggtctctcccgtggcagtccccacctgtgggcacgctctgaatccctctgtcccacccaccagtgtggtcccaagttcatccacctcgtggggaaaccgaggcagcgggctagtgaagggggtcttggccaggcccctctggctgagacacaaaatgccctgcccctagccctaagccccgcggagggggctgcctgcagcagcgcgcgctgcgcccgccgggtgtcacccacgcctggcgcagctgcgccccccgcccagcttcccgcccgccccgttgcctggcaaccgaggcacagtgacagggcgcccgggggcgtccaccgcccgccccttccggtgccgcaggggatgggggagcctgcgcccccggggctgctcgccggcgcgggacaggctcctccacggagggtcccccggccgcctcccaggctcctgtgctcctgtattgagcgcctactgtatgccagctcccctagtgggaatagggaagagggggcggtgagagctttgaggccctccccaggaaaaaaccactgtggactccagcgctccccagagcctggaggccggcggggctgggatggggccgggcaggccactcctacacacctgctgagccctggggcttcgcctgctgcccgcccggggaagggggtggtcggcctctcgtatcgcgcggccggcgccggctcacgccagacccctccccaacctgggcggcaaattcccggctttactcgagggcagcctccctcgtgcacccccaatcctgcccgacccatcctcccatcctaccggacgccccacaaacatcactcccgggactctcgcacccctccagctcctgcctggttttctgcccctctggagcaaaatgtctagaatatggggtctacactcgcagcctcacccctctctctgacggacacactcgcattaggcttttaaattacacgccccacccccagcacacacacgtgcccagaagcagcaccatccttttggtgcctttgggaccccgaccctcccgggcgtccctcccacccgcaggctgctcttgccatgccccctcctcggtcgagggcagttccatcctgcaaggccaaaatccttggggagtcaccctggaccccactgtgtgtctcaccacccacatctggcccatctgaaacctccttgggctctaccttcaaaatagatccaggatctggccgcctttccctgctgtaagggcttccaccgcgacggtctagcctcctcacgactcacctgaaccagtgcaatcaccttggccctggtctcctcacggtttgtcctccccacggccaccagagggtgtccgtgaacacctggggcaagtctggttcctcctctgcccgcaaccctccatggctcccactgccctcacagtcaaagcccaagtcctccctgaggcccatagggttctgcatgacctgccccgtcctctccctgctcttccctcctgcctctctccccctcctcaccctggtccagccacactggcctcctcgctgttcctccaacacaccaggcgcagtcctgcccatggcctgtgccctctgcccggaatgcttttcctccagaagcctgcttggctccctcatcatcttttatttatttatttatcttttattttttcgagacactgtctcactctgtcacccaggctggagtgcagtggtgcaatcttggctcactgcaacctccgcctcccaggttcaagggattctcctgcctcagcctcccgagtagctgggattacaggcatgggccaccacacccagctaatttttgtaattttagtagagatggggtttcaccatgttagtcaggctggtctcgaactcctgacctcaagtgatctgcctgcctcagcctcccaaagtgctgggattacaggcgagaggcaccatgcctggcccctaattttctgtaaaaccgcacaaatcccgccttccccatagaatcacccagaccagccctgtgcccagtccaggctcttctcctgtttctgttctcaaagcactttccacctggcttcaggctgtctcacttattgctgtgttcattgtcggcctccctgcctacaccatcacctccaccagagtggggttctctgctctgcttatggatgtttctagcattttgtggcacacagtaggtgctcagtaactatttgctgaatgaatgaccgacaccagccggcacggatggagcaatcgcataaatgagagttcatctctcacgcatcatcaggagccatgacagggagtctacgcctccactgcccatgataggacagctttgagattagatcaggtcctctgcagagtcgcccatgacccatcccaacccacgtcccctcatcattgcatcctgtcatttatttataattgtggtaaaatcacatgcacataacataaaatttgtcatcttaaccattgtattgttatttgagacggactgtcactctgtcacccaggctggagtgcagtggtgcaatcttggctcactgcaacctccgcttcccaggttcaagtgattctcctgcttcagcctcccaagtagttgggactacaggcgcccgccaccacgcccagctaatttttgtatttttaatagaggtggggtttcgccatcttggccaggctggtctcaaactcctgacctcggttgatcttccctcctcggcctcccaaagagctgggattacaggcgtgagccatcgcgcccagctaatttttgtatttttagtaggacagggttttgccatattggccaagctggtcttgaaatcctgggctcaagtgatccacccgcctcagcctcccagagtgttgggattacagacatgagccactgtgcccgacctaagactttgctttctattctttttgggtgtatacccaggaatagagttgctcatagggtaattctgtttaactttttccatctctacacaaaatacaaaaaattagccaggcatgatggtgcacacctgtggttttagctactcgggaggctgaggtgggagaatcacctgagccagggaagtcgaggctgcagtgagccgtgatcgcaccactgctctccagcctgggtgacagagcaagaccctgtctcttaaaaacaaactttttgggttttttgttttacatagcagtggcactattttacaatcccaccaaaatgcaccaggttaaacttcccattaagacgtgggcctactccaccagactacagagttgccccatcccagccttgttcctcgtttgtctgttaaaatgcaccctctagctggtatacagtaggcgctcaatatttgttgaacaaatgagtgaacgtggacctggtcattagactgatgacaagagtcgaggttggggagattaaggcgtttcttgagagccagctgtataccagggcgaggggatttttaaagactgtgaacggagtaattcaaccatgagtttcacctggcccaggtttaaggccacctccccgcagaactctcctcgtccagcagagggcgccttaaggtgatatgctaacgaaaggaaataatatgcaaatgagtaatagcgggccccgcggggcttttttggtcaggcgcgccgtggacagccctggcgccgcaggggcctggggctcaagatggcgccgctacagccgccgaaggtcgggcggcggcgctggcgaggctcccggagaccgcaggcagggcagcccctgccctccttacttcctcccgcggccgtctgtcccggcccaggggtccgtcaccagccttggtcgcgcaggagcaggcgtttctgagcaggcgcgctgcgggcagcccctcccggggtcccttgcggcggcgtcccgagggcctccgggggcctcggagcaagatggcggcggcggggtccgtgaggcgcgggcggcggcgaccgcggcgccagtgagggggccctggggcccgggcggctccgggccggggccccgccgcgggacggaccatgctacgctccactggcttcttccgggccattgactgcccctattggtctggggcgcccggggggccctgccggcggccctactgccacttccggcaccgcggggcccggggctccggcgcgcccggtgacggcggagaggcgccccccgcagcaggtaatgcccgcccgcctgcttgccttgggctcggctcccctgcccgggtctggaccccaccccggtcccgcccggggtccccgttctcggcccagcctcctccccacacgttcgcgggcgacggttttcccagtcgggaccggaaccacccaccctgggacccggtgcaaagcactagatgtccctaagccttcgtcttcacgagtgtgaaatgtcaactaggaggacgcgtcctgccagggctgtctagagggcggagtgcgagcgcatgttgagtaccgggcaccgggcctgacacaagggggctcgggagacgggcgcggccggcgctaggcaggtcctggactcctcctgcccctgattggcgcccgccgcttcccggaccccatgtgcttgtggccgcccttgtttatttccatgacgtttcctccggccgcgcctctggcagcggccacctcagtctccagtcgttgagttaggatggtccgaggatcgtctcttgtgtttgtcgagccctgtgtccagcatgactggcagggaggaagtcaaagcttactcgagtgggctccgaggaattccatgcttttggtcgggcagaggacgttggtggactccacctcacagcgtcatggtggttttcatcgtcatggcagcgtttcttggaggagatgtgggatttggattggagaaaaagagggacatcgcaaggaaagtcgtggagggagggttatcgagtgtgatgtcattcagactcccctgttacctctgtcc

SEQ ID NO: 8267 - DNA, 6000 bp, Homo sapiens
gactaggagatggggacgaggtctatggaaacgtctgctgccggtgggggggtcttgggggatccatgggtggggtgacagcttgggggcatccttgaaaggacttgagtatttgagaccgtgaaagagactcgtggggggtggagggcgtgtagggagtggttcccacagcccaactcggaggactgagcccgctccactccgggcgatccgggctccgggcgccgcgcgcgccggtgattcacctgtcgaagggcggggcagccgcgggctcattcacctgtcggcagtattccaggcgcggagctccactgcgcaggcgcccggccccaccgctcgccctcccaggtgtgtggctccaggtaaggtcacacttttccccatcccgccccaccttcgcagaccccccagccccaggaaaccctctcagtcaggctcagccctccacaaaggtgagcccgagtgggagatccagccaaaataaatgtaggtgtaacttcaaagcggctcttcttggtctaaaatcaccccagacccacccagcttgggcctgacccagtacttggcacacatgatgctgaataaatgaatacattaatgagtcaatcaatggctactgcgtgaactgctgttattaatgatagcatgaaaggagccaagcatttcctcataaccttgagagacttctccttagagcacctgtttcctgcctccctaccattattatttataataatgcctatgttgagcacatactatattctgagcacttaatgtatgttgagtgcatacaggagttattattgccccattttccagatgcaaaaactgaggctcaaaaagcttgaatgctcaaggtgtcccagaccccagaatttaagctgagctctttctgtctctgctcagctccttcccagcctctgctctgctccctgcaacctcttgcctttccttgtgatatctaacaactaaattgttaagtcccttcacagtcgccagtgaagcattccctatttcacaggtgcaatgatgatcagagagggaaagtgactagcccaaagtcacactgcaagtaagtggcagtgtgggactgtattataggcctcctatgtccccctccactaaatgttgagagatgggaggggtgtggagggtgtgagccactgcgattggtccctgatagtttgttgattgaataatacctacctcatggggggctttacatgtgacctcaggtggccaagaactgtgaagctgggattactgggcccattttgcagaccatgacactgagatgtaaagagtttaattcctagccggtcagcaacatgatgtgggacttgaacccatgccaagaagagtgcagagcccctgctcagtttccaatggggaaacacgagaggttgcccaagccacacacatgtaggaagtggtagagacatccatggtgaacacagaggcagagggagaagacaaatcgcccctcccccccgcccccacacacagggcccactggtggctctgagccaggcactcacaggcaggcagcctcccgggagggcagctgggtgcaacgacctccatttgcacacgggcttccgtccaggcaagggggggctgtgtgggggtgaaggaaggtggaggatcagccaggtgcccaggaaccccaggcccaagtgacaaaccccctccctccctccaccaggcaacagctgcatggggatgggggcgtctctgcgggtgcagggagtccccccatccacagttcccacgccccccccccccccgccccagccccagctgttgaggctgcagctgtccctgccagctcgagccctgggaaccacaaagcaggggaaggcaggaggaggggctgtcttatgccagatgtgggggctcgggaagctgccagagctaagatgtgcagaatggggtgtgctgagacaggaagtaagggtgctgagtgttacagggaggtctggggcttcatgcccaggttcaggggtaatagaaggggaaggggcaggggatcctagggccacgggtcttcctttccctgatgggcatctactccagccaggcaggcctgcgtggtgctcttgggagagggaccaaggcatgtacccacgagtgagcacagcatctccagaagcagccagcgctgggcgttgctggaatagggtgtgtgttgaagggaggggcaactggcacaaggcatgtgctgccctgtccaacatcgccatccctaagggctgtgtccctctagggtgtggcatagtctaactgtcctgccagaagggtccagggtgtggctgggtctgagctagtggagaactgtgtgcatgcgatcaggtgtggggacacagtgcgtgtgtccatgcatgctcttgtcagagagagggtgatggagagaggaaggaagatcgagaaaaacacaaagacgtgagaatgaactagaagcagatagaccaggagaagacagagaaggacagaaagaaatagaaagcggccaggcatggtggctcacgcctctaatcccaacactttgggaggccgaggctggtggatcacctgaggtcaggagttcgagaccagcctggccaacacagtgaaacccagtctgttctaaaaatataaaacttagctgggcatggtagcaggtgcctgtaatcctagctactcaggaggctgaggcaggagaatcgcttgaacccaggagccagaggttccagtgagccgagatcacgccattgcactccaccctgggcaacaagagccaaactccatctccaaaaaaaaattagctgggtgtggtggcgcacgcctgtagtcccagctactcgggaggctgaggcaggagaatcgcttgaacctgggaagcggaggttgcagtgacccgagattgcgccactgcatgccagcctggcaacagagtgagactgtctcaaaaaaaaaaaagagagagagaaggacagaaagaaatagaaaacaagagggtgagttacagaatctgtcgagctgaacctgagcatgggcctacatagtatatgccccttcctcacaggacaagccgactggacaccatcacccacaccaggacctgtgggtgttcgtgaactcacactgtgggtcccataacatgggctatgggccaccctgagctgtaggcaatgtgagccacatgtgtgtgcgtgcacgggcttgtgtgtctgtatgtggatttgggcatgcatctattgtgtctcagttgcagctacatgtgagtctatctgtacatgcatgtcagcgtgggtgtgcccgtgtgtgtatgagctgcacacccatacgggaatgcacagatgtgtgtgctgtctgtatgcaggttgtgtctgttgtgcgtctgtgtatgtgaaccgtgtaaatgggtgtacagctgtgtgttggtgtgacctgtgtgtgcaccgctgtgtctgtgtatgggttggctgtgtctgtccatctgcatgtgtgagctgggtgtaagcatgtccttgagtcttcatctatgtgctgtctgagtgtgtgcaggcagcgtgtgtgccacacctgtgtgatcatatttgtgtgtgtatgtatgtcaatgtgtgagctgtgtgcgtgcagctgggtgtgtctttcctgagccaggtgtgcaagtctgcgagtgtgctgtgtgtgtgcaggtttgcatctctgttacgtgacctagagctatgtgtgccagcgagtgtgtcacaggccatgtgtgtgcgccgctggtccggcggaggcggcggctcctgcctggtcctgccccgtccgggccccggggctgggctggggaggccgttcactcccgaaacccccaccccgcccagcgccaagccccacactggcgtctgggacccctggccaggggccttggcccgcgcccctcccccgcccaccaggcctcccgtagcggtgaggggggtgcccccgcagccccctccccggcccagccgcgggtcccgctttgtctggcaaagaaagcgcgaggccggccggagggagggggtgtctagacggcgcggccattgtcccgagcgggggaggggagggaggagaggaggaggggcgggggcccctggccggctggggaggggctctggccgcggggagggggcgctggagccgaaggggagcacgtgggccctcgccccttcccctccccgcgcaggggcggggtcccagggcctccgggtccccgcggccagaggagagaggcgggctgcgggcgggggagggggcgcgcgcgccgccgaggctccggctcggaatccggctccgggtcttgctgcgcgccggcctgggaagttttctccgagttcagagctcccagaacttcgcgccccctccccaccccccgcctggcccagcccgcccggggtgtcgggggcggggtgggggggcttttgtgcgagaggtccccggcctagaagtacctgggcccccaatcataacctacccaggactccaggcgtgagttggatggggacgagtcccgaactctgtacgcacccccccacctcgagtccctgatccccgcacctcgagctcccagtctcggactcctgggtcccttcatcttcagctctaatcgctcaagggtccctgttccttgggcctctggggtcctccccattctgaatctctgggtcctccaggactggcatgaagcccggggctcctgcgccccttccccgaccctggttcctgcctcccatgaacccccgccagccccggccttgggggttcttgcactccccctctgccgccctcgtcccatccgccaggtcccggcccctcacctgcagcccccggccccgctagcagcagcagcaggggcagcgcccgcacgggtggcggtggcggtggcggcgacatcgggcgacggcggcggcggcggccacgggcccccggccccatggcggccggccgcgaccctcccctcctccctccttccctgggctccgggcgcgtcccgggccagcctccgcgccgccaacttcgccgaagtgaggcggccgggccgccccgcccccagccctcgaaggctcgccccgccccggggccggcccagcgcgcccccgccccccgcccggcctcccggggtccctgcccaccctccacccgcacagcctgggacgcgcggaccctcggaaacccaggccgagcatgcagtgagacgcgggcagaacccggagtggcgggcacacccaacctcgtgaacgcccacgcaccccatccccatcccccagtacacacccagagccggacacctctggagccgggacaaaaaacacagcctcccagaaactctggaaactgaggccagtcacgtcctgagaggctcatggacccacagccacggacgcacaaatgcaagcccatgcaccaagcttccccaggactctgatctaaaacattcacaaacctaaaagtcggaccgggcgcggtggctccggcctgtaatcccagcactttgagaggcagaggtggatggatcacttgaggtcaagagttggagaccagcctggccaacatggtgaaacccggactctactgaaaatacaaaaattagctgagcgtggtggcgcacgcctgtagtcccagctattcgagaggctgaagcaggaaaatcgcttcaacccaggaggctgaggttgcacttagccgaaatcgtaccactgcgctccagcctgggcaacagagtaagaccctgtctcaaacaaaacaaacaaacaaaaaaccgctaaaactcactcagccaggccaggagcctaggactacatttgcagcctcagacctcagacacgtactaggagtcacatgcatgtgtgtgtgttcacacatgcacacacaaactcttcttgctctcagccctcccagaaagcaacccacttcctctgtgactctcaaagggtcaccccagccccctagtcccacccccataccccacacagctttgggcctcagcctatc

SEQ ID NO: 8268 - DNA, 6000 bp, Homo sapiens
cagatccccttcagtaactgacccctaaggcatgtgcccaccagacgctgggaccacccggttttagagcccatggctgggccaatcatagcccttcacaccgtccccgtcttccccggtccattcttcaattcccttcccagctgagcatgctccattgaagcaaacaagcctaagagtattagaaaattgaatactgagaaaggttcgcagggtcgaggaattcctaccgccttttcatctcgtgccaggccctgagacatggagtttactgactgccccggggggtgcgtgtctaaccacattccatccacacctgattttagggcacttcttcagttctgggatcctcctcattttcaggaccaaaataatgggctcacacctgtaatcccagcactttgggaggccgaggcgggcagatcacaaggtcaggtgatcgagaccatcctggctaatgtggtgaaaccccgtctctactaaaaatacaaaaattagccaggtgtggtgacacgcacctgtactcccagctacttgggaggctgaggcagaagaatcgcttgaacccgggagatggaggttgcagggagccaagatcgtgccactgcactccagcctgggtaacagagcaagactccgtcttaaataaataaataaataaataaataaataaataaataaataaaaatggactcagtgaggttgaatggcctgtccaatgtcacccagagaggaaggggagtggagccccagtctcttggagcccaaaacccacatccttacactgagatcagcagttcttacccaggagtgattctgcccccagcaaacacttggtgacatctggagacatctgtggttgtctcaactgaggggagctcctggcatgaagtgggtggaggccagggacgctgctcagcaccgtgaagtgcctgggatggccccaccccagagaacattccagccccagcgtccacagtgccgagggggagaccccgcactacgccacactgcctcctcgcttgaaataaccagaacagtcttggggacgtgctggggaagccaggggagagggaaagaaggggccttccagatcttagactgttggggaattccagaagctgggccacatcctcacggatcagggcctccgaggccaacctcaccttctccaacttccggtgttctccttgtccaggcgcagtttcttaaccttccgcattaaccgctcagctgacctcaggagggcaggggtgcctgcgggcaagtgggaggagagatcaaagggctgcaaccccagcaggtggggagtgggcgctcctgcccccttcgccccctcctcattgctccaggcagccccccaagcctccggggagcaccctgaagccaagggcattctgaagagacgatgcttcaggccctggcctgaaatgcaggaggttctgggcatttgccagagcccgtcatctttctcaacaggaggttcctttcaaggtgtaaagtccctgggagtttcaagtgactccagggacatcacaccagggcacctgctggaaatagaagaatcccaaattcctcactgtggccgttgcctgatggccctggtgaccttgcctacttgcttcacccttgaccatgaccttcggccacacttgcctccttcttgtccctcaacacacctgctcgctcctagcacacagcttctgcacgacgcaccccgtggcctgaaatgccagttcctgcttttgatatgacttgctctttcttgccctgtggctcctgataccacctcttcagaggtctttcctgagcaccccatctgaagatgctacctggcgacccccatcaccacacccagacgctgatacaatggcctggaccataattccagttgtccccttccccagggagagtggttctcaactgggggcgatttggcccctcaggggacactggacaatgtctggagacatgtgtggctgtcacaactcgggggtgaccctggcatggagtgggtggagcccagagatgctgcttagcaccccacagtgcccaggataacccacctcagagaaggatcccacctcaaatgtcagcaatgccaagccggagacccctgcatccattacttggggagaaacttgagttcaacgcctacgctcatattaatactggaataaacttcccatggaacaagcattctaaacgagggggacccccagctcctgggattcacctcctttctccctccccactcagggtgaggatttcaatgtgtgcagcctcctgggaccttagtagggcagaggatcatgggacgcagtctcttggggatccatggaatcccctaacccaggggtctcacctggggataaccggcccccccaggggacatttttggttatgacgactgggacggtgaggggaggcatgtggccagtggaggccagcgatgctgctcaaccccttacagtggacagaacagcccccctcccactcctctgccaagaatgacccaaccctaaatatcagtggcaaagctgagaaaccctgctgtgggtaagggggcactcctcacgggaatatcagttccacagggcaggccacatctatcctggtcccaacagattgcctgagcccagaccatgcctggtcctcaacaaacatttcaggttgaatgaatgagctactgtgctttcttggatgccgtctaaagtcaaaggggccccttgtttggttggtgcccaactaccttctcagacaagccaggtcccatgatgcgcagttgcccaaaggcttaaagaagagagggccagctgggtacagtggctcacgcctttaatcccagcactttggggggctgaggcgggcagatcacctgaggtctggagttcgagaccagcctggccaacatggtgaaactccagctctactaaaaatacaaaaattagccagctgtggtggtgcaagcctgtaatcccagctactcaggaggctgagacagaagaattgcttgaactcagaaggcggaggttgcagtgagctaagattgtgccattgcactccaggggtgacagagcgaggttctgtctcaaaaacaaaagaagagagggaagcacatggggacaggactgagattttaagggaagaggttaagcataaagtcaccacgaaaaatcactggccatactctcagtccagtggtgaaaagcgtgggctctggtctcagagagaaaggttcaaatcctgactctgccacttctggggaagtcgctgaacctctctgagcttccacttccccagcgagaacatggtatgacagtatctacgcctggggccaccaagggaattgaatgagactgcacacatacagcttttaacacagtgtctgatgtagcacaaactaaatgacagctagcattgtcaactaaacaagatactcaaaaccacaggaagggggagactcaaactaaagtcctttcagggccagaatccacaccatttactgaccgggtcaggcagtgtaggtggatccaggcacccctccaccaaatcctgctgaaatcagcactctccccttcctctcctcaaagccttcaaaaagctccttccaggggcagctagagggggacaggggtggaaagaaaagcctccagcaggcgcacaaaaaactgcagccactgccctgcggaggacaaccatccagggccatagaaaaccatttcctgcccatgtctatattctagagcaggcaaaggaatcccaccagcccacaccccagccttcctggctgccaaaccccagcacaactgaccttctaaagggtccagagagcctccattccagctgcaggcgtgggacacagacctttataggataaacatgtcatgaatgtggcaggttaatggaagcaccggccagccgttcagcctcccccactcaggagctgcagactgtcaggcccgattctacctggctagattctagctctgccttgaagccctgcagcactgtctgcatgccctggacagaatctgggagagaagccatcccacgggccccgattcccctgggacccagcagaggaatgcagggattggtgcctacggtccacaccccctgggctttagtcccagctcctcgaaagcaggttggttcttgcctgggaggcaagtgacttcctcctggggcccctggggaagaccagggggtgggggccaagggaatagaccacttttgatggctcagaggcagcgtgaacagggaagtgtcagggctggcctaaggctgtgtgggaagaaggtaggcggttggacaggcctgagaagggaggctgagagaagggggctgaaccctgtgggctggacccttggaagacagctatgctaaccactacaccaccaacgcctcggcaggaaaaagagtctctggatacccttaatagagggatcaagtagggttgaggatcaggactggattggggagaccaagcctcggggcgaaggttggaggaagtggtaaaggagtgaggacaggatgcaggtcgagggaggtggcctctgtgcatatacagcatttgcatggggagagggaggagatcgggacctccagagcctgcacgaaaggggagagggtgtcaaggtctgcagctacgaggacgttcttgggtgcggccacctccggaaggggtcagagcctggtggcctgggcagcaacgggatgggtggggaagcccatcagggaaggggagaaactgggaggtggcctggccagcgcaggaatcggggagggaaagaaggtggaggagggcctggggcggagaggaaacgaggcagggggccggagggacccacagacgggtgcatggaggctccggggtgcggggaggccaggcgatggcgagggcagggtcagggccgaggcggggccggtcaatggcgggttcagggtcgcggccggggcgggacgaggcgcgcgggcgctgctcaccgggacgtggggcggcggccggactgggcaggtcgtcccgggtccagcggcgcctcacggtcgcggctccatgcccgggactgcgaccccggaagtggcgggagcgggggacgacagccgcggcggacacaggggacccgccggctcaggcacctttgacccggaagttgagcgacccaggcggcggcctgggattggacaccaccaggcacgtaccaaggcgtccgcggcgcttgggggggagcccgcggcgcggcggcctaaggtgcgtaacgccccatgaacgacatcttccggtgggttagggagagacacccccctgtgacttggtatcactcagtcaaacccatgatcccccactattaaggatatccggagaggatgctacctatcagggcgttggtggtatagtggttagcatagctgccttccaagcagttgacccgggttcgattcccggccaacgcatgcggtaccacttttgcgagtttgaaattttcattttagttttgagacggagtctcgctcggtcccccaggctggagtgcagtggcgtgatctccgctcactgcaaccaccacctcccaggttcaaacgattctcctgcctcagcctcccaagtagctgtgattacaagcgcacgccaccacgcccatctaatttttgtatttttagtagagatggggtggggtggggcggggtggggcggggtgggggggggggggcggttcaccattttggccaggctggtctcgaactctgacttcaggtgatccgccctcttcggcctttcaaagtgctgggattacaggcgtgagccatcaatcacggaaaatttttttaaatcccataaaaatgtctaaaaggcaggaggaaggcggaagagaaagaatgggactagaatcgttctttcggtgaatttcaaatagtattactctccggttaggaaaaacagctgacctgtttccgcccgggatcgaaccggggacctttcgcgtgtgaggcgaatgt

SEQ ID NO: 8269 - DNA, 6000 bp, Homo sapiens
ttcattaaaaaaaagcctacattaaaattctatttcacaactgcattcatataaagaaaaatatgttatttcagaacgagatagaggtgacaattattgcacaacataatgaaaatactagatgctattgaattatatgttttcaaatggttgcttttgtgttatgtgaattcccctcaattttaaaaattgagccagctgctgtggctcatgcctgtaatcccagctacttgggtggctgagtggggaggatcacctgagcccaggagttcaagacctgagacagaatgtcgctctgtcaaccaggcaggagtgcagctcactgcagcctccaactcctgggctcaagtgatcctcccacctcagcctccaaaagtgctgggattgtaggcatgagacaccgcacccaccctaaaaaaattaaaaattaaaatgaatatgttaatattctacattataacattctttcacctaaatgcttgtttctgtcttctgattttgaaagagatgaaaacatcagggaaatagtagaattgtattagaggctgggaagggtaggcgggaggagaggatggggagaggttggttaacagatacaaaactacagctagatagaaagaatgagttctggtgttctgcagcaccgtagagggactatggttaatgatcatttattctatattttccaaaaagccagtagagaaggttctgagcattcacacattaagaaatgatcaatgtttgagatgatggatgtgctaattaccctgatttgatctttacgcattgtatgcatgtatcgaaatgtcactgtatcccatcaatatgtacaagtattttgtatcaactcaaaataaaagggaagcaaaaaaaatgaaaacggccagggcgcagtggctcacatctgtaatcccagcaatttggaaggccgaggtgggcagatcacttgaggtcaggagttcgagaccagcctggccaacatggcgaaaccccatctctatgaaaaatacaaaaattagctggatgtgtcacacgcctgtaatcccagctactccagaggctgaggcaggagaatcgctttgaacccaggaggcagaggttgcagtgagccaagattgcaccactgtactccagcctgggtgacaaagccagactttgtcaaaaaaaaaaaaaaaggaaaaaaaaaaaagaaagaaaggagggaagggaacggaagggaagggaaggggacaaagggaagggaagggaaggggacaaagggaagggaagggaagggaaggaaagggaagggaagggaagggaaggaaagggaagggggaagggaaggaaagggaaggggacttttctgtgggtccctaaaagcactgtgtgctataggtactatacctcctaacctacactgttctcataaccaagaaagggtggtgcccttcttccaggcatactgagaattctgttcttccttctagacccactcttaggctccctctcccatgggctccctttcgatctacccagtggaaaggacaacagtatggagatttctcaaagaactccatcccatccagaaacctccctactgaatatccaccccaaggaaaacaaatcattgtatcaaaaggatatctgcactggcatgtttcatcacagcaatattcgcaatcgcctagatatggaatcaacctaagtgtccaccaatggacgattaaagaaaatgtgatatagataagtttatcatattatagataaatagatctgtatcacatttatatcaatatcacattttcttgctacattgttgattacagtattttatctatgtttcattatgtatatcatggaatagtaatcagccataataaagtgtcttttacagcaacacacatacaactggaggccattctcttaagtgcaataattcagaagcaaagtgtaataccacatgtttacttatttttagtatttttgtatttttagtagagacggggtttcactgttggccaggctggtctcgaactcctgacctcaggtgattcacccacctcggcctcccaaagtgctgggattacaggtatgagccacagcgcccggctgccccccatctacttcctaagggatcaaggctccctgatattttttctcacccgcaccccagccacacccccagtacctgaattcaaccaggtcgagctgcaggtttcttggaggtctcagttttaccagtacgtaggtccctggcctttgtgttttgctgccactggcttttctgggatcttccttgccctcctcaactccccaccatatccaagggatgggaaatctgccctgattttccagatcctgcgtcctctagagctaatccaaattcccaatgccaagccccacttaggatcctgctccaaatggacccatctcctgaaaccacaatgctgcttctccttgctgtgaaaaaaaaaaaaaaaaaaaatcccaaagagtgaaccacagactacacagggaatccctctgggatattatgtttccagtccctaagccacagcaggaagttgcctgtagataccaagggagatcattcagctaagatctgaacagtcaggaaaactcccgaggctagagttttgtccggttcctttctcttccttacaagacataatacggtattgacaaactatggtctgctagtcaaattcagcctactgcttgtttttgtaaataaagttttattggcacacagccacactcatgcattacctattgtctacagctgctttcaagctacaatgcctgagttgagttgttgggacagagattgtacgggccacaaagctcaaaatgtttactcttgggccatttgctgaaaaaatttgctgacccctggagaagagcagacagcacttagcatctgtgggccagacgcagtggctcatgcctgcaatcccaacactttgggaggtgaaggctggagaaccgcttgagcccaggagttcatggccagcctgggcaacatagccagaccctgtctcttttttaaaaattaaaaattagccaggcacggtggcctgtgcctgtagtcctagccactcaagaggctaaagcaggaggatcgcttgaacccaggagtttgaggctgcaatgagctatgatcgtaccactgcactccaacttgggtgacagcgtaaaaccctgtctaaaagaaaagaaaacagcatcttagcacctgatgaccataaaatagttgccaactgtggttgataaaaagcagaaacctaactcacacaaaattaagaatagagtaaaatgctacagtgtgagaatgtcttactatcaatttttctcagtcctgtctgcatcacttataagtatataccatcatgattgtcaattaataataatactagttttaaaaaatgtttgacttgaaatgtgatcttagactccacttgggcctctctgggtctctctcttctcccccaccctgggctctctcttttctaggctttcctgggtctaggctttcttttggacctacctcttgggtttcctgctcagaaaatgtcccttctagtgttcccagtttctacagggtgaggggtgagggtgggtctttcccacttggttctcccgacctctagacacttagatctgatgagatgtgtgggctgcttctcggagcctcttacatccctaaaactaaagcaagctacagtgagcaaactgaaaatgctttctgtacattttatgtcaatgctatgctagccagaggagtgagtgagggaagagagagacggcatggaaaccaagtacatcacacacactcagacacacacacgcacacataacctcgaaaacctcttgtatgcaattgacatatccacaaccccagacagacacagtcacatgcaaactcttcagacatgcaaccacacacacacccacacaaaccttcagaaatgcagctccatgcatgcagtcatacaatccctacacacacacacttcccacattcatgtacaccctcaggcacacaaccacacaccttcagaaatgcaattccaggcacacagttgtacaattctgcacacagacacactcacacatacacttgccacattcatgtacaccctcaggcacgcaaccacccacaccttcagaaatgcaattccaggcatgcagtcatacaattctgcacacacacatacacattcatgtacaccctcaggcacacaaccacacacaccttcgtggctctgcacaactacccttcatgaattaaatcttacagaggcagtgacagccatacaattcctacctacacacagaaacacacacacacacactctttagggcacaaaacacaaacttcagactttcaaaatcatcctcacatttaaacattcagctccacacacctgttcaggacggcgatcccactcacaaattcagtctctctctctctctgtcacacacacacacacacacacacacacacacacacacacacacacactaatgcccagaccctctgcagcctcagccacatcagatacatctgaaattggtgaaataagccctctgacagagaaggcaaccgagccctataaatgcacaaggcatcgggctcggtgctggaaacgtgcctgtgtgcggaggccacgggttggggaggtggggagacgggcagggagacccggggataactaaggggataggaaactcaccagaacgaccaggagaaaagcggtggcaacggctctaaggggcaagcaggagctcagagacaaagggcggcggagaagtggggacgtgggcgcagggagcgccccacacgcctgaccccagcgcctcggatcccccacctgcccgcaacctccgcgccgcagccacaccgagtccccgcgccgagccgcggagtccccactcaccggcgtccggagcggcgggggcggcctgcccgcgcctcggcctgcgcgctgcgcccggatgcaggagccggagcccggcgaagcgcccggccggggccgcggggacccgccagggactgtgcagcaccggcgcggggaccggaccgtggaggcaccggcgcggagccgggacgcgctatgctgcgggagggatccgggccggccctgcgctcacgtgggtgtgggggcaccgagcggccgggggagggggcgggatcccctccgcgatgccctccgcctcccccgcgcccagcccaggctccgcagccgtgtgggagaagggggacagcgtgcttgcgaagggagggggactgggggtgggcgggggtgagtggcctctccggcatccagcccccgccccctgctcggagccgcgcctccgcgcccccgccccctaaaccgcctccggagccctcggaggccccagcatccctggcggagcgcggggaacaggccctggcaccgcgggacccgctccagcagcctcggcggaggcctggggaaggcgcggctctagtgtcccagtaacaacagccagggagagggctccgctgcccccttctccttgcgggtgcaccttccggccttggccacttggctgctgtgtgcccttgggccaactcctctccctctctgagcctggcttcctccgctaaacaaggaagatggcttggccgaccccacagaaaattaaagctgagaaaattaaagcgcgtgaggctggaaatgctccgtgccagcgcgaagcactgggcaaatgggagatggataatgtcgttcctattgtaattaatattattctttgctgtctttagagcacaccaggcaaggtgcactcgacttttcttctcgaaaggcaatgacttggttgcttcccacatcttctgcctctcctgagagctaatgccatttaaagatctgagcatcaggtctgtcgtatgaataaaaactcagtgcaggctgggcacggtggctcacgcctgtaatcccagcactttgggaggccgaggcgggaggatcacttgaacacaggaggcgg

SEQ ID NO: 8270 - DNA, 6000 bp, Homo sapiens
ggaggctgggctctgtgcagggagctgcaagttctaggcagggactcctttttttttttttttttctgagacaagatcttgctctgtctcccaggctggagtgcagtggtgcgatcacagctcactgcagccttaacttccaggctcaagtgatcctcccacctcagcctcccaaagtgctgagactacaggtgtgccccaccatgcccagcctaggcaagaaccctgcttgacctgaggcagacgtgcatgtggtagggcacagggtcaggggttgccaatgaggagggggatctccaggaatgctccatggaggtgaggttcatgacaggctgtgtagcagcgggcaggcagtgagggcagatgggaggactgcatgatttgcgggataatggggaagagggaggggttcggaggtgttgggggctgtcaagaggtctgtctgagcttcagctggaggtgacctgacttctctcaggcagaagatggcctgggccctcggagccatggtggcccacacaagtagggaaggaatgaccaggtactttcgggccagtgtcctttcctggtccaaagagtcatcaaatattcctgagaggacactgcaaggcctgagaaagcacaatttgcagatccaatttccaaagttgatcaatacccccgccaacctgcctggtgtaatccgacgacggggagctgggagtcccaccccagacgtgccggggaagctgccagctgcctgcaaactgcatgaagcccctgcccaggccctccccgttggagccacagtagcttcagggctgagcccagaggctggggggatgcaggaggtgttctgaccagtcagggcccaacatacctgggcttaggatggggtttgctgaggggtaaaaacctgtgaggtccccaggtagccctgctagaccctctggagcaactgagcctagttagggtggagaaggggctgggggaatgtttcccaatccagggtcccacacagcaggaatcccagggaaagctctggaaatgcagagtcatggagctgtggtgggaggtgggtaccttgggccacctgcaggtggtcagtaatgctggaggtgtcagaagtggactctaggacagctagggtcccagatcaccacccatggccttgcgcgctgggcgtgcagctcccatcacagagggcaccaggggtgaacagcagccgttggagtttggcaacgtggaccctgctggggcctgaggtcttgacagctaaggacaaccaaacgcaaggacctggacagtgtcctcctcgcccaagctccatgactggccctagtccccagggaagcacttttctgaaagtggagtatatacacatttggggtgacacacccaccagcaggagggtgtcctggggctcacattcataagctgtgacaccctcattcccccttcccctgactctaccatggccacagacatctgacccaggctgggccagtcagccttttcctggaaattgggatgggagactgggcctccatcagttgtgtggaccaggacagcagacagggctggggctaggtcagcgctgagcaaggcccggccttgagccagcccgaagcatcagaggaggccgggctcctgagagcacagctcagggcagagagagagggaaagaggcccaagcctgccagaggagccagtgagcacagcttctgtgcaccctgggcctcccctttgaccacagcaggggtcccgctgcctgacagctccgggtcctttctccagcaagccgggccctgcacagaactagaaacccaggcacctcctgccccaccgagcagagcagcaggcaacgaacaagtcagaggcccccattgttctcccgggctgcaccttgacctcaggttttggttttggttttacagacagggtctcgctctgtcacccaggctggagcacggtggagccgtcatagcccactacaatctcaaactcctgggctcaagcaatcatcctgcctcagtctcccgagtagctaagactacaggcacatgccaccgtgcccagctaattttcagattttttttgtagagatggagtttcactatgttgctcaggctggtctcaaactccagggctcaagcattctcttgcctcagcctcccaaatgctgggatcacaggcgtgagccacagcacctggatgtcgagactttcccacggaagctgtgatgcagcttctaacttacacctttcttccacccctgctcctgcttgtccaaatctagtaattcccaggtggccctgcatggcgtggcatgtcccctcctttcaagaaaattaataaagccttctttccctggcatgggcctctctgtgtcacccctcagtcatactcctataaattaaatcctaggaagctcatggcctgcaatgaggcacaagatgtcaattccacgggaccctcggcagcttgccggtggtataaagccaccacgtgccaggcaccacactaagagcttgcctcactggctcatggaatactaagagacaggttttgagtagaccttgttatttcacccactttacagatgaggaaactgaggctcagacaagttgaagcctgtccaaagccaaacagctcctttgtgatgtagaaaagatgcacacaggaactcggggtagtgccaggaccctgaaggcctgtcttcagggaccactcacccaaaagggactgaaggagtggaggaaggagagaaagtgcttacttacctaaggcaggaaccgcactgctgagtctcccggtgagaaagatgttcactgtgggagatacaaagaaagggtcaggggtcccacatacctgctggggaccagcagcagcccatgagggacaccacagctaaacccaaggctggcccgctggtccccttcctcttacagggcaaggcccagagcgcagcccaagactgcccatcaagagggtccctaccacctcacccccacctccctgcctccatgttctgttatccaggctggagtgcatagctcactgcagcttcaaactcccgagctcaagcaatcctcccacctgagcctcccaagtagctggaactacaggtgtgcaccactatgcctggttatttttttattttttatttttgtagagatgaggtctcactgtgttgctcaggctggtcttaaactcctggcctccagcaattctcttgccttggtctcccaaagtgctgggattacaggcacctgccaccgcaccctggcctgctcctacaactttgaagggcttccccctaccaaggggctttgctcgcccagcagcagcagaggcaggaggggaggcagttctgataatccccatttacagggcacgcagctagtgacggaaccatcctcttcccccgtgccaagctgactttgaggaggaaagcagaactccccagccacccctcaagcacccacctccgtggggtttggcccttactttcaccttctgctctggcccggggggttacgggcccagagtcggggggtggggggaaacccaacttcccggggttcaggatgtgtgtcagatcccgcctggccaggaagcaggaaccgctgcccccacccaggacacccaggccccctggacagagccaggccaaagctcctaagcatggagcgcctgtccccctgctctgctcaccagggatgccagcacccagcagctcagagcccagcacacatgaccccgcactgaggttggggtgggcgcgctggggttacaccctcaatgctccccaatggcacattcccactgagccaggctcacacagctggggcaagggcctgccagagcctcggagctccctgaggcctgggggtgattactttgtcatttcagtggcttcagcaaacctgtcaggttacagagccctcactggtgacatcacagggtgtcccctaatgacccccagttcttataatggcctccctccttcatcacagtaaataaaggagccatgtgggttggggatttaactcctcctctcgcctacacagagcgctggaaagctggacagaaaaactcccggacagggcgggagcccctcccaccccatgcctggccttgaccggtccctggcccaacccaagcaccctcctaaactgaacaggcctgcctgggggctgagagacacaaagggaaaacaggagtcccctggaagccgcctccacactggcaccctcctccagccctgccccgcaccccgagtccccatctgcggcttacaccagcccccaccccaactccgggccggaaacagtttcttcttcaggggacagccggcctggcctttgtccccagctcccggggccccctcgtctccaggctcagcgcgggcgggccgggttgaaggctgccgcctgcacgaagggcctcctgccagcgctcagcccgggctccgggcgctactccgagcggggcgggagccggggctgcgccaccagagtcgccctcccaggcccggggccaggcgggcaagcggtgctggcccctctctgggtctccgcgcgggagccaccgcggtggggggctcgggatgccgcggccggagaggaggtcggtcagggcgcggcgcggactgccatgcgggggacccggacctgcccggcccgcgcggcccactcacccagacagacgacggccagctgcgcccgggcgcccggcgcgccctccagccccgcggccgcgcgcttctccatgccgggcccggccgcccgcgggcgccgcctcctgccccgcggctccggctccggttccggctgcggctccggctctggctctggctgcggctcgggctcgggctcgggctagggctcgggctccggctggcgtggctgctgcggcccgggtgcaggcggcggctcccgaggcgtctttgtgcggtggcggtgcaggcccgtagggcgcgcgcggccacatcggccgcggcgtcacgggccctgcgggggctcagcggcggccgccagggaagacccccgcccgccgctgcccccgcgccccgggagccccgccgcggccggcctgggcccggggacccccggcgcgcccatgccccgcggcgcgcagcccgcccggccccggcgtccccgggccgccccgcgctgcgcccagcccgcccggccgggtgccgccggtagagcgtccgtgggtctgtcagtcctcccgcccggcccctcgcccgcgcccggagcctggaggccgcgctgcgccagccacgtgacgcgcccgccgagccgcagtggcgctggctgggcgggcggaggcggctggggcgggccgggggcgcacgccccgcctcggggtgctggacagctctgcgcaccagccccgccccgcccgcgccccccgccgcgctccccgcgctccagcccagtgctccaggcagccggtgctcgcctggcctcctcccgggcccacgaattgatccctcctggagccggctgtgctgaggaggaccggggagcgaggactgggaaaaggtgggagagagaggacggcttagggacctcataggggtggcacaaggctaaggcctgtcttcttcgcaaggtgtccctgttcctgcccctccgcttctttcatttgccacagtccaagtgccctgtcacgtctctaagaggaaccccctgtgccaagcaagacctgtcaggggacattggtgaacacaccagaggcctctggagatctcccagggccccctgagcccaccctgttacccactatcctcgtgaggctggggacttgggaggaggcctgcttcttaggctgggggtgccctctggagagctgcccaccaagaggttgagtccaatgaggcaagaaccaggagagacagggggaaggtttgagaaggccatttagggccaagacggatgtgaaatcagaggtccccaaaggctccatggcacagcgggcccaccaacctgagctgaggctcccaaccct

SEQ ID NO: 8271 - DNA, 6000 bp, Homo sapiens
cttgccctgtcgcccagactggagtgtagtggtatgatcatgtctcactttagcctcgacttcctgggtttaagcaatcctcccacctaagcctcctgagtagctgggaccacaggcacgcaccagcacttccagctaatttttaaattatttgtagagacaaggtctcactgttttcccctggctggtctcgaactcctgggctcaagtgatcttcctgccttggcctcccaaagtgctgggattataggtgtgagccactgcacccaactgtctcttctctaagtgattccatccatctgattcatctatatgatgatgcccctcaaactgatatctccagcccagcctctggcctcctacatcatatctctagcagcctaaatcactggtcagccagctatggctcacaggccaaatccagctaagaatgggttttatgtgtttttaatgattgagaaaatgtcaaagaagaagatgattttgtggcatgtgaaaatgacatggaattcaaaaaaaaaagtttttttttcttagagtctctctctgttgcccaggctagagtgcagtgatgcgatctcggctcactgcaacctccacctcctgggttcaagcgattctcctgcctcagcctaccaagtagctgggactacaggcgcgtgccaccacgcctggctaattttcgtatttttagtggagaccagttttcaccatgttggccaggctggtcttgaactcctgacctcaggtgatccgcctgctttggcctcccaaagtgctgggattacaggtgtgagccactgcgcccagtgaaattcagattttagtgtccataaatgaagtctcattggaacacagccacactcacttacagactgtcttggtcgttttcacgagtagtcgtgatagagactgctccacaaagcctgaaatctttactatatggcactttataggaccttcactgtgctgacctctgtccagatgttatctgttaatgggcatcgtaaatttaacatgcccaaaactgagcccatggtccctctccttcataataaatttgataagagaaaataaataaaacagctgctgtttcatcttatgaatggctcccctattctcaggagctcaggccaaagccttagagcggtgattctcaactcagggcgattttatcccccaggagacagctgacaatgtttagacacaatttacaattttggttgtcacgactgggaagggcgctgctggcatcctagtaggagagatcaaggctgttgctcagcatcctacaatgcataggacggcccctccacacagaattatccaccccaaaatatcaaccatgctgcggtggaaaaaccctgctttggagacgcccctggctcttctctctcatatcctacaactgctccatcagcaactcctgcccacggtagctccagaatatactcaaaattcaaacaacttcccaaaccctgctgcccccaccctagatgagcctctcgttgtctcatttgccttcccctcggtcatttgttaacacagcagcaagaaacataccgcaaaaatgtaagtcagctcgtgtgactcctctgctcaagaaccttcaacggctcccatctccgaatctaaagcaaagtgctttctgggatgtataagaagccgtgaggccgggtgcagtggctgacatctgtaatcccaacacatcgggaggctgaggccggaggattgcttgagcccaggagtttgagaccagcctgggcaatatagtgagaccctgtgtctacaaaaaatgggggcatgtgcctgtagttctagctatttgggaggctgaggcaagaggacggcttgggttcaggggttcaaggctgcagtgagctatggtcttaccactgcacgccagcctgggtgacagagcaaaaccctgcctaaaaacaaaaaaagaaaaacaaaacaaaaacaaacacagaagctggccaggcatggtggctcacatctgtaatcccagcactttgggaggcctaggcgggccaatcacttgaggtcagaagttcgagaccagcctggccaacatggtaaaaccctgtctctactaaaaatacaaaaattagccgggcatggtggcacacacctgtgattccagctactcgggaggctgaggtatgagaatcgcttgaacccaggaggccgaagttgcagtaagccaagatcacgccactgcactacagcttgggtgacaaagcaagactctgtttcaataaataaataaataaataaataatttttaaaaaacagaacctgtgggatggggaccctgatacccctacgactgcacctcttactcctacgttctccgccacccactctgccccggccacgctgacctcacactggcttgatcaacacacagccacactcccacctcagggcctctgcgcctgctattcctacagtctgaagcactttcctccatctcttacttccttcagacctgtgatcaaatgtcacctgctcggggaagcttttcctagattccttatctacttcccacggggatccctgacccctcccatcccctcccccaactccttgtcctccttagcactcagttctatctaacaccctaaaggttgactttacctccatcattatctgtctctcccttagaatataagatatataacgacaggaggttttgtctgtttgttttccactgctgcagccccagaatccagaacaatgcctggcacataatataaactcaataaaaatgggacgttgaatgaacgaatgaatgaatgaatgacatccctactagatgccacgtgctgtcctagggctcccatgatgggagccctcacacttggctctatgcctggtacttggtcagaccagtgaatggacatgaactcaaacttccacaggagaggcaaagaacatcacgagagccgtgggaggaatgggaggcgagacggagcagatggaggtgactgtggggaagtggagaccccccagctgctgctcagatccggcccatcgtggtcagggtagaacacaggcttgtgctagatcttccgccagctcagaagaagccggaaatcagaactacaatgggaagcctccctatttttaactgttggcaatggattcagattttgctttcagttttaaacactttgtacactagacagagcgcatctgtgaatcccatccatgagattcgagttctgctcttggctcggcccctttctcagctaggtgaccttgggcaagtgacttcacttctctgagcctcagtttacccatccccaacagcgaggtggtgcccacctcataggattaaacgagataacgttcccggcttgtcgtgaacactcagcaaaacagaggaagaaggggcagaggaaatagagggggatgaaaaagagaagcaagagatttcaatcttttggccgaagggggcatcaggatggctggttccactccttcacgttgcagacaagggctgtgaggctggggtgcaggagggaagacagtggtcacacagcagggcagatatgcagcagaactggcacccaagactcctgcttcccagccccgcagctacttgatactcaggaaagaaatactgatgctaagagtgggagagagaaggggttggcacagcagagggcaggagtcttggagaagtggggaagtcgagagccagggagccgagctaggagagaagctgtgagagggagaacaggacagaggaaaagaaccaagtcgaagatccgaggaggtagcaggggcaggagcgagaagccttaacgtgaaggcctgaggcatcgagtcaggaagacgtcgaaggaggcatgagtggaggaagaggaagtggagtccactaaaggaaaaaggaggaaaggaccaggatgggaggttggagggcaccctggtgggagagacatgggtgggggcactgatgggaagagaaagatgaacaggaggagaagcacaaggcagaaaagagagaaagtcatgagtgagggcgagttaaggcacgaagtttcaggggagcagcagccaaagagaaggggaaagagacagaccggaagactgggccgtgaaagggggcgggagaggcaggggacttcagaggactgggggggaaatgtcgggagagagaagatgtcacggggcacgagggagaggaaatgaaggggcaggtggagcggaggagcagggtcaagatgaactgacgggaaagagggagaaagaggctgctgggtgcagtggctcatgcccttcatcccagcactttggaggccaaggcaggaggatctcttgagctcaggagctcgagaccagcctgggcaacaggagacctcatctctacaaataataaaaaaaattagctgggcacagtggctcatgcctgtggtcccagctactcaggaggcagaggtgggaggatggcttgagcctagggattcgaggctgcagtgagctgtgattgtgccaccgtactccagcctgggcgacagagtgagaccttgtcaaaaaaaaaaaaaaaaagagaaaaggcacagggcagagtggaagaaatgaaacaggaggagccccaggtactggagagagggaagatgcaggggtgtgatggggcagcgcaggagacacggactagggaaagataggataagggggttcagcggagaggcagaggggctgcagagggagcatgccgaggaattccgcagggtgccaggacgcagggaggagtgggaaggaggggagaggaggtcaggggcgcgagtgggaaggcgcagaagcccctctggcagaggaggaggggtgcccaagggggccccaggatcagggacaggcagccccgggaggctcagggtctctcggaggggagcggcgggggctgcggggagggccgcccgcaccctaccttccaggcagcagatcctccagaggcccgagtgcgtgaggccgccggggtccttcttctccgaggcgccgccgcccccgcggtggggggtcccgtcgtcgccgccggccgtgaggttggtggtgttgcagatgagggcgcgcgtgtagagccagtagtcagtgctgatggcgatggtcatgaggccgaaggcggcgaaggcgcccaccgtcgtcagcagcacctgcacccccttctcgcaccagaggccccgctcttcgttccagcgcttcagcgactccagtttgaccacgggcagccggggggccgtgggccaccaccggggcagcgggggcggggccgtgccggcggctgggggggggttcacagcgcaggcagaagcggggggcccggggccggcggggctggggaggggggcggcgaggaggaggctgcggccggggagggggtcagagcgcggccatggtcggcggctggtggagggcaaggagcgagatctcgcattagaggagaagaaggcacaggtacctcccccagtccccgcccccccccccccaaaatccctgcctcagctccagaaactccttccactcggggctccactgcttctctttctcaaaaataataataataataataataataataataattaataaataagatgaaatctctctccactcttgtcttctgcccaagaaagtcatcccaccatcccactaaccccactcggaggagtccccaccaccgctaataattaataaataagatgaaatctctctccactcctgtcttctgcccaagaaagtcgtcccaccatcccactaaccccactcggaggagtccccaccaccgctaataattaataaataagatgaaatctctctccactcctgtcttctgcccaagaaagtcgtcccaccatcccactaaccccactcggaggagtccccaccaccgctaataattaataaataagatgaaatctctctccactcctgtcttctgcccaagaaagtcgtcccaccatcccactaaccccactcggaggagtccccacc

SEQ ID NO: 8272 - DNA, 6000 bp, Homo sapiens; identical to SEQ ID NO: 3306

SEQ ID NO: 8273 - DNA, 6000 bp, Homo sapiens
gggcacattcaatagtcggtctagctcttgctcccgcggctgccttctctgcagctctggaggctgcagcttctggtcctggaccgggacttaggtccacacccacgtgctgacgtcgggcaggctcagcggcctcccgcgcctgcgcagcaccgcccttttcgggcgcggcgcccagtccctacaccccacaatcccccgcgccgttccggaggcgcgctaggagtgggtgtggcctctgcctccacattggaacaaggtgaggcagagggtgtcgcgtggtcttctgggaaatgtagttcgtctgccaggccggaaccaccgctcaaccggctcgcgagactatgcaccccacaatgcgccgcgcgcgcagcggctaagcgatgcgttgctgcctccacgtggtggctgagtgatcatgctccggtttgggaatggggcccagaagggtagggttaggggcggggacggtgctggggatgctgagggtcgccctggaaacctctgggaagattttccagagggtaagtcccctgaacctggcccacgaaagggtagtagtaatgaagaaattggaggtggggcccgctatgaggaccgaatgacagagcagcacctgttggctgcatatgataatcaggctactgttacacctaagactcacacagtaggcacttcctaggccacttaccgctccctgcgcttcaggtatcttagcccattcaatcctcccagccaccattcgagatattatcagccctcctttctaggagtgaagctgaagcccagaaacgcgaatcacttgctcaaagttattcaacatgtcagtggcagagctgggatttgaactaggctgtcgggctaccaagtctgggctcttcttcataggaatatctcatcaccctattcagttatcctaaaattgtaattagcacatgaatcaagtcaagatggtcattaacatgtgaatctctttgagtcgctgattaccagcgcttgttcctgcccaaatttgtgacttagacctgcttcaggacaaagttgacaatcaacatagatttatagttagcacatgaatcagcacaggtttctgttcacagggatcagatttctgattagcacttgaatcagcagtggtttgtgtcaacagctggagtctttaggttcctgatttgcacagggatctccatccagggattattttcttgcctaaataggcctgttcctttatgtccaggtgaccttctcttcaaatgttgtcccagctgggtgcagtggctcacgcctgtaatcccaacactttgggaggctgaggcgggaagattgcttgggtctgggagtttgagaccaacctgggcaacatagcgagaccccgtgtctccatgaaaaataaaacaattagcctggcatggtggcatgctcctgtagtcccagctacttgagaggctgaggtgggaggatcccttcagcccaggagtttgaggctgcagggagctatgatcatgccactgcatggcagcctcagcgacaaagcaagaccatttctcttaaagaaaaaaaaaaaagggcgggcacagtggttcatgcctgtaatcccagcactgtaatcccaggttgaggtgggcggatcaactgaggtcaggagttcgagaccagtctggccaacatggtgaaaacccatctgtactaaaaatttttttaaaaatggccaggcacagtggctcacgcctgtaatcccagcactttgggaggctggggtgggtggatcatctgaggtcaggagtttgagaccagcctggcctacatggtgaaaccccatctctactaaaaatacaaaaattagcagggcatggtggcacgtgcctgtaatcccagctactcgggaggctgaggcagaagaatcgcttgaatccgggtggcggaggttgtagtgagccaagatcatgccactgcactccagcctgggtgacagagcgagactccgtctcaaaataaaaatcagccaagcgtggtggtgcatgcctgtaatcccagctactcaggaggctgaggcaggagaatagcttgaacccaagaggtggaggttgcagtgagccgagatcatgccactgcactccagcctgggcgacagagcaggactctgtctttaaaaaaaaaagagatgggggctgggcgcagtggctcacacctgtaatcccagcactttgggaggccgaggtgggggtatcacctgaggtcaggagttcaagaccagccttgccaacatggtgaaaccccatctctactaaaaatacaaaaattagccgggcatggtggcacatgcctgtaatcccagctactcgggaggctgaggcagaagaatcgcttgaatccgggcggcggaggttgtagtgagcaaagatcacgccactgcactccagcctgggtgacagagtgagactccgtctcaaaataaaaatcagccaagcgtggtggtgcatgcctgtaatcccagctactcgggaggctgaggcaggagaatagcttgaacccaggaggtggagattgcagtgagccgagatcatgccactgcactccagcctgggcgacagagcaggactctgtcttaaaaaaaaagagatgggggctgggcgcagtggctcacacctgtaatcccagcactttgggaggccgaggtggggggtatcacctgaggtcaggagttcaagaccagccttgccaacatggcgaaaccccatctctactaaaaatacaaaaattagctaggcatggtggtaggtgcctgttatcccagctacttgggaggctgaggcaggagaatcacttgaaccaaggaggcagaggttgcagtgagccaagattatgccactgcactacaacctgggcaacaaagtaagactctgtctaaaaaaataaataaataaataggccggacactgtggctcacgcctgtaatcccagcactttaggaggccgaggcgggcagatcacgaggtcaggagatcaagaccatcctggctaacatggtgaaaccctgtctctaataaaaataccaaaaaaattagctgggcatggtggcagacgcctctagtcccagctactcgggaggctgaggcaggagaatggcgtgaacccgggaggtggagcttgcggtgagccaagatcacaccactgcactccagcctgggcaacagagctagactctgtctcaaaaataaataaataaataaaataataataaaatggggttatttgttttttgcttgttgcattgtttaagtcccttatagactgaattcctctttatgtctctaaatacatttgtctctttggtacacatctgcggtgctacatgccctcaacccaccaggttttagcatagctgttgtggtagacagttccgtgtgcagtgcagatagccctggttcagcccagctgttctcaaaatgtggtccctgaccaggtgtagtggctcacacctgtaatcacaacactttgggaggcctgggagggaggattgcctgaggccaagagttcaagaccagcctgggcagcatattgagaccctgtctctacaagaaattttaaaaattagctggatatggcgatgcatgcctgtagtctcagttactctggagcctgaggtgggaggattgcttgagcccaggaatttgaggttgcagtcaattatgattgcaccaatgtactgggtgacaaagcaagaccctgtctcaaaaaaaaaagtatggtctttgaaaagtcacattagcatcacctgggtactcgttaaaaatgcaaatgtttgggtcccacctcagacccactgaaccagaaactctgaggttgggacctggagatctatggtgcccccgggtgatcctggtgggctgcactgcaaggacacctggcctggctcctgcaaggcaaggcatccctctctgcttttctttctttctttctttcttttaaagacagagtctcactctgtcacccaggctggagtgcaatggctggatctcagatcactacaatctccacctcccgggttcaagcaattctcttgcctcagcctcccgagtagctgggattacgggcgtccgccaccacacccggctaatttttgtatttttagtagagacggggtttctccatgttggccaggctggtctccaacgcctgatctcaaaagatccgcccgccttggcctcccaacgagccgggattacaggcgtgagccaccgcccccggctgtcagtgtgtcttgaggtctttccctaatcccagatggcacaagttttccctcttgcaggcagagaaaggagccttgggaaggagcccctctggcctgaaagatcaagcctattgctgggcatggccaggtaaggaaactccaaccgtggaaaggacattccagggaggtggtgctgagataaggggggcagaaagagacaggtttggggggccagtggctctggaatgaagcgctacactcaaggctaggaatagttactgaatgcacatacacacataccattctcacagcccaggtgctgcgtcttagagcgtgtgagtgtgtatgtgtgtgtctgtgtgtgcgcgcgcacgcacgtctctatctctgtttctgtctttctctgacttgtccttatctcttgtctctccatcactctctgtgtctcgctgtctctgtgcatttccatgtctcgaatatgtgtgtgtttcaatctgtctctctgcctctttccattttctcctctctatccatcaatctaagcctgcccatctttttgtctgcctttctgtatctccgttcttctctgtctctctgtctcagtctctctgtatccagggattctctttcccagcagcgccagtgcgactccatgggaggtggggccggggcgcgtctttgagagaaggggcgggtgcctacgcctttaagcgcgggtgcgcgcggagcctgcgcctttaagcgccggtgcgcgcgctgccctgggttgccggcgaggaggccgcgggagcgcctggacccggcccgcccagcccggcccccgcccggcccccgcctcggccccggcgggggaggggtctctgagcgcggcccctcccccctgcgcccccgcctgcgctgcggtgcccccatcccgcgtgtcccagtctgtctgaccgtccctccgctcccaggcctcgccccacccggccctggggctgcccggtcgcccccctccccaccgcagccggtcccctccctcccagtcagcctccgccgcagcccaggaagccagccgggacgccgccgccccggaccccgcgccctaacctccacctcgggggcctgcacccccagattgaatcgggaattccggaaacccgagcctggaaccctgatctgggaccagcaccccgagatccggccgtggaaccccaagatctggagcctgaaccccagtatatggggctggaatctcaacatcggtcactgggacctcaatatttggagccggaaccccacaatttggaacacagaccccaatatttggagcagaaccccaagatttgacatctaaaacctcaagcctggagctgaactctgaattctgggcctgggaccttgaaatctgggactggatttccagtactgtaccctggaacccactcttggggacctgaaccctgggattcaggcctcaaattccaagatctggactgtgggattccaaggggcctgaacccgagtttgggcctgaagtccttgctgcagacctgagtgcttaaatctggggcttgagacctcccaatcttgactcagcaccccaatatctgaatgcagaaccccgggatcggatctcagactctaaaccccaccgtttggctgcttagcatcccaagactggacctgggagaccctgaccctgaacaacccaaactggacccgtaaaactggaccctagaggcccaatatttaggggtctggaaccccgagtattaaggtctggagac

SEQ ID NO: 8274 - DNA, 6000 bp, Homo sapiens
cctctgtcctcgggtgtgggggccctagctcgccctctctgggtgggtgggtgagagaggctgcaggggaggctggcaccgggcttgggcctccagtccctgccttgctgactttggccgttgcggtatcacgtgacaatcaactctcccttaacgacgactgcggctgttgggctgcgctgccctccctggcctgcaggtggggccgtggagcccatgcccgccggggttgcaggctcttccgggcctgggctgcagcctggcccggccctgcttccctggcctcccctccttctcctgggtgcttggaagaggtgggtcctggcccgtggttgaggtcttgcctcgtggactggaagcagagggctggctgtgcagcctcctggggtagctcgttttttttgcaccgggtagaatattttttcaggcacggattcctttttttctgggcccccatgggtggtccggcatcctcagggggtgtgagtgtgtgtggggggtctctgagctgaacttgggtggggtggggacttgttcctcgggggccacctttgtgtccttgtcagcggtcgtcctgctgtggcctgggttgcatttcctcttggggggggtattgaggacccccagcctggaatgagaagggtccccggttccatgtcagacccagaaaggtggatccccccactgttggctgcaggaggtttttggtacccccttttgttccagaaccgtcctgcctctcgcttggggacaggggggctttggatggcactggtgtgcacctggacccagccccggcctggcaggatccagggatgggtgcctgggatcctggggggagggaggcaggggacgcccttctggagctgggctcggagggtcctgccccatccagccctcggctctctgtgttctctgtccctagcctcaaaccctcttctggcagcgctagtgagatgccttagtctgtgggggtgggtgggggactggggccccgttttcctttgtgagtcttggttggccccagccctggcaggggcctgtctggagcaggggtaggtagggctgtgggttccagaactctataactgggcccctctccagtgtccaggggcttggagagacctgcgcccacccctccactctcccaggagtcgctgatcactgggacctggttccagccgtttgcaggggaggcggctccgagaggcgtgtgctttccgtgggtggcgcccctcccccgccctgcctggcctcatccttgtatttaattaattaaacaagcccctttttaaaccctactccagcgtgtgtgtggtctctcccgtggcagtccccacctgtgggcacgctctgaatccctctgtcccacccaccagtgtggtcccaagttcatccacctcgtggggaaaccgaggcagcgggctagtgaagggggtcttggccaggcccctctggctgagacacaaaatgccctgcccctagccctaagccccgcggagggggctgcctgcagcagcgcgcgctgcgcccgccgggtgtcacccacgcctggcgcagctgcgccccccgcccagcttcccgcccgccccgttgcctggcaaccgaggcacagtgacagggcgcccgggggcgtccaccgcccgccccttccggtgccgcaggggatgggggagcctgcgcccccggggctgctcgccggcgcgggacaggctcctccacggagggtcccccggccgcctcccaggctcctgtgctcctgtattgagcgcctactgtatgccagctcccctagtgggaatagggaagagggggcggtgagagctttgaggccctccccaggaaaaaaccactgtggactccagcgctccccagagcctggaggccggcggggctgggatggggccgggcaggccactcctacacacctgctgagccctggggcttcgcctgctgcccgcccggggaagggggtggtcggcctctcgtatcgcgcggccggcgccggctcacgccagacccctccccaacctgggcggcaaattcccggctttactcgagggcagcctccctcgtgcacccccaatcctgcccgacccatcctcccatcctaccggacgccccacaaacatcactcccgggactctcgcacccctccagctcctgcctggttttctgcccctctggagcaaaatgtctagaatatggggtctacactcgcagcctcacccctctctctgacggacacactcgcattaggcttttaaattacacgccccacccccagcacacacacgtgcccagaagcagcaccatccttttggtgcctttgggaccccgaccctcccgggcgtccctcccacccgcaggctgctcttgccatgccccctcctcggtcgagggcagttccatcctgcaaggccaaaatccttggggagtcaccctggaccccactgtgtgtctcaccacccacatctggcccatctgaaacctccttgggctctaccttcaaaatagatccaggatctggccgcctttccctgctgtaagggcttccaccgcgacggtctagcctcctcacgactcacctgaaccagtgcaatcaccttggccctggtctcctcacggtttgtcctccccacggccaccagagggtgtccgtgaacacctggggcaagtctggttcctcctctgcccgcaaccctccatggctcccactgccctcacagtcaaagcccaagtcctccctgaggcccatagggttctgcatgacctgccccgtcctctccctgctcttccctcctgcctctctccccctcctcaccctggtccagccacactggcctcctcgctgttcctccaacacaccaggcgcagtcctgcccatggcctgtgccctctgcccggaatgcttttcctccagaagcctgcttggctccctcatcatcttttatttatttatttatcttttattttttcgagacactgtctcactctgtcacccaggctggagtgcagtggtgcaatcttggctcactgcaacctccgcctcccaggttcaagggattctcctgcctcagcctcccgagtagctgggattacaggcatgggccaccacacccagctaatttttgtaattttagtagagatggggtttcaccatgttagtcaggctggtctcgaactcctgacctcaagtgatctgcctgcctcagcctcccaaagtgctgggattacaggcgagaggcaccatgcctggcccctaattttctgtaaaaccgcacaaatcccgccttccccatagaatcacccagaccagccctgtgcccagtccaggctcttctcctgtttctgttctcaaagcactttccacctggcttcaggctgtctcacttattgctgtgttcattgtcggcctccctgcctacaccatcacctccaccagagtggggttctctgctctgcttatggatgtttctagcattttgtggcacacagtaggtgctcagtaactatttgctgaatgaatgaccgacaccagccggcacggatggagcaatcgcataaatgagagttcatctctcacgcatcatcaggagccatgacagggagtctacgcctccactgcccatgataggacagctttgagattagatcaggtcctctgcagagtcgcccatgacccatcccaacccacgtcccctcatcattgcatcctgtcatttatttataattgtggtaaaatcacatgcacataacataaaatttgtcatcttaaccattgtattgttatttgagacggactgtcactctgtcacccaggctggagtgcagtggtgcaatcttggctcactgcaacctccgcttcccaggttcaagtgattctcctgcttcagcctcccaagtagttgggactacaggcgcccgccaccacgcccagctaatttttgtatttttaatagaggtggggtttcgccatcttggccaggctggtctcaaactcctgacctcggttgatcttccctcctcggcctcccaaagagctgggattacaggcgtgagccatcgcgcccagctaatttttgtatttttagtaggacagggttttgccatattggccaagctggtcttgaaatcctgggctcaagtgatccacccgcctcagcctcccagagtgttgggattacagacatgagccactgtgcccgacctaagactttgctttctattctttttgggtgtatacccaggaatagagttgctcatagggtaattctgtttaactttttccatctctacacaaaatacaaaaaattagccaggcatgatggtgcacacctgtggttttagctactcgggaggctgaggtgggagaatcacctgagccagggaagtcgaggctgcagtgagccgtgatcgcaccactgctctccagcctgggtgacagagcaagaccctgtctcttaaaaacaaactttttgggttttttgttttacatagcagtggcactattttacaatcccaccaaaatgcaccaggttaaacttcccattaagacgtgggcctactccaccagactacagagttgccccatcccagccttgttcctcgtttgtctgttaaaatgcaccctctagctggtatacagtaggcgctcaatatttgttgaacaaatgagtgaacgtggacctggtcattagactgatgacaagagtcgaggttggggagattaaggcgtttcttgagagccagctgtataccagggcgaggggatttttaaagactgtgaacggagtaattcaaccatgagtttcacctggcccaggtttaaggccacctccccgcagaactctcctcgtccagcagagggcgccttaaggtgatatgctaacgaaaggaaataatatgcaaatgagtaatagcgggccccgcggggcttttttggtcaggcgcgccgtggacagccctggcgccgcaggggcctggggctcaagatggcgccgctacagccgccgaaggtcgggcggcggcgctggcgaggctcccggagaccgcaggcagggcagcccctgccctccttacttcctcccgcggccgtctgtcccggcccaggggtccgtcaccagccttggtcgcgcaggagcaggcgtttctgagcaggcgcgctgcgggcagcccctcccggggtcccttgcggcggcgtcccgagggcctccgggggcctcggagcaagatggcggcggcggggtccgtgaggcgcgggcggcggcgaccgcggcgccagtgagggggccctggggcccgggcggctccgggccggggccccgccgcgggacggaccatgctacgctccactggcttcttccgggccattgactgcccctattggtctggggcgcccggggggccctgccggcggccctactgccacttccggcaccgcggggcccggggctccggcgcgcccggtgacggcggagaggcgccccccgcagcaggtaatgcccgcccgcctgcttgccttgggctcggctcccctgcccgggtctggaccccaccccggtcccgcccggggtccccgttctcggcccagcctcctccccacacgttcgcgggcgacggttttcccagtcgggaccggaaccacccaccctgggacccggtgcaaagcactagatgtccctaagccttcgtcttcacgagtgtgaaatgtcaactaggaggacgcgtcctgccagggctgtctagagggcggagtgcgagcgcatgttgagtaccgggcaccgggcctgacacaagggggctcgggagacgggcgcggccggcgctaggcaggtcctggactcctcctgcccctgattggcgcccgccgcttcccggaccccatgtgcttgtggccgcccttgtttatttccatgacgtttcctccggccgcgcctctggcagcggccacctcagtctccagtcgttgagttaggatggtccgaggatcgtctcttg

SEQ ID NO: 8275 - DNA, 6000 bp, Homo sapiens
ccttcaccttgccatgtgccttcaggttccagtggtggctggtccccctgccctacggcatcctcatcttcgtctatgatgagatccggaagcttggagttcgctgttgcccagggagtgagtgtggagactgggagcctgggggcaggggactgaaacgtttgagcagctgcacccacctttgatcctcaacacttggcctctaagcccttgaccctccatagcaaccagcactgacctctgagcccctggccctgcctaagtggcacccccagcactgagtctcctttctccctctctctcccaggctggtgggaccaggaactctactattagagggacgactgccttcaagcatccctgcaactgccacagcaggtgggggcagggctcgtgggaccctctggacagccaccaagatatctgagcaaccaagagtcccagccccaccagtatctgcttctgtagcccacggcaccccaaacttggagggacctgcccactcccctcccccattcccaaggttcgcacctcctggagcagcagcgcctgggcagtcctctgggctggcctcgggaaagccgccacctgtggtggcggtggggctctgacagggagtacagctgaccgcttctggagggtgtttctgttcttaggactccagtccaggctggacggctgcctgagggcccttcgttaaagacacgcttgtgtcctgggcgatggtaataaaaccagctcatgctgactgtgctgtatctggtgccaggcactgtcctcagcgtctctcattagtgcttgtgatctcccacagtcctgtacatgggggctgtttatccagggctgcacctccagtgcctagtacacagcctggcacatagtaggtcctcaataaacctgccttggggaaatgattcctattcctttgcccagggtcatggcatctaaacgcaagctgggccgtggcgataggcaccccctaccacctctgggctttctctgttctcagcacccttctccctcctggaggctcccagacacaagggggcccaagtcatttccacatcaagcatcccccaccccccagcggtgtctcctttctgagcctacctgcttactcctctgtcccggcaatggccagttcctgaacaactcctggaggtcccctcctcacacccctcacctgaaaggttaaccccatccccctacctcccatctctgccgctcctttcccagcccctctgttcacctctcttcctctttcttatgtggctttctctggctagggcctgggcttctccttccttgtgaccacagccccccagtcccccatggcttcagttgtttctgcagtgagacccacctctgtccccagcttcccccagtgttggtgacctacactggcctcttcatcaccccccatgcctgtacccatgcactgacccaatctgatagtcccactgtcccatcagtgtggtcccttctcccttggaaacgtggtgagccctcgggcttacaagccccaaactccagttatcctggaactctttgctcctcccttacctgttagcgccccctgccggtaaataaatacacacagccactgatcaccaacacctgggcttggcttctagtcactctcctaaccccacaaagccctgccctggtccagccctggcctcgtggcctcagctttcccatttcagacaacagccatgcagagcttcctaaagccaaatctgaccctgtccttcctctgcctagagctctccttggttcccaaagcctcctgtgatctgacccctgccagcttctgtagtcttacaagtccccttgaactcattccaaccagttatgttcccttgggaaaaacaggccccctctctgacctcaagaccattacctctgccttgccccaatcactcattctttaggtctcagctcacatgtcctctgctcaggggagcccgcactgcttccacggcaggccaggcggctcctctgggtccccataacccggggttttcccatcataaccccgatcacctgaagcctggctccccacagtccaaccgcccaggcttcaccgtcctctgccaactcaggcccagccactccagtctctctccctgaaccccatgtaagctgggattattccagttggtaattttgcatcctacacttgtctcaatatgtgtgaagagctatgtggggcatggaagtgtgggagaaagtgaccttgtcacaagtccacccagatagactgccccatctacttcctttctacatcaaagtcaaggtgatcaatcacttccagctcccaagagacccatggaccctgtctttactccaaacaatgaggaagagtggcctagatggcagctgccgtctgaaggcaaatgctccctctggaaacatcgagatggtcatagtgagctttcctaggcctaagcttaaaaaaaatcaggtggaacttcaacggcctggtggaggaggaggggcaatggtgctatcctactccctggggtaccccactgggaacaccaaggatggggagcatcttcctgagtggggagggtgtacatcaaagtggagcttaaacatgacattcaaaacttctgacacatccccctcagagaaaggcggggagccggcttcagtggaccaaggaaggctgagggtggaggggggcatccaggacaatgtccaagctgggggccccactgctctgcttcttggctgcagctgtctctccactccaccctgagaaggctcaggctgggatctgatctgagggccatagaactgaggagctcacagtcacaactctccccccagccccatgctgaccccatggcttgaacgatgttaagaatctggctggacaaattattctagggagcagtttcagaaaagctggttttgctggttgggtaaaaccaaaggccaagcaattggactgtccactgtgtaacaaggggccgcaagtggctgcaagtgggaggatgacctggttagacgggtttcagatagatcccctggctgccatacagaggatggattggagggggacactggggccaggagcctcagaggcaaccagcccgggaagggcccatgtgaggaggcccaggttggggctgtgaggaggaagagccccccaagggccttctcttggattctagctcccctctatcatctgttccctgagggccctggcctctgccactgctcaaagatcatccaaaccttctgtctactcctggcaaaccaggagcctgaggaacaagacatgggacaagtcagtgactggctagcttccagcttgtctacctggctcctgagacagaaccagggcctctgagacccaggtggacacggtattgggagacagttcccaagagagagaaatggaggcagcaacaactttccaaatactgtttacttcactaaaacctggagtgaggcagggaaaaggtacatcaatgtctgagacaccaagcctaggagtgcacattgacaacggcgacatacagggccaaagtgctgagggccagcagccccgttaccactgctcgggccagtagagctgcccaactgcccagcgagcagaggtggacgaaggtcctgcaggaaaatgtcacaataaggaagggagactagataacccaccccactttggacccagccctaaaccccacccaactcactccataacaaaggccttgtagacactgaggaacatcagcaggaggacagctggccggaaggtgtggtacagatcatagcgtgttatcatccagacctgagcagacgcgacgatgtaatggacctagagggaggcagaaagtcggggccaggccttggggaggagtatggccgccagcagaaatgtgtatgtgggagagcacgactgcctaccagactgatgttggagtctatgctcatctggatgtacttccagtcaaactcaatgccccgggctccgacccataggggaatgcagctgaggaaggcaaaggatgggattctccagtactcagacaccttcagcaccaggctttgagcccctgccctccagcacccccgtggaacccaggtgtcccttctcaggggtctgggctccaggctgctgtacgcaccgggacataataagctcagcagtggcccagcccagggcagcaaccatgatcttgtactctcccttgccggcattccgggacatgacaaggtttagacctatcaggtctgccacatccacgctggccttcatgaactcctgcgggtcaggttgaggcttaagtaagcacagggggacagggagccccattcctgaactcccttcccttccctggcccctctcaccccaatgaagtcatagatgccgccttcccaggtgggaaagaaagtggccaagaacagcatctgagaacagaaagcagaaagaggtcacttcaaggtgaggggatcaagataaaccacgtgggatttgtgggaagttcgtgggtaggaagagggcaggacaggttctgggggcccatctggaagaggaaccaccagatggtggcaaaattacaggaatcggggagatagaggataggtccccgggtccccgagggggctggaagtttgagttctgggtgatcacagggcatctgagtcaggtctgaaggtgctgctccttgggcagtgttagcagcacgtacggaatcagtgatcactcttaaccgcaccaaaaaaaacctgttagccaaccacactactgaggttttctcagttttactaagtgctacgcaaaagttgcttctaggtctcttctcaggtcgtgccctctttaaagtccatcctctctaggtatcctgacgcctcccagtgcggagtcccgagggcggtcccaccgtggggcggcgggggcgcggataggcaacgggggcgggtccctgggtctgcagagcctgggggccagaacacgtggcttcccggtggccctcaccttgcagagttggacaaagaggtaggtgactccagcctggacgcatttccagaaggcgttgtactcggacctggagaagcgggaggtgagggtcggcccgggccccgcgccctctccgccccgcgcccttcccgcactcacaggccgctgcacttgtaggtgatgaagtaggggaagtaggcaagagcgaagcagttcccgaagtgaaacagggtcatgatgccggccgcccggtcccgcccgcgcggggatcgcgaggcggcgtctccgggagcgggtctccggctccgccggctctttcgccacggccagggcctggcacccacctgactggcgggggcccgcgcgcgaccttctgggagcagtagtcccggcgcggggcgtcgcgcccagtgacgtcagagagcccgtggccggccctgggtcccaccgctgccggcccagcgctttggggagtgacttccggccatgcggggcctctaccgctgccatcgcggtcccggtctcctgaagtggaacccggcttggagtcgagcgcgacccctcgcccgtgggcgcaggcgatcgagtaagggtggggcgggcctcaaacccggatcagaacccgccctgaccggcgcagagatacgggacgcagccgtgagcactgttttttatttcaccatggacccatcggcgtggggcgcccgccccgggtgtccttcctcccccgggcagccagatgctggaacgggaggcacatgttccggccccggcccctgggaaggaaagaaaggaccttcccgtttcacttgtctcggctgaacatgtagcggaggaggtcgaccacccggtgactgtagccatattcgttgtcgtacctgtggaggaggggtcgggaggttcaagggggttccttccgaccaccccttagttcccctccctctaagtctccagctccttcccccttaccatgaaatgagcttcacgaaattgtcattgagcgcaatgccggccttagcatcgaa

SEQ ID NO: 8276 - DNA, 6000 bp, Homo sapiens
ggtgcagtggctcacacctgtaattccagcactttgggagattgaggtaggcagatcgcttgagaccaggagtttcagatcagcctggacaacatagtaagatgccatctctacaaaaaataaacaaaactaactggatgtgatggcttgcacctgtagtcccagttacttaggaggctgaggtaggaggatcacttgagctggggaagtcaagggtgcagtgagctgtgatggcgccactgcactccagcctgggcaatagagcgagaccttgtctgtctttaaaaaaaaaaaaaaagcatctcccatgtacttcctatcccccattcctgctttattttgctcccctagtagttatcacgtggattttacttagcttgtttgttgtcagaatctccatggaaggcagggaatctgttttcttccctactgtatccccagagcacagctcagtgcttggtgcatagcaggtgctcaataaatacgtgttgaatgaatgagtgacttgaattattaagataaggaacgtgggctgggtatgggggctcactcctgtaatcctagcactatgggaagctgaggcaggaggatcgcttgagctcaggagttcaacaccagcctgggcaatatagcaaaaccccgtctctaaaaaaatacaaaaatcagccaggcgtggtggtgcctacctgtggtctcagctacttaggagggaggctgaggcaggagggtcccttgagcccaggaggtggaggctgcagtgagctgtgattcagccactgcactccagcctgggcgacagagcgagacccagtctcaaaaacgaaagataggaacctctggctcagagagataagaaggatgcagggtcgagaaccgaggtctccgcttctgaggccctggctcttgccacactgtctgactgactctgggccaggaaggaggtgcccagcagggcagaggacagcagccaggtcctggctaccctcaggcccagcacaactcttggccctcgcagaccagacaccagcagatttgatggccagatgaagaggtgccacctgctggtgagggtgtgagggaacctgaggcggggaaaggaatcatctagtaccctgataaagccatgcagacttcaccgcctctaagggcaacaaaccccttcgttggggcaaagtggatacaatgatgattttgaaggtctgaatgttctacatttttctgaatcgggaggataataataacaattctagcagctcaccatgtgccaggccctgttctaagcactttaggcatattcacttgtttaatcctcgtgttatgatcacatttaaaaatggaaaccagccgatgtggtggctcatgcctgtaatcccagcactttgggaggatgaggctgggggagattgcttgagcctgggagtttgagaccagcatggactggtaagaccccgtctctacaaaaaaatttaaaaaattagccgggcatggtggtgtgcacctgtagtcccagctactctggtggctgaagtggtaggattacttgagtctaggaggcagaggttgcagtgagttgagattgtgccactgcactccagcctgggtgacagagccagactcttttttttttttttttttgagacggagtctcgctttgtcaccaggctagagtgctgtggcacaatctcggctcgctgcaacctccaactccctggttcaagggattcccctgcctccgcctcctgagtagctgggattacaggcatgcgccaccatgcccggctaatttttgtatttttagtagagatggggtttcactatgttggccaggatggtctcaatctcctgacctcgtgatccgcccgcctcagcctcccaaagtgctgggattacaggcgtgagccaccgcgcctggcctcgagaccttatctcaaaaaaaaaaaaaaaaaaaaaggaaacaaaggcacagagagttaaagagttaaagtctcttattcaaggtcacacaatgtgaagtagtggacccaagagttgatccaagaagctggctacagagtcgtactttaaaccagtaaactttaccttctctcttgggttctttctgaagccccaactctcagcccatctttagtgagccttccccagccctaacctgacaggggctttcaaagcttggctatggcacattaataaattaattcaactcagtaactcaacaaactcaagtattctttgtggtggaccccatgttttgaggatacagaatgaacgaggtactcattaggtcagccctccagaagacagaaagaagactgacagggccacgtgtggtggctcacacctgtaatctcagtactttgggaggcccaggcggtcagatcacctgaggtcaggagttagagaccagcgtgggcaatatggtgaaaccccctctctaccaaaaaatacaaagattagctgggcatggtggtgcgcacctgtaatcccagctattggggaggctgaggtgtgagaatcacttgaactcaggaggcggaggttgcagtgagccgagattgctccacttcactctagcctgggtgagaccctgtctcaaaacaaacaaacaaacaaaaaaaagacggacaaaagccatgcaacttacagacagggcaggaaaccagcagggggcgcaagagtagaaacagggggcttgccttagaaatggtagtcagaggggacagttactctgagagtttacttgtctctccagtccccacaaaacaaggtaaatgaatccaaattctcttcaggccttgggttcactgggtctgagttgcgatttggcctgagcctcagtccctgcacctgtggaatgggaatgtgacggttagaaaaaaatgagagggctgggcgcggtggctcacgcctgtaattctagcattctgggaggccgaggcgggcggatcacgaggtcagaagttcgagaccagcctgccaacaaggtgaaaccccatctctattaaaaatacaaaaaattagccgggcgtggtggcaggtgcctgtaatcccagctactcgggaggctgaggcaggagaatcgcttgaaccagggaggtggaggttgcagtgagccatgaccgcgccactgcatttcagcccgggcaacagagcgacactccgtctcaaaaaagaaagaaagaaaaagaaaaaaatgagagacatgggaaagccttaaggaatgaggaagggcagtttccatgagagtgtaggtgacactgagggacttcttacctcctaggttgtaggctgggggagttccaggagggcagttccagcccagctgagctgcgctcctgagaggaggagaaccagaaaatcccaaatcagccatttccgtacaatagagcacaatttcatcttatccacaaaagtggcaagagaaaggtcagggaatcctttctcttgaagtcctataatctcgggcaccacctggggtgtctcaggagtggggtggggtgaatgggagggatgtcagttattatagcaacctataaccatccctctagcatgaatgtgtccagaaaaggtagggctagaagccaacagaagctgttaccatgacaaccccttccatagacacactctacctctgagagacattcttaaaacatcccctggccgggcgtgatggctcacacctgtaatcccagcactttgggaggccgaggcgggcctgaggcagatcacctgaggtcgggagttcaagaccagcgtgaccaacatggagaaaccccgtctttactaaaaataaaaaaaaaattagccgggcgtggtggcgcatgcctgtaatcccagctacttgggagggtgaggcaggagaacggcttgaaccggggaggcggaggttgtggtgagccgagattgggccattgcatcccagcctgggcaacaagagttacactctgtctcaaaaaaaaaaaaaaaaaaaaaaatcccctcctttgttgggcttggttcctagggtcactcgaagggggctgctctattatcatagtaaccaggccttgaacttgcctgtttctcaccttccggaggaaggtccaggccctgtaaccatagcaactgcccctcagcagagcatctcctctaaataaaaacacctggttagtttggtgcatgggcctcccacgatgggaaggggaagacggttaccatggtaatgccaactaggtggctatgggggaggggctggggaagaggtgcttctcttagagatcagtgtccttggggctggggtcctttctacctgaatgctaggtgggggggaggttgccatagtaatcaatgaggataggagcagaaggaccaccacggacacttaggttaccttagcaaccttctcctggtgcagagtcctaagaggtttggggctccataaccacaaaggtggaagcgaggggaaggctgctccccaccacctcgcccccaccgctggggaagggttaccatgacaaccaacctggccggcaatcagagaggatggggccactgctggtcgccctttctctcagagtaaaagtaattgtccaggagagtggtgtttgggtgtggaaggggtaaggctctttctctggggcgaagtgggaggaggggggcagaaagcggccccttcctcagtctcactccagcgagggggaccgtcgcgcggggcctgggtctccctcgccctcctcggggcgcgatctcccacccgccggcccccgcgcgggcacgctacccttcggtgtagacccgggtgggcgaggctcgcgctcgccgccggccccccttcctactgtcccccgccgggcgcgcgcgcggtggttgcggcgggggaggggggggggtgttggcgcggccgcgcaggcgcgcgaggcacagcgggcgcgcaggccggccccggggcctccatgatggaggagcgagcggccgccgcggtcgccgccgccgcctcctcctgccgtccgctcggctcaggcgcgggccctggccccactggggcggccccggtctccgcccctgcccccgggccgggcccggcaggtaagggaggcggcggcggaggcagccccgggcccacggcgggcccggagcccctgagcctgccggggatcctgcactttatccagcacgagtgggcgcgcttcgaagccgagaaagcccgctgggaggccgagcgcgccgagttacaggtgagcgctgtcccgggacccccgacccccaacccggcccggcccggcccggcctcacccgctgccgccgccgccgccatcttggagcaatggccgccgggacggccggcgggggggcgggaggggaccgcgacggtcccggagggcgagtgaggggccgtccgaggggtgtcctgagggcactccggggtgggacgggaccgggacggcccgaggtgggagtggagggaccgggggtgggagggatcaccgggaccggccgagagaaaggggcggagggaccacaaccagctgggagtgggactgggactgggactgagcacgctggccgcggggctcctgagagaggcgactcgagccctggaggggaggctaagagaactcgggaaagggtgtggagaggagctggaggggtctgggagacctgagtggtctcctgtgggagtaagcagaagcttgccgggcgccgagggactcccgaccccgaccccgaccatggccctagccaggtgcaggttggaggtgggagcgtccaaggggggaacttgggacccgctgggaaagagcgggtccagatggggaaccgggaggatttagggagaggaagtcgggaacctgggatcggtgtgtttcggggcgactggacggtgggcacggaaggagggctgtgtaaggacccgaggggtgggaggagggtttcaaggggtccaggatgaaggtgtgtgccttcccctctgaggagaaactttggggatcccgggcatgtgtggctgcacagtgcagggaaggg

SEQ ID NO: 8277 - DNA, 6000 bp, Homo sapiens
agtcccagctgtttgggaggctgaggcacgagaatcgcttgaatccggaaggcggaggttgcagtcaacggagatcacgccctgcactccagtctggacgacagagcgagactgtctcaaggaaaaaaaaaagagagagagagagaaagagagagaggttggctgttcgcggtggctcacgcctgtaatcccagcactttgggaggccgaagtggaccgatcacttcagcccaggagttcgagaccagccggagcaacatggcgaggccctgtctctacaaaaaatataaaaattagccgtgtgcactggcgcacgcctatagtcccagatactccggaggctgaggtgggaggatcccttcagctggggaggaagagcttgcagtaggctatgattgcaccactgcactccagcctgggcgacagagcgagaccctgtctcaaattttttttaaaaaatagatgtttattatgcattcatccagtagatatttagtgcgtcgatctactaagcaaggggcccaggcactgggattccgcggtgaatctgagcatccccgcctcccgttcctgcctcgtgattggctgcccttgggccaatggctgaagagtccaccgctctgccagcccccgcggcaatcctccagctgcagcttcccctgttcggtttgcaggcggcgctgtgggctcactgactcctccgtcacacgcagacctggtccccaccctctctgattctttcagactcttaggaatgaatagagtgtataccccagagtcccaccctctttacaaaatccttttgtgaatttttctgcctgtgcaggtttccaatacaggtccagaatcccacgcccgcctcttatcaaccaacaccagcggctctcccgttaatgtgacctccagccattcggcccgtaggccgatgcttgggaaatcttgacagcggcccaagccggcagtcggcacttctctcggtcggttaattgtttactcgtttgtttatttatcctggagtggaggctagccgggtgcgcggaggcggctgcccccagggaagcccgcttcctgtggttggcttgctcaactactatccgccctcttgcgcactggaaaaaattgcagagctgggaatgcaccccttgatggttccgttcatgcagtaaaacaatgcctgggcccctgccttgtgcctggatccgtgctagggacatcgacgatgactgaaacagccctggccctgccctcaggggccttgcagtccgatgggaaagacctatcaccagatatggaccacccaaggtggccagggcttggacgggagacctaaagggactgtgggagcttggaaggagcagctgacccagcctgttgcatcagagaaggcctcctggaagaggggacatctgagctagcatctcaaagaaggctagaaggacaaccatgtagtctctggctaccatgtccccagtgcctaccacccccttgtttagcattggatttttttttttttttttttttttttttttgagacggagtctccttctgtcacccaggctggagtgcagtggtgcgattttggctcactgcaatctccatctcccgggttcaagcgattctcctgcttcagcctccctagtagctgggattataggcgtgcaccactatgcctggctgatttttgtacgttttgtagagacagggtttcgccacgttgtccaggctggtttcgaactcctggcctcaagcaatccacccgcctcagccttccaaagtgctgggattacaggcctgagctactgtgcctggccgactcattcacttttatttattaacaagttttaattgtgggtcattggccagactttggaactagccagggtcccctgccttcagagggctcacacataaaatggtgataccaacacagaacttcatttaatctttttagagacagggtctggccttgtggcccaggctggagtgcagtggcacaatcatagctcactgaagccttgaactcctgggcttaagtgatctttcttcctcagtctcctaaagtgctgggatccaacacagaactgcaaaccttgaaccctgaagaaatgctacgtgtagcaacgtgacccaattgtctgggtttgtgtctcaaacctgctgcttactagctgtgtaacttttctgtaccttataacttactcataaggttgttgtgaggattcagtgagttaatgggtctaaagtgcttttagactgctgcctggcatgtccaggcatggcggctcatgcctgtaaactcagcgttttgggaggctgaggcaggaggcctgcttgaggccaggagtttgagaccaccctgggcaacatagcaagactccatctctaccaaaagaaaaaaaaaattggccaagtgtcatggtgagagcatgtagttccagctgctcaggaggattgcttgagcccaggaagttgaggctgcagtgagccatgactggtccactgcactccagcctgggcaacagagcaagaccctgtctcaaaaaaaaaaaaaaaatccacacacaaaaaaaaacaaataaaaagaatgttgactagcctggccaacatagtgaaaccccgtctctattaaaaatacaaaaatttgccaggtgtggtggcacacacctgtagtcccagctactcgggaggctgaggcagaaaaatcgcttgaacctgggaggtggaggttgcagtgagccgagacctcgccattgcactccaacttggatgccagagtgagactccatctcaaaaaacaaacaaacaaacaaacaaaaaagactgttgcggccaggctcagtggctcacacctgtaatcccagcactttgggaggctgaggtgggtggatggcttgaggccaggacttcgggaccagcctggcccgaacaggtgaaaccctgtccctactaaaaatacaaaaattagccagatgtggcgcctgtagtcccagctactcaggaggctgaggcagaagaatcacttgaacccgggaggtggaggttgcagtgagccgagatcacaccactgcactccagcctgggtgacagaacaagactctgtcttgagaaaacaacaaaaacaaaaattagcggggcgcacgctggtaatcccagactctgcctcaaaataaaaaataaaaataaaaaaagactgttgcttggcacgaagtactcatttttattattaaagaacgagggatcaggccaaatctgggagactaccctgagaaggtgacttcaagctgagagttgaagggtaaatcagagctgatgggctcccaaggggtttgggggatccagagtgagcccaagcgtccttgttctccagatgctgccagctcacaaatttaagattgaaaagactcggaacactgcataggcgttgtaaagacattaatttgaaatacaggtatcaggaattcactgccccccaccttgtctttcctgtgtctcctcaagtaatctcaaaagtcccttacacatcacggtttgtaatgacagtccacgcactcgatttggcagccccgcagtgcttaaagaaaagttgttgttgtttcaagccactaacatctaaaaatcagactgaatgcattaaaagtgcctttttttttttttttttgagacggagtttccctctgctgcccaggctggagtccagtgctatctctgctcactgcaacctccgcttcccgagttcaagcgattctcctgcctcagcctcccgagtagctgggattacaggcgcccgtcacgacgcccacctcatttttgtatttttagtagagacggggtttcatgttggccaggctggtctcgaactcctgaccgcaagtgatccgcccgcctcggcctcccaaagtgctgggattacaggcatgagccaccgcgcctggccctaaaagtgctacattaaaaaaaaaaaaaaagtcaatggaaacatcctttaatataaaaatctttattaatggaataaacaagcccctgtaattttatttatcaacgcttacagagcgcttactatgtatgcaatgcatgatttcaagagctttgcaaaatataatctatttaattttcacagcagccctacgagagaggtacgattattatcccattttatagatgaagagactgatggcagaaatgccaaatgtaataggaaacagcctttcttcatgcattccacaaatattggctcggcgcccgggaagctcatcttccacgatctgtacttccggaggagtcccagaggaacacctcctcagttcagaggagtcaagggttacagcggtgccctctcccatcactactcttttcccttcaggcgccctaattgacattcgatttgtagccatttgcacaatgctaagtgacaggcttgggctgcacacaggaccaggccgtcttccctctcctggggatcagtcgttcacagaaccaaaaacaagttgcatggacgcgcgcgttggctgcagattttcttcacagccaggagaaagagcacgcgctctccagccccgcctcttcttccgggacgacgaattgcggggctcggattgggctgaggcgggccacgcctcctcatatcctccaatcaactccctctctggtgcgctccctccttctcagccccgccccaccgccccacgttacgtcgctccttctggcctcctccgttatcccggcggctgcggctcgcgcggcaaacccacctcccattgcttcccattggctggtcaggtcccgcgcgagcgggatcgcgcccttcgccccccacccccaaaaccgggccatgcctctctccttcggctttctccaggagccagcgcgaggcagtagatcggctgcttgagacgcgcgcgcagctcctgcggaccactccctccgccctgcgccagcagctgcgccggctggcagccccccgcgcacgcgcgctcgcccatcccgctccctctgctcgtttgcaagtcgcctcgcgctcagtcgcgacggcggccgccgcaatagcggcattttcgggggcgcacgcgcactgcaccgtccgcggccgttcctaacctcaggcagcggctgtggcagtaagcccctcgggtgcgcacgcgctctgacctcttcccactgcctcgctggttgtcccttcgcggcgcgcgcccaggggccgttatacccctgcaacggtccacgcgccgcgcacgcgcagtagcgagggggcgcgcgcgcgggagcggccgtcgcaggaaggaggtgccgccgctgccgccattgcgagggagggagggagggagggagtgagcgaggctggtccgccctccccctggttgccgcccctccccccttcccctccccgccccccgccccgagggagagccgcggcgcggcggcaggaggaggtggaggaggcggaggagggaacccgcgagggagggtccgcccggccccccgccgccggagccgccgccgccgcctcagccgccgctggactaggagcaggggaacatggcgccggggcccccgtcgttgctgccgggattttggaggccggggccgcgctgagggcgcccagctggtgagtgcgcgagctcacgggccccgggcggcgaggccgggcgccgccccgctgcggggtccagggggaggcggggacggcggggcccggagcccgcgaacaatggaggagctggagggggaggggaggagcggccccccccccagccccccgggccccgccgtccccgtcgcttcgcgcgtcggcccggcccgtggggccctcctgccctttggacctgcccctgcccgccccagccctgctgtccccgccgccgcccccatccccgacccgttgggatctcggtgtctgcctcggagcctacccgacttcagccaaccggttcccaattctgcgccccccttcccccttccacccctccataatgcccttcgctcctcccgggctctgcagtgctc

SEQ ID NO: 8278 - DNA, 6000 bp, Homo sapiens
agttgccctggaaagaccctggagagcaccggcccctctaaaagggccacccacgttcagctggggacacggacctcagtggaccaccccagaagccggaaatcccaattcttacgtcacatcacccaaatgttaaaagacaagcaacgctctaaaacatctcagcgctgcacaagccaacagaatgccacgcaaagcccgcaagcagacctgacgcaggggggccgggtacaggcctgacgcaggggggccgggggcgggccccggagcctcccgtgtgagacccgtgcaggaagcactcaaaatcacgatgcccaggaccgactccagcgtccccgtgggagccagcctcgctctgaaggtggatgctggatgctggggaccctcattctctcatctccccacagacgcagctcttcccggggcctgcgctgagcctcgggcttggggccaggggcgtgcatgagtccccagctctgtgtccagcaatgtgctgtctgggaagcggtgggagggaagcagcctgctccaacggggtgtctgatgggctgagctgggtgcatggggggacaggcgggacacaggtctcaggtgggaatgggcggggtctcgggtgcagcacaaggaggtgggcacagagaaccagctctgaggcctgggatggaggagccacaggggcccacgcaccccaggcccagcagcctcacccctgctcccctctcagagcctgacatcaccaggcctgctgggagcctttcctctgcccttgggaggcccctcagggacatggcagcaaagacctcgagggagtccttggggctcctgcagtgctgggagcacccctcccctgcaccccacctgtccccacatgccctggcctcccaggggtgactcgaatgtcacccctttggggccgggagatgaggccaactggcaggcacccccgttctccgggcctcgagctcccgcaggcgggatagggagtgagcgaggagggagaagggaaggagcagcagcaagtcagaggaacggagggggacaccagcacccagagctccctgaaggccacggcctcccattccgaagccccgcccatcggagccccgcctcgcgtcagcaccagccaaggccacactgccctctggatcccagcccccgctcgctcggggcccaatggcaagggctctctgtggccaaggcccatctccccaggagaacagatggccttgggtggccccagcctccctcgagggccagggtcgggccgggtggccacaagctagtgtggacacggccctctgcggaggcgaaaccagcaccaactccctcagacccgcgtctgaatgggctgagaccacttgtggtggacgccatggagggcaccgggcatcctgagagaagtcaccagttggcgtgacaggactggacctgaacagtggcctgggcacctgtctatctatcgggggccagacggccaacctttcccctctcgggccatagggctctggcacaatcactgggctcagctgtttctgcgtggaagcagccagcgacaagatgccaatggatgggcatgaccgcgtgccgataaaactttattaacaacaacaggcagagagccagacgtgacctacaggctgcagttagctgtatcccagatgaaggagttttggcaagtctgatggacttgacgggtcctgggagctgggcgctccaaggggtgctaaggttcccacctcacatgggccataagctcaacgagccccacctgctgtgaacggccaccgagccgagaaagccttcacccggcagggccagagtccactcccaggagaggggtgctgtgcacctggccagtgagacccagatcacacccaaacacaaagggcaccgccccgccctgtgcctctcaacagcagcaggaaggaagttgggaaaggactccccagcgagtaagggttgcagctcctccgggtagtgggcccgggggtgaaagcacaccgggaagatggtggtggagggtggcctcaaaggcagcacgctggggcttctcaagggcctgtcctcggcagggctctggcccaaaccacccccagtctctcaggggcggccagagtgacacagaggggtgtgctggctgggcctcgcctaccctgcgagagctggactgtgcttcccagggcgcagatgaggagcatggaggctgaggcagggcggctgccccatgggctcctccgctcaccccgggagcccacggaccagctgggcgaatgccacatacagggaaagctgcgtccagcttcctcactaggagaaagaaaagctggggtccagggaggagggtacaggggaggaggccagtgaaaagaagactcagaagaaaacccaggattgtgggcaaaggccccagagaagcgaggaaagagagaaaggactgcaggggaaagggagggaggcgccaccaaaaaggggccgagggaatcggggaaggaaaacggggtgaacgtcaggaggctgcgaagaacaagaggccacacaaggaaactgggagggactctaggaggctggagagggcgtccgtctggccgtggaacggggagacatctgctcactcgatagacaacatgcattccctgggcggacttgcggggagagaaagggggcccacatctgcccagggacagtgtagggagccgccaacatgcattccctgggtgggttcttggggagagaaagggggcccacacctgcccagggacagtgtagcagccaccagatcacacctgcccggggggctggagggaggccgggtgagctgcaggaccaggcaggagatgccaagagtgtgaacagggtatctcgagctctaggagtggggtctttggggtgcagactgccctggaaaccccacggaagccgctatgagagccgcaggcacgcgtggctacttgcgtttattaccctcaagcagcgctgaaaatcctgccccccggttgcacaggccacgctttgggggctcggcagcctcctgtggctgctggctcctgtgccaggcagcaaagatggaggcgattctacaggatggtgcccgtcaggacccttcccccgggaaaatcccaagcagcacggaaaacgcggtcactgcatgaggagcctctggccttccactcccaccctccagagcctgggccttgggtttatacaccaccactgtggccccagggcgcttcccctggacactgtggacattagggccggatcgttctctggggtggggccgtcctgggcactacagggaattgagcagcgtccctggcctccacccactccatgccaggagcacccgtggtcgtgacaaccacagatgtccccagacatcacccagcgtcccctcggttgacaacaatggctctaagtaaaaaaatcgtaactctggggcaaaatgggacctgaggccaaagtctggttccatctccagagatgggctccccaagggctggcagaagctgggggtccccgcgcctcaggttgagcctgagatgtgacgagagggaccaatccaagagaatccgggctgggaactaagggggccaggagaacaagcggacgggactccttcacagggaaggccaggccttgacttccagggacctgaggggccaggctgaaaagaagaaaaaccagggaccaggttctggaatgtcagggacagctatagccaggcaaagacaaggggatgtggaatggtctagacactggggtcagggccacgacgggagggggcgaggctgttgagtgggagacttgcagaatgcaagggcaagggggtgcgaatttggaaagggaagaggaaatcctggaaagatggaacaagtggggttctgggaagtgggtgtgaggaggctgagctgagggcgtgggtatgcatcaaaggcgggacagaaagggggtcaaagggaaccccaggcgagtggactgaactggggacgtgggaggagaccagggaagctgggctagcagattctgaaacatgactcacgaactgggaccagagagcgtcaggggtctggggacaaatgtgcccttgacgtgggggccggtgactagagcgagaaaattcaggggagttgaatttgggcactggacaaaatgcacttggcacccagggccgtgggagggggtggggaatgctggaccaccgcgtcgggtggctcagcctggcagaaatcagtgcagggacctttaactccaaacgcagtcagctaaaggcgagaggcctgggaacacggacgtgacccagtgaatccagagaccaaccagatggtctccagaacaggaccctgggagctggaggtcaggacgggagcgtctgctcaagtgagcccggaccaggaagcctaaggggcggagggggcccaggagggagaaactcggcaaggcaggcagacgccggcccagctggggacaggagagaggggacttagggctccagggacgcgggacgcttggcccggccatgggttccggggcagggagacctaggcaggggccgggggctgtgggagcgagcgcggggggtccctgggcgctaggcaaggagagcagggattccagggcgcccgggggtccagggcggcagggctctgcctcgcctggggcctgagcatgggtcgggcagcccaggccggagctagggatcggcctggggatcgccgggccggagtggcgtggccggggagcccggggagccccgagggtgggccggggacacgcaccgtagggctggccctgcaggtcgtactgctgcatgcggtacacggtgaactcgtgcgcggcgtcggcggcaggcagcggcggcgccaccagcagcagcacagcgggcaggaagacgatgaagccgagcggcagacaagacgccttcagcatgttctccagcacctcgcccgcttcctccagcatcctggccggcggcggggccgcgcggggcggcagctgggacgggacggcggcggcggcggctcccgcggactcacctcggcatgggtagccgccggggtcctgcgggcgccgcgcggggcagcccgcactcgccctgaggtcctgtgggcaccgcggcgaaccgccccgccagccgcgctgcctgtcgggaattgtagtccgtccgtccggcgctcgcggagccctgtgggagttgtaggcccactctggaactcccggaaggtgcggcaggctgttcggctaataccgttgaggtttcacataaactccaagtcataaaatgcaataaaatgctttaaaaaactatttcgcgatatcactttcttaaccttgtctttggcgttgggggagctagggtgaggggcgaaaggtggggacaggacgtgaccttgcgacctggaaggaagttggggataaagagaaaaggaagtgcctgcctggcgcgctaggtcttctgggagttgtagtcccgtcaaacacacaaagggtcacgggaactgtagtcgtcctggcagaaattgctgagaaaaacaaaaatcacttaaaactcccgaggatgtagatgtcaaactccacgaaggcaaaaacttttgtctgttttgtgcatatgatgtatccccggcatctagcacaagacctggcgcacggcgggtggcctataccatttttgaatgaatgaatgaaaaatagaaagtcatgatagtcagttcctaagggaggccgcagtgggttgtgggacttgtagtctggaacctgcggtttgtgcaggggtcggtggcaggtatttatatttatctttattcatatttggggcatacttatactaaaaaagtatttgttgttcatcagaaatttaaagttaaaacccagtgtctcagggctggaggtacctaaggaacgtccctttgtacagatggggagactgagccccagggtgcagcagacagtagccctggctctcagcacgttatcatcccaggctccgtacagctgcctaaggag

SEQ ID NO: 8279 - DNA, 6000 bp, Homo sapiens
cacagcagggaatgggcagattgaatgaagctccacctctgggttgcgctggccccacctctggagaggccccgccccttctcaggccccacctcctagctgacccattctcaatccacagagcaggcttggtccaattctctccttctctaccagaggtccgctacaactggccccttctgtgcccttgggagtcaggcctttctccaggctctggccagctccagcctctaccatcccttcccagcaggctcctggctttgatctgtcattggctgggtcggcctccaccataagccttcatcctcctgcccatcctctggactctcgctttccacacctcacagcggggtatgccccttctcaaaccctactctcaggaccggcttcctccctagacccacccctttattagagtgcttaggccccgcccctcgctggccccgcccccaactggctagccccgcccccttttctgactcactccttccctgactggcctcgcaccaaatctcaattccttgcttcctggttctaccccttgcccgtcctcctctctctaatgactcttcctcttttccgacttccacttagaagatggctcctccatccctggctgacttctagaccctatgctctaccggccgaacgcctccccaaactctgtccttggtacctgatacctctgatacttcctagctgccacctctccactagacttcgcccctttctttctgaactccattccttttctttttcttttggacagagtctcactgtgtcgcccaggctggagtgcagtggcacgatctcggctcaccgcagcctccgcctcccggattcaagcaattctcttgcctcaccctcccgagtagttgggattacaggcgcccgccacaacgcccggctaatttttgtatatttagtagagacggggtttcaccatgttggccaggctggtctcaaactcctgtgacctcaagtgatccgccggcctcggctttccaaagcgctgggattacaggcgtgagccaccgcgcccaggcccattccttttcaactgacttcttcctgtgctgatcctaggtcccacccctccctcagattttgccatttggggctagtcccttttcgttcccagcccctaacccttccctcgactcgcctttactacagacccttacctgcaatgaatgggcccacgtcctccctatactctgatcatcgaggactggcctctttctgaccctaaaggcccagcttaccctatagaccagccccctccaagtcagccccgcctctaatctagccctaagccctgcctaccatctgggcccaccttgtcccagactcggacccacaggacagtccccgccccctctaggccccgcccccgctggctgtcccagtcccgcccctcagcggctgtccccgcccctcctgtggccccgccccgccccggtcgcgcgcaccttgggcgtgagcacgagcgcggcgccgccgtgcacggccacgatgggcagcgaggtctgcgccgacaggaagtcgaggatgggcgcgacggcgggcgcgcgcgagtcgtcttcgaagaccacgccgtgcacgcgcaaccccgacagcaggtcgcagagctgcagcacgaggctgcgcgggtccgagccgttgagcaccagcgccacgggccgcacgtctaggcccgggctgcgcaccgccgccgccacggccgggcccaggcgtgccgcctcggccgcgtacgcgggccccgagaacacgagcgccacgttgagcggccgcgccccgccgaggccgccgccgggcccaccggccccgcccggccccggcgcctcctccgggaacgggctggcgcaggccagcgccagcagcagcagcatcttagcggggccccgagggccgcgggggccaccggcgccgcgcatcgcctgcgggccccgccgggcggcctctgagcgcccgggccgggagagacggggaggagagggaggcacagacgggagacgcagggacagggagacgagataaagagacgcacagaggaggagatgcagcgagggacaggcgccgagatggggaggacagggagcggtcggggtgatggaacagagggagagacaggaacggaggacgagagagatggaagggagagagacagagggagagagaaatggaggagagacagagggagagacgggcagaggtagagagagatggaggggagagagagggggagacggagagagagagatggaggagagacaggcagagacagagggagagacagacacagcagagggaggtggaagggagaggtggggaagaaacaccagaggaagaggtgaaacagggagagacgcagagatagggcgagacagagataggaagaagtggagtatgggattgggggagacgcaaagacgagggtggataatggggtcaggggaagatacagaggtaagaggggagagagaggaagatagacaaggtggggatggggacacccacagagatgggatcaagataggagcagagagaggcccagggagacggggagggaaagagcggcaggaagaaggagagagacggaagcagcagagacggggagaagacggagagagagaggacggagtgacagaaacaggaatgagggaggcccagggagaggatgatagaggcgggaagagatgcaggaaggcgggagagataagcgaggcaagaaagttggacagagaagaagacagcaaggcaggaagagggagacagagaccccaaggccaccaagagacacgcgcacataaaggatggggaaacaattgagattgagggaggcaggcagagcggagcgaaaacaggaggacagaaatagcgaagcaaggccaagatcgggacccccaccagggaggtgcccagtacagacatgaaagtaaggcggggaaggcgagtggcaggagggagcagaaataaaagggaggaaaagggagagaaaaaatgagagggaaaaggggtcaggtgtgtggggagagaaagagagaaattagtggggcaccccaaggagagaaaatccccacatgaccttactcctcaccctgaccacaacccctaacccattttgtccccttagtcctgtccccatcccctcattctcaaagcaagggagtcatggccccatctgggatgtggggttggggggcacagctgtggagagctgggtggggtgggtgtgggggtccctggcacccagcccagagcaatttggtaaattagaggaaatacagcctctcttcctgtgccccctgttgaatactagccgcctggggtggttgggctgggagccaggctcctgggtcctgcctgggactgagggaggagggcactgggagtctggactcctggttcccagagaaggactggagtccgcactaggggcttccagaaggggtgagggtccagacaaggaagggttctctcctggctgtcatgctcctgtctggttgccatggtagcgcaggcctcgtccaccccacagacagccagggcgggggaaaggtccaccacccctcccctgcctcgaggccacagcccgtcccctctgcccaccacctcaccttcccagagatctcgggcccctgtctccccagggaaggggttgggggctcctagtatgcccatccctccccgatcctggcttctcttcgctcctcctttccattgcccttccccaagcagctggctcaatcagcgctcagaataacccccccactccgccccaaaataacccacagctgtggcctggcccccgcggggttaacactcacgctcccctccattcccagtggctgctcaccctccagcccctcctctgcctctcccagacccacccctacctggcttctgctcttagggaccccgcgtcccactccctactgaggcccaggagggcagcccccggccccacccttctcacgggggctgcatgctcagttcctaaccacagggattagggagagcagcctcccccactccagggcctgaggaggggcatccccagtcctccaggactctgaaggcccaacccccagaacccacgccctcagggatcacagagtccagcctctggacaaccccccgctccccccgcctccatctctacctcctcatgagcctccgtttccacttccatctgcatagggctaaagtccccaacactcatctcctgccctgtcagggactcaggagactgagctcccagcctgccttcctcagacggaagcgctatcccctacctcctcccgtaaagacccaggagtccttctggcagccccttcctcccccaggccttgggagtctgggcattcggtcctgttctttcccaggacccaggaggccaggcccctcctgccccaagactctggaactccagtgcccagcctcctctccctgcaggaaccaagagtccaggtccccagctcccctcttcccccaaggacccaggagtccgggttccggctcctgtcctcccttaaggatccccttttggtttcaaaccctatccttcccaacatcctgggtgcccccccaccgagctctggcctccctagtcaccccacttagatcctgtacatagcacagcctgtccccaagcggggaggaggaggagggtgccagaaattcctagggtgtccctgtcttcattgccccccacagcatccaacagagaagagaggagcggccacttcgatcaacagctccccccacaacctcgagttgtgctgcagacggcatcccgtttcctcccccctcacctcccaacacacacacacaacatcggtctctccccacccgaatcctgatgcttggaagaggctggaagggtgttccagaaccttgaggaaggggtgggagcttggggcgaggggtgctgggggcctggatgccctcaaggtccttggcgggggtattaatagcagactcatagctctgacatgggaggggagagcgagaggagagagggagaggaccggctcgcgatggggggactgatgcagggaggggggtacagggagaaggtgagatagagagatggaggcacagggatatggggcatcaggtatgtggggatggggagagggagccaagtgtcagagaaatgggggcgtgaaaggtctgaggtgtagggactcaggaaaaaggggctcagagagggagagagagagggtggaggagagtccctgagggacaggggagctaggtgggggtcaagacccctgcccaccgttcaaaccccctccctccacgaggcttcttgccaacttcctctgtcctagatttgggggtccacattcccaccaccatccctgcatcccctgtccccgccttaccttttcatgaccctgttctgttggggggatggcgggggggccaggaccggaacccggcgtccagcgaccccaagattccgaggagggctcagagagccgatgtcggggggcaggccccggggcggcggcagtggtggtggcggcagcagcggcagcccggacctcctgtctgtccctggctccgtctctccttcctcttccttggtcctgtcctgccctgtctctcccccaaggttgcggccacctggactaggcgaggacgtggctacacatgttgctctggaagttgggccccggacattgcagaggctgtcggggtgtcctcttgccgccccgaccccgtggggatcccccctccgcccacccggggtgcccccctctgccgcttcagccccggctcctcccccctttccatgtgtccagtcccgcctctccctggctcactcgcacccccgctttgtgccctcagcccccccacccccccttccagcgtctgtgtctatctgtctgtctgggtcacctctgaagctagtggctggtgtgtgcgtgtgaggagcgggagattgcctgcttggggaactgcttgccccttcctcgcttggccacc

SEQ ID NO: 8280 - DNA, 6000 bp, Homo sapiens
gtgcagctgtgcagccctcaggaagctacagcccctctctgagccctctcctctgccctgcacagcgctctcacagagatttgggccaaaagtgtcaatgcatgtagacacttagcacacagcacacatgcaatacatgtggaacattattaggtgaggctaaggcagagggggcatttaggctcaggagttcaagatcagcctgggcaacacagagacgccatcgctatttttaaaattaaaataaataaataataaaaataaaaaagaaccattactagatgaatttatccttggtgagctgatgtgatttattgattgattttacttgagatttttgatacatagatccatgatttaaaaatcaaaaggaaaaaaaagctaggtgcagtgggtcacacctgtaatcccagcactttgggaggccaaggcgggcagatcacgaggttaggagattgagaccaacacggtgaaaccccatctctactaaaaatacaaaaaattagccagacgtggtggcgggcgcctgtagtcccagctactcaggaggctgaggcaggagaatggcgtgaacccgggaggcagagcttgcagtgagccgagatcgcaccactgcactccagcctgggcgacagagtgagactccgtctcaaaaaaaaagaaaaaaaggttccattttattctgttttccccctgctcttgatgtttttcattcgttttgggagactcttggactatcttggatactatctctttaaacactacgtctgccccattctttctccttctgggattccaattacgtgtacagtgaaccttttcaccatatctcagatgattgttatactcttttctgtcttttccatccatttttttctctcattttctttttctttttttttttttttttgagacggagtcttgctctgttgcccaggctggagtgctgtggcatgatgtcagctcactgcaacctccactttccgggctcaagcgattctcagactcctgagtagctgggagtacaggcgcttgccaccactcccagctagttttttgtaattttagtagagatggggtttcgccatgttggccaggctggtctgaaactcctgaccttaggtgatccgcctgcctcggcctcccaaagtgctgggattacaggcgtgagccaccatgcccagcgtgttcagtcttttgtgatatcactggggagtgaatgagtgaaaaaagcaggaaatattttggtggtattatgcaaattttgtattatgatgagggtgccttggaagaggccacagtttgagaaggtgctgctttatggtacagcctttggtaatgttaatgcaagtccagtggttagcctcattaccaatatgctgctgaaccacccgttagcttttattgttttttgaaacaggatctcactctgttccccaggctggagtacagtggctcaatcacttcatggcttacttcagcctcgatctcccagacgcaagtgatcctcctgcctcagcttcccaagtagctggaactataggagtgtgccaccatgcccggctaatttatttttttgtagatatggggcctcactgtgttactcaggctggtcttgaactcctgacctcaggtgatccgtccgcctcggcctcccaaagtgctgggattataggcataagccactgcacctggcgttgagcctcttattagcggctttctgcttggtgtcttagcctctgatgccctgcctcgctcaaagctcaggagttggccaatttcacaagcgcactgagtgtgcaccgcccaccttgccctcctgcacttatttccctttgctttgacatcacagccccttgaatccgagctgccttggtaaccctgagctcccattttgctttccccacccaaggaagctgctgaaaggtcgaggtggccgttttctgccctccccatggggaaaaggtagaggccagaaagggctccctccagaaagggcatttccctcctttccaggagcttgatccccaaaatcctggccgctctggttggtcaccagtgcttccaacaactggtttattcttttctttggattttattcggtttacatagttcatggcaggtgtgttagtcggatataaacattgctgggagtggacagcagcactagtgttgttgttgtttttaagagacagggtctccctgtgtttcccaggcttgattcacactctcgggcttaagcgatcctcctgcctcagcctcctgagtagctggagttacaggcatacaattccacacccagctagcacctagttctttaacttgcttttttggttaacttgcttaatgatttagcttggagatctttcctcatctgttcataaagagcctcttcattctttctcacgtccgcatggtctttgatgggagagccatcactggtttaattagatggtttccagtgtgtcgctaccacggacaatctaattatacatgtaagtttgttgatgtgttcatgtatctggaggttaaactcctgtagtgccaaatcttttatgtggataaacacttgtcatttggagagctgtcacctgattgccctcggtggcgttgtgccggtcccctcctcacggcgtgtctgggaagagcaagctcgttttagctgcacagcctagaagccgtgggcagacctgggggaaggggcagggctctcccctcccatgctggccctggcgtcagatgccacgtcacacctgtggtctctcccaggacacatttgacatccggatcctgatggccaagtctgtcaagtacacggtgaacttcttagaagccaaagaaggagatttgcacaggtactggcacccacactccatcctcccaggcctggctcaggccgaaggtcagggccacccctggctcccgccggcatcctgccgtcccagggcagatggtgggcgggggccccaggcctctgcacctggcaccccctcttctctctcggcagcgcctgtctggcttccccagcagccactgccctttgccttccaggatagaaatcccattcaaattccacatgctgcattcagggctggtccacggcctggctttctggtttgacgttgctttcatcggctccatgtgagtgccgcagagcagcccatgctgcctcctccccactcccagggcttcctgcagctgcaacctggctgggggggtggaacatggctccaggttccaccatcccttccaatgggagtgagagcctgtctcggagcaagagactgttgtgggtggggtgtgtgtgtgtgtgtgtgtatgtgtgtgtgtgtcctgtgttcccagtgtctgtccctcatgggtctgtgtctgtctcttggcacatgtcagggtgagtagggatctcgtggttgcgggcccctcgtgtgtacatgtatgcctgctcatgtttgtgtctgggactgcctgggggccagcctgtctctgctccagggtcccaggggtccctggcagagggggcaggtgcttggggaggactcaaggcatacaaggtggtggctccagtggtggcgccggcccagtcaagtatgtgcctgtccctgctccacagaatgaccgtgtggctgtccacagccccgacagagcccctgacccactggtaccaggtgcggtgcctgttccagtcaccactgttcgccaaggcaggggacacgctctcagggacatgtctgcttattgccaacaaaaggtgcgactgctccctggggctggtggtggtgggcaggggtccatctgcccagcagctcatgccacggcctgcaccctgtccgcagacagagctacgacatcagtattgtggcccaggtggaccagaccggctccaagtccagtaacctcctggatctgaaaaaccccttctttaggtaggaggggccccttgcctgcacaggggggcgccccggccctgcaacccccttgcccctgcccatggctctgtctctgccatagatacacgggcacaacgccctcacccccacccggctcccactacacatctccctcggaaaacatgtggaacacgggcagcacctacaacctcagcagcgggatggccgtggcaggtgagcagggcccaccccaatgcccagccaacccgggaggccgccctcgccgcaggcctggcccctctgcctccagccctgacgtctccctctctggacacagggatgccgaccgcctatgacttgagcagtgttattgccagtggctccagcgtgggccacaacaacctgattcctttaggtgagtgtcccccagggccaggggcagcagggagccatgcccaggactgcccaggggccgggaagggcctgtggtgaccagggtcggcctctgcttggtcctttcaccttttcctcttcctgggggctctcggccgaggctctccgtcctctctgcctcgctctgcagcctgctgctgtgcatgggctgggtggctgggggcggtgacgccgtctcccttccttctttcctccctctcgctgcgcagccaacacggggattgtcaatcacacccactcccggatgggctccataatgagcacggggattgtccaaggtaacgagggtggcgggggcagggcccgtgggggccgagctagcgtgtgagtcgccatcctctgtccggccgcccgcctgccctcttgcctgccctttctctctctctgtgactctgcctgggggctgggcgggccagggcagcccctcactgccattgcctgctccacagggtcctccggcgcccagggcagtggtggtggcagcacgagtgcccactatgcagtcaacagccagttcaccatgggcggccccgccatctccatggcgtcgcccatgtccatcccgaccaacaccatgcactacgggagctaggggcccgccccgcggactgacagcaccaggaaaccaaatgatgtccctgcccgccgcccccgccgggcggctttcccccttgtactggagaagctcgaacacccggtcacagctctctttgctatgggaactgggacacttttttacacgatgttgccgccgtccccaccctaacccccacctcccggccctgagcgtgtgtcgctgccatattttacacaaaatcatgttgtgggagccctcgtcccccctcctgcccgctctaccctgacctgggcttgtcatctgctggaacaggcgccatggggcctgccagccctgcctgccaggtcccttagcacctgtccccctgcctgtctccagtgggaaggtagcctggccaggcggggcctccccttcgacgaccaggcctcggtcacaacggacgtgacatgctgctttttttaattttatttttttatgaaaagaaccagtgtcaatccgcagaccctctgtgaagccaggccggccgggccgagccagcagcccctctccctagactcagaggcgccgcggggaggggtggccccgccgaggcttcaggggccccctccccaccaaagggttcacctcacacttgaatgtacaacccaccccactgtcgggaaggcctccgtcctcggcccctgcctcttgctgctgtcctgtccccgagcccctgcaggtccccccccgcccccccactcaagagttagagcaggtggctgcaggccttgggcccggagggaaggccactgccggccacttggggcagacacagacacctcaaggatctgtcacggaaggcgtcctttttccttgtagctaacgttaggcctgagtagctcccctccatccttgtagacgctccagtccctactactgtgacggcatttccatccctcccctgcccgggaagggaccttgcagggacctctccctccaaaaaaagaaaaaaagaaaaagaaagaaaaaataaatgaggaaacgtgttgcagcacaggcagttttcttctccttctgctcccctgtttctcatacccccaaact

SEQ ID NO: 8281 - DNA, 6000 bp, Homo sapiens
tttactcagaaggctgaggtggaaggatcgcttgagcccaggagctggagttgcagtgagtagagatcgtacactgcaccccagcctgagggacaagagtgaaactccatctcaaaaaacaaaaaaaccctaataaaaagattgagtgcctaatctgcaaaagaccaccaccaaatagtgactgcctaccctctcttaaggtctccatgcagttcccatgcgtaacactcactacttttggagtttctaatcaaggaaagggtgcagtttgaaatggcaatcccaataccctgaaattgtgatcacatctcctgagggacaaggacccctctgcccgtgtgagaaccatcccttatataaagtgattcttcacagaaatccctcaagtcctgcgctgctctaatgcatgtaaggtgtggagagcactattcacagcaccattccagctccaaggccaccactgaactacccacatgactcaagctctttctgtctctagcgctttaccagcaaaaccagcgcaacctgtatgcatggtagctcagagggacactgtgacaatcaacaaagaatggcaaaacaaaaagcagctcatctagggaagcagtactgcatgtggctaagagctggggtcaccatgtcgtcactaggcctcggtcctatggaggctactacctacacgcttacagctttaaaagagactcttaggccgggcgcggtggctcacgcctgtaatcccagcactttgggaggccgaggcgggcggatcacgaggtcaggagatcgagaccatcccggctaaaacggtgaaaccccgtctctactaaaaatacaaaaaattagccgggcgtagtggcgggcgcctgtagtcccagctacttgggaggctgaggcaggagaatggcgtgaacccgggaggcggagcttgcagcgagccgagatcccgccactgcactccagcctgggcgacagagcgagactccgtctcaaaaaaaaaaaaaaaagagactcttagcacacagtgaggcaatgatgtatttttctaccaataattttattgagaagggtagagagggggactgattcactcctagccttctactgttcaggctttaaaactagcaaaccagagccaaggctgagaaaacctaggcatcataatcattacagactagcaaagggacaatttagctttcaaccctatgactgcaaaatatggtaatggggaagtccattggagaaccccccctcccaaaaaaacaagcaagctaatctttgcaggctagtatctctttccctaaccagaataaaatcaaagagctgagtgaaagcaaaggcctggcagcatgcattcaaataatccaaaaccctgtcttctaatcttgagctcacaatctgacgtgtctccaaaatcctttttgaataaacaatcactctttaaagtacagcaaacactcaaatgcattgtatagagaatctgatttaaataaaacaattcaaacggctgtttactgagtggttaccaaggtagtatcatgaaagcagcaagctgcctgggagtcaggagggcctcccctggagtctttaggtcaggttcctgaacctgggtttaagtgtttaaaacgaaagttttcttgattgtcaaatggagtcaactctaacagtacctcctcaggaatctaccctaaatatatatttttatttttataaataaccaatccatctgtttcttattcacccacaaaattactcaggaaggggccaggtgtggtagctcacgcctataatcccagcactttgggaggccaagacgggcggataacgacgtcaggagatcgagaccatcctggctaacagagtgaaaccccatctctactaaaaaaaaatattaaaaaaattagccaggcatggtggcgggcgcctgtagtcccagctactcgtgaggctgaggcaggagaatggcgtgaacccgggaagcggttcacggagcttgcagtgagctgagatcgcgccactgcactccagcctgggcaacagagcgagactccatctcaaaaaaaaaaaaaaattactcaggaaggggagcaggttaagtcatttattttatatatgatactacatttaaaaaaattttaaaaacctatacattcccctaaaatgaacttttttttccctgactataccctaactctgaatctttgctgactttaattggaacagacttctcatcaaaattaagcaaatcctattctcacacccaggagagaagtaactgcaaaacaagatttccaacctgggttcccagatcaagcttgctagctcactgcatttgtggtctactgcacactccactcctggtagagaaagaattccaaagaaccaagtttctatttttctcctgtctctcaaaggctttcaagataaaaatccaaattcactgcccatcagctggctgccagtgctccaaccttaaaactctatagcaacttcagtgttcttgtttgtttgtttgtttgaagaaggagtatcgctctgtcgcccaggctggagtgcagtggcccaatctcggctcactgcaagctctgcctcccaggttcacgccattctcctgcctcagcctccccagtggctgagactacaggagcccggcaccacgcccggctaattttttgtatttttagtagagacggggtttcaccgtgttagccaggatggtctctatctcctgacctcgtgatctgcccgcctcggcctcccaaagtgctgagattacaggcgtgagccgccgggcccagcctgttttgttttttcttttttttggtagagacagggtttcaccatgttgcccaggctggtcttgaactcctgagctcaaatagtcctctcacctcagcctcccaaagtgctgggattacaggtgtgagccactacacccagcacaacttcagttctcgataaagcatacactcaaatctctgctctttggatactctcttccctgcccctccccaaccatcttcttctcctccacttccacacgtcttcctgtcatggaggaacaggtccctgcccccagcaggtggcggaggtcacctcctccattctttctaccaagcaactccactaacttctatcacagcataattaccttatgttatggtaattacataacatacataacatacaaatatgttaatggcctctccactctgcatggagtgcaaaagtataggcttctaaagagatttccttaagacttgtaatgaaaaaaaaaaaaaaaagttttccacaggccctatcaaaaatatccaagtgttgccagcttcctaaactatcctctatgaagctagtactagactttgagactttgagcctctttctcacaacggctattttattctacaattttcaggttccaacagtccacatgtatttgtaaaatgactcagtcacaaaatgactatttgaaaatggacaggggaaaagggaaaatttgtaatctattaatttaccctatcatctagcaaggttctaccagcactccttcctgcatacggtaaataaatttatcttaaagccctccaaataccaccctcagaaatcctaccagcttccgtagatagacgctgaaaaagtcaaaattaacacattccttcccagagttttcaatagtaaaatgctgggaatagaggaagtttttctcatttctaagggccagtaaccatggtattttatttctccctacttaaggagggaaagaatctggaattttctccggatttattatctaccaatatagctagcacttagggaacgttcttaacctaagcgctcaactaggcagggcgcagtagctcatgcctgtaacttcagcactttggaaggcctaggcaggaggatggcttgaacccaggagtttcagaccagcctgggcaacacccggagacctcctctcttcaaaaaattagccgggcatggtggtgccgcgcctgtgatcccagctactcaggaggctgagatggaaggatcgattgagcccaggagttcgaggctgcagtgatctgtgatcgtgccactgcatcccagcttgggtaacagagggagaccctgtctcaaagaaaaaaattaaatatataagtgctcaaccgcattcacttttaatctccataaactaagcttcacacattacaatatgaggaaggcaaagtcacagacagaaaggaaagaaaacggagggagttagtatttaatagctacactttctgtttccgatgatgaaaaagttctggacatgaagcagtgacggttacagcacactgagtcagtatactcaatgccactgaattatacgcttaaaaaatggttaaaatggcaaagtctacgttatgtctattttaccacaatgaaataaatgtctgggaaattcaatgtgtacccaggcttccccttccttcccggccgctgatcttggagccaaaacctctctgtctctcttaagtgtctgtaatcagaatgaatgagtttcaccggggcacaagtcgatgcttcctcctttaaagaaacttttaaaagccaaggagtcaaagagccccaagcaggactcgaaaagctgatgaagtctggaagtaaatgaacccgcctcctgacagaacagcttccccgaaacacgggaaaaaggggattcctcccccgacttcgtatctgtctgcttccgagggtgaacgctaagcagcagatcccatctctccactaatacctgcggcgcacccggggaggaggagcgggaaacggcgagggacttgagccagggccagagcgtggggcgaggggcggttccgagggaggcacttcccgcggagcgcggtcggcgcgcggggactaaggggcggggcaggaggggagccccccgacccggcttcgcggcccttcctgacgcttccctcgctcggttaccgttgactcgggctgactgcgcgcgaggcctcccgggcgcgcaccctctctcctccccccacgttacggatcagaaaacagaccccgggaggagaggggacggggggctgaaacccggcccccgaggtcaccctcccggggagcggtcgggtaggcctcggaggctctccggtccgggcccgcgccatcaacccccatgcgcagcagctgggcctgaggcctcgactacggggttggccccggcctggagggactgagggtggcgaggctcgaggcccggtgtaggggacgattctggaggctcccccggctccccgctcacggccctagacgccgctaccctgagcaggcggtacgggaacagccggggccgaggccgcgccggggctaggccgccaacagacctaacggagccgccgcccgcgtcggccgcggagaggaacccttacccgtggcaaaggaccgtgggatactcaccccttagggcccggagccccgttgccgctcggcacgccgggcgcgccgctctcttcctccattttgatctccgtcgccgccacctccgccgccgcttcgacccctgccgccattttctccgcgtctgggctttgtgtgagcgaacgggctgcaccgcgctgcgcctgcgcgcccacgtgacccgacgcaaccagtaacacctgcgcccgccgctcccggctgcctccttggccccactcgccccgggccacgcccccgccgcgcgcaggcgcagaccggcagctgttgatcgcttctctctcgagatacactcgcgttaggcaccgactggctgttcccggcgcgcgtcctctgagtccgatagaggaggcatctccccaccccaccccacacaaacacctagacctagtcactctcagctttctgtaaccagagctggagcagaggggaagcaatgatcctgtctagagattcctggaagttttagatgaagcttgttcaacccgcggtccggcacacgattcgtaaactttcttaaaacattgtgtctttttgtgtgatttttttctt

SEQ ID NO: 8282 - DNA, 6000 bp, Homo sapiens; identical to SEQ ID NO: 2031

SEQ ID NO: 8283 - DNA, 6000 bp, Homo sapiens
catcagcagagcttcgccaccacctccacagccctagagaccatccagatgagaacaaggatgtttccacagagaatgggcatcatttctggagccacccagaccgtgaaaaggaggatgaagatgtctccaaggaatatgggcacctactcccaggccacaggtcccaagaccacaaagtcggagatgagggtgtctcaggtgaggaggtctttgcagagcatggtgggcaggcccgtgggcacagaggccacgggagtgaagacacggaagactcagctgagcacaggcaccacctccccagccacaggagccacagccatcaagacgaggatgaggatgaagttgtgtccagtgagcatcaccatcatatcctcaggcatggacaccgaggccatgatggggaagatgatgaaggagaagaggaggaggaggaggaggaggaggaagaggaggcctccactgagtatggacaccaggcccacaggcaccgaggccatgggagtgaagaggatgaggatgtctcagatggacaccatcatcatggccccagccacaggcaccaaggccatgaagaagatgacgatgatgatgatgatgatgatgatgatgatgatgatgatgatgtctccattgaatatagacaccaggctcacaggcaccaaggccacgggattgaagaggatgaagatgtctcagatggacaccatcatcgcgaccccagccacaggcaccgaagccatgaagaagatgacaatgatgatgatgatgtctccactgagtatggacaccaggcccacaggcaccaagaccacagaaaggaagaggttgaggctgtctcaggtgaacaccaccatcatgtccctgaccacaggcaccaaggccacagagacgaggaagaagatgaggatgtgtccactgaacgttggcaccagggtccccaacatgtccaccatggccttgtagatgaggaagaggaagaagaggagatcacagtccagttcggccactatgttgcaagccaccaacctcgaggccacaagagtgatgaagaggacttccaagatgagtataaaacagaagtccctcaccatcaccaccacagagtccccagggaggaagatgaggaggtctctgctgagcttggccaccaggcccccagccacaggcaaagccaccaagatgaagaaactggccatggtcaaagagggtccatcaaagagatgagccatcaccccccaggacacacagtggtcaaggatagaagccatttgaggaaggatgattctgaggaggaaaaggagaaggaagaggaccccggctcccatgaggaagacgatgaaagttcagagcagggagagaaaggcacccatcatggcagccgggaccaggaagatgaggaggatgaggaggaaggtcatggcctcagcctgaaccaggaggaggaagaagaggaagacaaggaggaggaggaggaggaagaagacgaggagaggagggaagagagggctgaggttggggccccactgagcccagaccacagcgaggaggaagaggaggaggaggaggggctggaggaagatgagccccgcttcaccatcatccccaacccactggacaggagagaggaggctggaggtgcctccagcgaggaggaaagcggtgaggacacaggtaagtggcctgggctggtgtgggtgggaaggaaccgagtcagcctgggtcactgctgccctcctgtccccgcaggtccacaggatgctcaggagtatgggaactaccagccagggtccctgtgtggctactgctccttctgcaatgtatgtccccagcccagatccacccaccaaggtgtccccagaatctgtcccaggggccctggggtggtgctgtgggagggctcagagcaagggcaggccagggtcagttctgaaagaaaagagatccttctgcaggcatgtgaggtgaggacagactgaaggctgggaggctggggcagtggtccaggaaggagaggacaagacccaagctgcatcttggggtgtggggacagagacaggggtctgtggcaaagagagtcgggggaaggagggatggcacaggggctgataggctagggggagaataggcagagagcgggtggagagagcacctgagcccaccctgacagggagacatggggtcgccctgagatagaaaaccaggggcagggccgggtgtggtggctcacgcctgtaatctcagcactttaagaggccagggtgggcggaacacgaggtcaggagatcgagaccatcctggctaacacggtgaaaccccatttctactaaaaaatacaaaaaaattagccgggcgtggtggcacgcacctgtaatcccagctactcaggaggccgaggcaggagaatcgcttgaacccgggagacggaggttgcagtgagctgaggttgcgccactgcactccagcctgggcgacagagagagactccgcctcaagaaaaaaaaggaaaaaaagggaaaggaaggaaaccaggggcaggggaggggaggggaggctggtttggggggcagatacagagctcagtgttagagataaagagggtagagtctggggaagcgtccagggtgcaggggtgggccaggggcgggtacctcccaagtggcgttagagtttccatctaaccaggctcccccggtccccagcgatgcactgaatgtgagagctgtcactgtgatgaggagaacatgggtgagcactgcgaccagtgccaggtgagacctcacctcacactcaaggctccactgggcctcaggatgcaccgggaccctctgaggacccccagccctaaatcctggcctctgacccaaccccttacccctgatgcaaccttgactccacaagcgatcctgactccaaccttaacctagacctagcctctggtccgggtctggtcccggccccatcctaactccgcccccggccacgccccacgctcactctctctccccgtccccgcctccagcactgtcagttctgctatctctgcccgctggtctgcgaaacggtctgcgctccaggtgagcatgggcggggccctggaaaaacctgaggaaggtgccgggcccagcgtggtgaatcctggtgggggcggagcctggcccggtaggctggtggggcggggctaagaggggaggcgtggccaaggctctgagcacgtgggccggggcctggctcgaggaacaccaggtggagttgctggagccaagggacagaaatgagtggagggttgagatgcgggcttagagcctaatgggcgaggccaactcaagtaggaatcgaaggggcggggctactggagaacggaatcacccagaacgaaaaaggggtccggtagaagggattcagttggaagaaggaattagggaaaaggaggtggagctagcactaatctcgcacgctatactgagtggctgcctaattttgctcgtgcagtacccctcaagcctcttttctctgctgtcccacaggaagctacgttgactatttctcctcgtccctttatcagtaagtgtgtaaaaggggagcgtgtaaaagccccgtttagagaagtgcttgtctcgctatgagttatcagatgactctgggactccatttccccgtccatgaaatgggcaggttaatgatctctaagcgtcctggggtgggctttgaacaccagctgtctaacttctggcgttctcgtctccagggccctggcagacatgctggaaacgccggaaccctgacccagtcgctcgactgcgacgcaggtgtacctccccctgccttccaacccctttccacgagctatatttatttctccgaataaacgtgctccccgaaacctcattgtcagacgtggggtctgggaatctcagggcatcggggaatgcgggtagggtctagagacctggacctagacttgagggatgaggggcctggactcctggctcgaggtggttggttgaacagccccccccccccccgcaaaaaaaaaatcagtcaacaaggaagctttttgaaacagttctctttacccgtgatcactgagtgacgcctggggcggggaggccgaccgagagtcgggggcgagggctcccccaccgtccccctgcccccacgccacgtcgcccagcggcatcgtggaaagaggattctcccatgcaaaccccggagccagaggagaaggggaagcgccattctgcgccccctacccccggggcacggacacggccacagcacggggggcggtgaggccccggggacacgagacacgggggagggagaggggaacccgcccgcagatgacccgggggaccggcgaccggacgcggcggggcggagctgagtggcacagggggcgaggcttgtagcagcgagtcccccctcccctcctttcggacgaagaaggaagacttgggccccgcgactgggcaggaaaaaggggagggagcagcctctccccgcatgcggcccgggagggaagccccgcccccttcccgcgggtaaaggacacccgtctcccaacagaaactgatcaataaattacaaagtagagaaaaggaaagcggacgtttggggcgggatttcttcctccccgcttcttccccctctcagtccagttcatgtggtttggtccaggccccggccctgtgcgaggcgggcgcgcgcactcccgctggtctgtacagatggtccagtcctcggcgcgagctcccccgcccgctctccccggcgaggccacagtccgggcaggagagggaacagcccagcctcgggaagattcttccgtccgagtgaggtcacctgcatgacgccgggcagcgcgtggagcagtgaagatccaccgtgccgccccgcacccccaaggtcgcccagcacggtcctcacctggaggcctgcactagcaggaataggtccggaccgaaacgccgtctgcccgggaactcccagaagtctggcctggagggagagcgagcagcggttcagcctggagcaccctcctccctgttcctctccaggattcctccctttggacttcccttcccgatgtcacaacgatcgccgggctccacatgggtttccctcccttccccgcagccaaggactcaaactcgcattgggcgagttcactcccgccctgggaagggggagtgggatttatccatttcatcctgacgggggagtccggaacgttggagcagtccattcctcaggggtgggcgagaaaggactaggccattccagaacccggactactgaggtggtccatgccccaccctagggaagcgaggaagggctgtcgcatttgggagccccccaccttctggctgcagcttgcggagagggagccccggagagcccagggctcccgctgcagccgaacgaaagttggggggcaacatctcagctgagtcgggagttacgcctcggaggtccttctcccggaacatcttccgccaggatggggagcggctgaaagacttggcgctgtcctaggtataggagccggacagccggtgagggactcctgccttgtctgactccgccccttcctttgactccacccctctccgggtctcacctctcctttaaccccgcccctctcctggccccgcctccaaccgtgaccattaatagtcaggccccgccccctcagctcagcctctcgaggagccgctgggagcagagccctctgagctgttgccgcgcccacctcgtccagccgcctgtctgtgcctaaggagataaggttgctgaattccttctccagaagctgccgggcctggaaagaggaggtggagggggcggttggagcgtgcagtctgcgaggtggggacgcccagcatgctccgggcccagcggcagctcacctgtgcattctgcgtggggatctgcaggagcaaggccaggtcggagtagtcgaaggtctcgtccagggcgagcagtgccccgtgtacc

SEQ ID NO: 8284 - DNA, 6000 bp, Homo sapiens
ctcagtgctggagacccttgctgggcactggctccctcttgaagcagtctgtgccttgctcatctgcagaagcaggattagcagtgggggctattagggggcgacggtagaagtgggtgtttaagtgggtgcataactgggttaattggtgtggaatggaaatcagtgtgtggctggatgggggcagtaggggcagctaggtgtatacccaacagcacctctgggattggaaaacacccctgctgtgggctggaaggagggtcccatcgccccattcccacacatagggtctcactgcagtggtttgggccccaccccacatggctcccttcttctctttctactcccctctctccccatgggtccgtctctctccctccgtctctctgcttctctctccatagcggtctcaatcccactatctcccaggctctcatttttttttctctctctctctgcatctctgtctactgctctcagcctctcccctccactgggaatctctctgagtccatctatttgtcttcctgggtctttgtatctgtgactctggatctcctgcctctcttggtctctgtctcttccaggttctccctgtctgtctcttgctatatcccttctctctgtctcttccttcagctctcactcctttcctctgaacctggctgtcaagggtttcaggaaacagacaccctaggagacagcactggaaagaagagggacatgaacctcctccccttcccttgcccaccccagggaccctgaaatcttccagaacgtctctggtcgcagacccacccgctcccaccctgcaagctcatctcttccccgtctgctaccaccacggtgcgggaccagccacccggttgccatagcgacctgtccgagcatcccttctcccgggactgccactctccaaccgcaggtctggcacaggacgcctgccggggagggggtgtcccagagacccggaggggcgatcgggggggcgcattacaggggcttccgcccacaggaggagcggacctccctcccccaactcccttgccttaccattgcttgaatctcccgacaccctctctcctaggctctcagatcccggagcccccctgcaaccccctccccaaacgacgctcaccctttgtgggggtctgggtcggggtcgccatgctgggccggagcagggggctgctggatgctttggcggcgaaggcgcgctgcagcagctggaagcaggacggaccgatgtgggggggagctggggggagccctggcgtgggggggcctgcagccaatgggggcccggggagcccgcccccgtgcaggccacccccgcccccgcccccgcccaccaccgtcgtccccgccccttcctctagggtggggcgccccctgctggggcccagtggcgctggcgtttcgcgctgagggaccgagaccgacaaagtgctgtcgagaggaacgcacgttttattggaagtcttggcggcagggggagtctgcgggggcagggctggggaaggggcggcggagggggcggtgggcgcgcaggtggagcgtgggagatgtcaggtgccaggggagtcctgtgagggtgaaaagggtgagaggcgaggggggacgtccagccccacccctcgccgcccttcaactctggcacttggccccctccctctcccgcctttccttcctccctccttccctcccaccgccgtgtcagagctgcagcacctggccggattccatcgctccaggtgtttctaccgcctgcgggtggacagacctggggggaacacggagatcgggggtcattctggagaggcatccccagctcctgggcaggtggggcccgcggcggggcaactccccgccctccgctttcagatccagcccttccctctacgcagccagggagggccgggaaaagcggtccttggaaccagccctctccccagaatacccgcagtctccccagactcacggcggatggagctgcggaaagttccctcctcttcatcgggttccccagtcctgggaagacagaggcagagggatttcgggatggaaagggggagaggctgcccttctaggaaccccccagtacaagcctcctttcccagattggtgtaactaggcccagatatggacgaagagcaggctcggggtccgccagaaatgaggagcacccaggagcagcttatgtgctggcagggggcttctaagctggttaacagtgagtacctccgcggatttgggggcagggatgtgaagttggtgggggagggatagtcatggggacttggcagactgccatgagatggcctgggttggaaacccagaaccccccatcttccacttgagtgatcttgaacaaagtgactttacctccctgtgccttagtttcctcatctgtcaaatggggttaataacagcacctccctcccagaggaagtgaaaccgtatctaacacgtggtacacacccagtaaatattagctactacttatgataatatctataattgttctaacatattcatacattgtccatgctttaacattttattcgaagaggaatcaaagagctaggaacaagactctaagctaaactgggccgcgtgtgagatgatctcatttcaccgccgtttcttctttcctgcactttgtgttatcacgctttgtgatttttctatctgtggggctgttggaacccacggccaccgcctccactaggctgggagctcggccaggaagggcgggaggttttttcctcgcttggtcccagggccaggcttgggccatggcacatagtaggtgcttaatacatagtcgctgacggggatcgggctgcgggtcaggggtactccccgcctcacccgcggcgccctccagagcaggagcgggcgaaggagggcggggaggggcgtcttacctctgctgctggttgaacttgcaccggcatcttctgcctgtgggcgtggagaggtaggagaagctgaggctccctcccggcgggcgccaagcggcgctgtagctccagctcgccctcgcgaggggcggggcttgggggacggggcggggctagaggcgagaccgggggccggggaaccaaggcagggtaggcggggcaaggcctgggaggggttggggcggggcggggccagggaggggcgggaccagggagaagcggggccagggagaggggggctagggagaggcggggccagggagaggcggggccagagagaggtggggccagggagaggcggggtagagggcgggagctaggggcactcactcagcacgatgaggatgcccaggatgaagaggatcccggcgatgacgaggcctccgatctgcagggactggtagtctgtgagcagcagagcagggaaggtgagggcagggaagacaggagggagaataggagaggggtaaattgggaaggagggaacagggagaaaggaccagcaggcagaaggggggaagtaagataattaagggggagcagatatgggaggaggaaagtggggtaccagggagaggaaaggggtgtataggaaagggagggaggggacagggaggaggaggacaggggggagagaagacgggaagaagcagaggatgggccacgagatgctgagacagacgcaggcaagagaaagagaaccagagaggtatcacatagacagtgacacagatagacacagacaggaaaagatgcagacaggtggaatcagagaggaaggacaaaatagagggaaggagaatgacagagatatcaatactgggactctgggggagggcgagggggaatcaaaggaccagcaaagccaggctctcccccaggactcaaaattagaccccccgctcaccgtaagtgaacgggtcgtgttcctttggactttctggaaagagagagaaatcaggggttgaatgcttcctggggtcctggcagggaggggcatgaggagaccactggaggctctgccttgctgggcttagagtctgagggtgtctgggcaggctgcccacactctctgggtcccagctgccccctctgcactgtcccagatggggcaggtggcacctaactgccccagctccctgactcacggcaggctgtctgtgacccagttatcccatcggggattcagccccatcccaccccatctttgcctgatctggggcttcctctcccctcccccaaataccagcctgtgactggaccccacgtggagacccccaaacttcttggtaccccagccgacttagtctaggttggggtctccaacttggttcttcggtccccaccgccacccctggggctgaggtgggtagcgggcagcctcccctgcactcacctgccttggccatggtgaggagacccacacagaaaaccaagatgtggccaagagacgccattgtcctgggggggacaccacggattaggcagtgtgtgcccttgctctcccacatagggcttgaacccaagggattaagtcagagacagtctggggactgaatcacagaagtgtttgtcctctatcttggtggctccaagctagagaaacgggtatccccagcttcgtggggacacagtgtcaccaaaacaacctccacgatgggatcacacaacaacacaacgtagcagggacgggggtgagacacacagtccccggggggcctcccttgggcctccacctcccgcagcaggcccccgattcccagacctaccctggcagggcagaggaggcgctgcctcacacaaacacagagcaggagacagcagggcacgcccaagtcccacctgcctacatgcccggcctcactgtgccccgcgaaatcccagctccctgccctctccgcccgcccgctcgcggcctgaccccgggtataaatatctcccacttcaccctggaggaattctgctcgctcaggccaccatggcaacagcctgccttcccccactcagggggtcacgcacagccctgccggggtgaggcccagctgccacatcgccacaggctgcccctgtgggaaaggtcaccccgtctcctccctgggcagcaacgagaaaaggaaaagacagcccctctgcccgcctctgggtgacatctttcacaatcggatgtcaggcaagtgacatgaggcccagcccagtgggccttagagatagaaaacacatgctggggcagggatacacacacacacacacacacacacacacacacacacacacagtggggccggaatggacatgaacaacaacctctccccaaactgctggttggagcaggacgtggggtgtaaacaccgtcaggcatccaatactcctcctctgggcctccggtgcccccacgcagtgacgcaaccagccctacacacgtgtgtgtcccaactccacaccctgccagggtgcacacgcaccagcagggcagggaggagtcacccacatcccaccctgcagaacccactgcctcaaccacactccctccctcttgggttggcctgcctgggaagcctcgggctggccactcctgctcccaaaataggcggcccagccagaccaggggtgaggcctggagggaaggagtgggggacgctcaccccaatcgggctgtcccctgctgaaagaaggcccccaaacgtcctgctgtgccccgggggctgagcactttggaccccctggcccagagctggacgcgccgcccccagcagcctcccctcccagccccaccccacccatgccctccccaaccagcagctgaaactggagctggggctggaggggggccagggggcggcccccagcccagactgccctggcccgcttggttaactctctcagttcagagagagcagcagcaggcagccagcaggcaggctggagaggctaggaggattgtggaggacagggttgtgaacacacacacacacaaacacacacgcctccaagagcttttgggctgaggcggctgccccctgggaactgggtccag

SEQ ID NO: 8285 - DNA, 6000 bp, Homo sapiens
ggccatgctggtctcgaactcctgaccccgtgatccacccacctcggcctcccaaagtgtgagaatgacaggtatgagccaacatgtggggtcccttttaatctttatcagggctatttcaacaaagagagcctcaggtgggtgctaatctgtctttaacacctgttattattcctttataacaaagagattaggtctcaggctctgagagacatcagaagtcaatgagaaagtaatcatctcattcttgtttttgttgtattaaatgtttacatgtttacatttaccacctatttatgacaaagcaataccagttttccagttaggataggatatgtttccccccaccaccccggttttaaaataaatttccttagtttaaaaataattttttaggccgggtgcggtggctcacacctgtaatcccagcactttgggagaccaaggcgggcggatcatttgaggtcaggagttcgaaaccagcctggccaacatggtgaaaccccatctctactaaaaacacaaaaattagccaggcatggtggtgggcgcctgtaatcctagtacttgggaggctgaggcaggagaattgcttgagcccaggaggtggaggttgcagtgagctgagattgtgccattgcactccagcctgggtgacagagcaaaactctgtctcaaaataaatagataaggccatgtgtggtggctcacgcttgtaatcccagcactttgggaggccgaggcaggtggatcatgaggtcaggagttcaagagcaggctgaccaacatggtgaaaccccatgtctactaaaaatacaaaatcagccaggcatggtggcacatgactgtaatcccagctacttgggaggctgaggaaggagaattgcttgaaccggggaggcggaagttgcggtgagccgagatcgcaccattgcactccagcctgggggacaagagtgaaactctgtctcaaaaaaataaataaataaataaataaataaatgattttttaggctgggtgcagtggctcacacctgtaatcccatcactttgggagcctgaggcaggcggattacctgaagtcaggagtttgagaccagcctggccaacatagtgaaaccctgtctctgctaagaatacaaaaattaaaaaaacaaaaattttgtaaaaatacaaaaattagccaggtgtggtgtgtctgtaatcccaactacttgggaagctgaggcaggagaattgcttgaacctggagagaagaggttgcagtgagccgagatcgggccactgcactccagcctggcaacagagctagactctgtctccaaaaaaaaaaaaaagacctaaattagaaaggtaaattgttggggccgggcgcggtggctcacacctgtaatcccagcactttgggaggccaaggtgggtggatcacgaggtcaggagatcgagaccatcctggctaacacggtgaaacccccgtctctattaaaaatacaaaaaaaattagcagggcgtggtggcaggcgcctgtagtcccagctactagggaggctgaggcagaagaatcagaagaatggtgtgaacctgggaggcagagcttgcagtgagccaagatcgcgccactgcactccagcctgtgcgacagagcgagactccgtctcaaaaaaaaaaaaaaaagtaaattgtctgggtgcagtggctcaagcctgtaatcccagcactttaggaggccaaagtgagaggctcgcttgaggccaggagtcaagaacagcctggacaacatagtgagatcctatctctaaaaaaaataagattaaagatattagctaggcatggtggcatacgcctatagtctcagctagtcaggaggctgaggtgggaggatcccttgtgcccaggagtttgaggctgcagtgagccatgattgcactgcttcactccagcctggacagcagagcaagatcttgttaaaaaaaaaaaaaaaaagaagggagggagggagggaaaaaaaaagaagaaaggtaaattctaaaccttctagaagaaaacaaagaaagcctggtgtggtagctcatgcctgtaatcccagcactttgggaggccgaggcaggtggatcatctgaggtcaggagttcaagaccaccctggccaacaaaatcccatctccactaaaaatacaaaaattagctgggcgaggtggtgggcacctgtaatcccagctactccagaggctgaggcaggagaatcgcttgaacccgggaggtggaggttgcagtgagccgagatcgtgccactgcactccagcctgggggacagagcaaggcattatctccaaaaaaaaaaaaaaaaaaagaagaagatcttcgtgaaagcactcatcatcaacaaaaccacggataaagataataatggaagtatagagacggcacagggtgcagggaggtgaggatgaaggtattgctggggcatgtgggaaagtgcccagcccagcccagccacccatttgatgtcccaaagaggagcagggtgtgtccaaaattagagctacaggcagtagaactaggactcaagagcaggtacagtggctcatgcctgtaattgcagcactttgggaggccgaggcaggcagatcatttcaggtcaggagttcgagaccagcctggccaacatggtgaaaccctgtctctaataaaatacaaaaaattagctgggcgtggtggcggactcctgtagtcccagctactcaggaggctgaggcaggagaatcgcttgaacccgggaggcggaggttgcgtgagccaagatcactgcagcctatctcaaaaaaaaaacagaaaaatgaactaggaatcaaaccggggaagcttaaaggggcttcagtctcaactcatcctacaatcccatcctgcagatgggaagataggggacctgcccaagatcccagagtgagcccaggagaagacttgggcccagtctcatcggttccctccactctccccctcacccggcccacctgtgtcagatgctgttcagaggcaaagcccaggccgtagactgtgttggcgcgactgtcggcccactgcccgaacttctgggaagttttggtgaaggtcatgttgggagtgacagtgctgttgatgatggcctagggtcggggaacaaagttcaaggtagatgggacagatactaacaaacatgaaaccccccaggtattaccttgtattagggtcttgaaggtctttactctgaaccctttcaggagatagagactagggcctgggaaggcttagggtttcctgtcccttgggcacacagcaagccagccaccagacccaaggttgtcaccaggactcctggtgcctctgccccacccagaccccaccctgaccttggcgcctccgatgctgatgatgcggtacacattgcgggtggcatcgtagaaataggagacagtgagtgcgtgcttgcccgctgggatccagtttcgcttggtggctgggtcaatttggaacacgtgcgcccgtgtgctgaagattggctgctccctgcgtggggagagggtgtttggtgggggccaggcacccccacttagaaagctcagggccaggctgggggaggtgggagctcacctggctgtggacattggtcaggctgggatgggcaggctctagggggcagccagagaggtggcaggagcactggtttggcccctagggagagaggagggactatgagtgtccctcaggccaggctgagggaggccaagcaggttccatctcaggacccatcaccaggtgtgcccgtcatggaactttcaatcaaaaaggcaggagaggcccaaagtacacctggtgctttgggaggctgagtcaggaggatcctttgagcccaggagttcgagaccatcctgagcaacatggcgagaccccatctctaccaaaaatttaaacaattagctgggtgtggtggcatgtgcctgccgtcccagctactggggaggctgaggtgggaggatcacttgagcccaggaggtcaaggctgcagtgcagtgagctatggtcaggccactgcactccagcctggacaagagagtgagaccctgtctcaaaaaagaaagaaattataaaaagaaacaaaaaggtaagataattattatagataactcagagcaagcagaccccatctttctttgtctaggggaagcccccacaacaccctgtacaggagatggccctctgagaggagcctggtggccgctgacatccagatgtaaatttctcattgtcctggttattgcacccccgtgaagtcccctccatcccaggctgagctgtggaggccaaatctctgctgagttctttccaccacattcacccatgactggccagagcggggctctccaccaaaaaatggggcgttgagaggtgtgtagtaccaggagaccagttccccactacaccctgcagagggaccccacccccagcagctcccaccctagggcagaagcacaccttgaagtccagagtccaaatccccagggagcccccagccaagttaaaaagacaagatgtagacaaacagccaatcccaatgcccaccatgagggcagagcagaatccacactgggagaccagggctccccaacctccccattgggccattcagcaaccccgaatctgcaggggaccaaggaggagtttggaggagggggaagacaggtgggggaggggaggccctggcccagcggcctctgtggtcaaaggggggatgccccccctatcctgtcctgggcagctgctgtcctggtcacagggtctgaaaccggagcccctgagtgggggtggggcggcagctctggcctggactgggggcgggtcctgcgccgggtgggagttggggaacacaggggtccccggaacccaggcccttccggtccggcagctcctgctgcgacttgcagcgtttggggaaagttactcaccaactagtcatgcgcctcggatgccgccggccacggggctcccggaggggggtccgacaccgcccggtgcccgggatccccaatctggccggtggatgaggccccatcccatgcacccgagtgcgggggacgggggggttaatattaattcaggatcccatccccacccgaggcaggacacccagtgcacgccccaactccgggacgcgggctctgaccctggaacttccgagattcccgcgacgccccctgtctctgggtccagaacttcgggggacacctcttctgcctcctccaaccccaggtcggtaactccggggactcccttcgtgactcctcctctaactgggtccgggaccccggtcctccgcgttgtcctagactcctaaacttcgaggaccccctgccacccctccagtccctgggtccgggacgtccggacccctcccaccccagtaccccaccccaggtccgcagctttggggacctcttcgcagcctcctccaacgccgggtccagaactttgggaacctcccacgcagtcccctctcagaccctgaatccagaacttcgggacccccgcgctccctccagccctggaacttggggacccctcgcgccgctcccagtcccgggtccgaaacttctggggaacccccacgccctccccttggccctgggacttcgaggcccccgcgctcccagcgcaggctcggcaggccgggctcaccctgccaggtcggcgccccgcgagtgtccaggcgcgagtcgggtgcggcccccgcggcgctgactccgcgctgccgggcgccccgctcgctccctggctcccgggcccgcgccctccgcgccgccctccacgccgcccgtgcctttgtctgcgccgccgccgcccgcgccgcctccggtcccatcgcggccggtcccgacgcggccgccgcccgccccgcctccccgggccgccaaggccgccccgctgcgccccctgccggctttttgcactgggagagggtatgggggag

SEQ ID NO: 8286 - DNA, 6000 bp, Homo sapiens
gaggcctatcagcagtaaaatggagaaatacgtttggaggatttgcacagtggaatattatagagcactgaaaagggagtgaactatttgctgctgcacccagcacatggatgaatctcacagatgtcacaatggctgaatgaagccaagcacaaaagcactcaaactgcaaaattcactgagaggcagggagcaggaggctctgagtttgttaggagattcaaatggtctccaactcggccctttgaaagctcttgctcaggatttgggctgtggcgggtgttgggccgtgtttgtctgtttcaagtggggctggggaggggttgctggagggtctcattcatgtccctccccaaggtggtagcaggcatcagtctctccagcttccctgtgtctgacctgaggttttccccaggctctataagtggtgcagttccttaggggctgtgacatctaagaccctgtgctgggctttctgtcccatttgtgggtgtgggggttctactgtttcattatttctctccctacctctggtgctgagtttgagtggctattaccgtgtcttatctgggtttccttttaaaacacaaatcgctggacacggtggctcacgcctgtaatcccagcactttgaggctgaggcgggtggatcacttgaggtcaggagtttgagaccagcctggccaacatggtgaaaccctgtctcttctaaaaatacaaaaaaaaaaaaaaaaaaaaaaaagccaggtgtggtggcgtgtgcctataatctcagcacttgggaggctgaagcatgagaatcgcttgagccagggaggcagaggttgcagtgagccgagatcatgtcattgcactccagtctgggcgacaaaaccagactctgcctcaaaaacaaaacaaaaccaaaaacaaagcccacaaatcagcttgcctcatccccctactgttcagaacccccgccagctcccatctcactcacagcaccagcgtcctctccagggcccgtgaggtcctgcccaacctggccccgactccctctctggcctcttttcccaccctctcccccttgcccagtctgcctcagccaccctctcctcccctctgctcctcagcctcaccagacaagcttctgccttggagccctggcacctgctgttcccccttcctcgaacacgcttctctatttatgtatttttgagacgggatctcactctgccacccaggctgaagtgcagtggtgccatcacatctcactgcagcctcgacctccagggctcaagcgaccctccctcctcagcctcccaagtagcgggaagtacaggcgtgcgccaccatgcccagctaatttattgtagagccgggagtctctatgttgcccaggctgtttttgaactcctgggttcaggtgctccacctgccttggcctcccaaagtgctgggatcacaggtgcgtgccaccgtgccccgcccactcttcccctcatatccgctagccttgctctctctgccctttcaggtttccactctgatgtcagcttccccaaacaccccatccaaaatgacaccctccccctctggggagcacccctccattccacaggtgagaggaccaaggcgcagagaggttacggaacttgcccacatcatccagcaccaactctggctcccaggtcgcctctccaagagtggccctgactctgagctcctccgccccaccctcatgttgccatggtaacccagtggcttatcaaaaagagaaggagagaggaagagaggtgtcctgggaacctccaccctcccagacccctctgccaccagcctcatttcttccaggggcttccatttgcttgaaaagttcttctgagagtctaacccacagcctgtccccaactcacacctacatacccatgggctgggagctggctcctctgggggagggaggcagcgtgttggcagaacttcccaagaaggagagagcaagcgaggagcatgcctgtgtgcgtgtgtgtgtgtgtgtgtgtgtgtgtgtgtgtgtgcaggcaagggtgggggagaggggtgattcttaaagggccaccgcacaattagccccctcagcaaggcccctaatgatacgtctaattagcagccccctaattagcaacaacttaggcataattacaaacccaccaggatccaaagcaaaggctcatgctcccttctccctccgcctccctggctttcaggagaaacaggggccagccgggagtcaggaattcttctaaagcatcaaaccaaaccccgctctctctgggaggaagcctcggcctgggaagtcctccctcaggtttaaccacctgtccttcctgctgcagtcctcaagagagaccacagccaggtgatgcgggttctcatgtccaccctcctagcccaggggctgggtcaagcacagcctagtgcaatccctttttcctgcaaaacctggtttctcgctggggccttgcgagaggagcagtcagggagagaaagcactagataaatatttgtgaaatgaatgaccaagaggtctgagccctgtcaccagggaccgtgggctccctctgctcctggctcctgcctctccctctccatccaccagcagccctgaaacccaatctgcttttagaatccaggggcaaaaggatcaggtggagcccagggtgggagcggggagggcagatggcaggtaccgtctcccagggccatctctccctcccttcgtgggcgtgcggccagctgggtcggcagtgagcacccctgttctgcctcacgtgcctcttaggtccttgatcagaagaacaggactgcatgcctgggggtgggtgcagtctggcgtgccaggtaagacccgtccttcatatccctcacgctaccaccccacagtggggcggcaagggagggtgcttttctgactgtgcctgtgttggggggctggcccttgcaggaccgagctggggactcagacttctaaacatgcacatttactgccccagcatgagcgcaggcgctcccatcacctcaaaatggtccagtgtggggatcacaccacagagcttgggtgctcgaggctgtgatacactgataatacgtaaactgaggcccagaggaggaacagggctcttaacctagtgctctttaaagccatctgaagccccctccgtgggcactgtcacacagggctgggacctcacctgcagccagggagacatcatacacacacacacacacacacacacacacacacacacacaccagggctacaggcacagcctcgtaccttttcgccatcactcactctcttgcccaccttctccagggcccccttctctcaaggaaggcagacagtgtgttggccagggccctctcagcaccccccactgagacagtgtgaggctggcacaccaggaaagggatggaagtgagactgcaggaaggactggcccggtctaactcagtacctagtgcttgcccagagcaggaaaggcgctcagtaattatcaacaagaatgaatgaatcaagagctggacaaacagcaagaggtatggaagtgagacggcaggaaggactggtccagttacacgaggaagactggggaggttagattgaagggaggtctggtctcatctctactacagaggctaccggttaaactgcaagaaggaccggcctcagaacgccagaaacaaggcagggggaggtgggctcggtcctcaggggagagctggggtgggtgccggctgggaggagtggagagagcaggggagctctgctgaagtggggagaggagtttagaggactccaggcctgggggagcccactctgcgggtgggggggtctaattcctccaggtcccccctgccaggggcggagacaaaggtgtgtgggaggagggtgcactggctcccagggagagccagagaagaggaaagagagagagaaacagagactgagatatccagagacagagatggagacgagggggagatggggagggagggagagagagagagagagagagagacatgcggacatgggaagagacagagacacagagaaagcagagacagagagagacacaggaaagctgagacaagggagagaggcagagacacagagacacagagaaacagagatggcgcaagaggaaaggagagagaaacccaggacttagagacagagccccagagagactccgaacagaccccggcacagagacacagagagagggagacaggagtgagagactgagagacagggactcccagaggcggccagactctgctagacagagacccctgagacatgtggagagacagaaagatgagacccagacacaggaaggcgggggcagaggtagagagcgcgagggggggtgccccagacggggtgggggcggggtgtcctcgccccccagtacccaggcggtccccctccccagccgcccgagaaccaggagggactgaaggtgttggggcggctggtggcactcccaccccacagaaggtacgcgtgctgggccaggcagccccccacctccataaaccagcccagggaagccagctccaggcttcccgaaccgcccccactccgcacctggggtaaccccgtccttttcccacgcccccacctccccaccaatggggtctcttacctgcggctacagcctggagcaggtccccccagcgctgggctggcagtggtgggcgactccgcccgaaagagagagagagattgagagagagaaaagcctgagactgagagggagagccggggaggaggggagggagaggggatagagggaggagaagaggagaggggagggacacgggggagggggaggcggcgagggagcgagggagggggaggagccggagagagggggaggaggcggaggcgggcagagggaaggcggtgcgggaggcggggggaggcccggggaggggcctgggggagcagggagcccgagcctcctccccagcctccgggttcagcaccagaggcaggggacagcaccggagggcgctcctgtgtgtttcagaagcagcccccgccccccaacacacacacacacacacgcacacacacacacgcacgcagtctcccagccatacaagggccaacagctacaaatagttacagacttacagaactagggggagggcaagaatgtttagctggagtcagatccaaattcacatactgtgcctgcacagcctcacaaaggaggccagaaacaaccacaaagacacccattaataagaataacaacagctgccatacatacaggcagccctgaccacgtgcctggcatcggcagcacattattattatttgagacagggtctcactctgtcacccaggctggagtgcagtggcacgatcttggcttactgcagcctcaacctcctgggctcaagcaatcctcctgcctcagcctcctgagtagctgggactacaggtgcccgccaccaccacgccaggctttttccctccattttttttttttaggagatgggatctcaccatgttacccaggctggtctccaactcctgggctcaagcgatccttctgccttggcctcccgagtagctgggactacaggtgcccaccaccaccacgccaggctttttttctcttcattttttttaagagacggggtctcactattttacctaggctagtctccaactcccgggcttaagcaatccttctgcctcggcctcccaaagcgctgagattacaggtgagagccaccgcacaggtgagagccaccgcacctggcatgttctaatgttttttataaatttaggtaaatgctattatgagcttcacttacagacagggaaaccaaggcatgaggtggtaaatatggctccagattctacacccttaactgctgcaccgcacaattccccaggctgaggacgggtcaggtcaagaagagacttgcaggctgggtgcggtggctcacgcctgtaat

SEQ ID NO: 8287 - DNA, 6000 bp, Homo sapiens
cttgcctgacaccagcgccttctgcgacgacatgatgatggaagggggcacagattcccggcggccatcgcgagtgcaatagtaattgttggagagcttgtggctaggacccacagggagcttgggaggaggctgagttctgaggggaaaaaagatgagcactgaagcaaagagacagtcactgtcatggccccgctgtgggcccctgtcacctcagtcacaaaatgtgggatctacagccagccactgggataagccacaggctgggggtgtcccttggtacactggcagggacatatgcctggggaggggtcctggggccagaagcagatggtggaccctgctctggatgtgaagatgccacccccagggaccccacctgtcccaaatgtggagggtacagaggaccctttctgaggctcccaaggcccgggacatgtccccatgccccccaccccacggctgagcttggcagccagcctcacttgactttgtccactctgagtggctttttcccctaaagccaggctctggacgccctgcgtttcctgttatctcaggaagtctctggagaaccctgctaggatcaaggcccattattcaagaacaccttagccttggagcctgtcaagatctctgcatttcctgccaccatgtggccaggcaactcctctctggagcccagagaggggtgaacagagctcggtcttggcttgaactaaaccctgggctggatttacctggaagcctgaggccttaaaagaaatgctcaaaacaaggatgggcagggtggctcatgcctgtaatcccagcactttgggaggccgaggtgggtggatcacttgaggtcaggtgttcgaaaccagcctggccaacactgcaaaccccatctctactaaaatacaaaaattagccaagcatggtggtgggaggcagaggttgcagtgagctgagatcacgccactacactccagcctgggcgacagagcgagactccatctcaaaaaacaaaaaaagctcaaaacaaaagacgggctttccagagagagggaggagagaagacagcaaaaaccgtaaattgatctgtttccacttagccatgtttctaagtcacttttttgtctgggaactgtttcccggaatttaatttttttctgaggcagtgatcatatgcactgcagcctggatgatatatgcaatcatatgatcgcttgaggtgtgatcatagctcactgcagcctcaacctcctgggctcaagcaatgctcccgcctcagcctctcaagtagctggaactacaggcgcacactaccacatctggctaaaaacaatttttctattgtttttgtggagtcgggggtcttgctatgttgcccaggttgatgtcgaattcctggccttaagttatcctctcaccttggcctcccaaagtgctgggattacaggcgtgagccaccactcctggcctttttcttaaaacaagtgttagtcactgtattttttaaaaataagaaacataaagtaaaaaatgtttaatattaaaagcaatatattatgtgaaagactttgcttaaggaggctggatgtggtggctcataccttgggaggccaaggtggaaggattgcttgaggccaggagtgttttttttgtttgtttttttttgagatggagtctcgctctgtcgcccaggctagagtgctgtggtgcgatctcggctcactgcaacctccgcctcccaggttcaagcgattttcctgcatcagcctcccaggtagctgggaatacaggcgtgtgccaccatgctggctaatttttgtatttttagtagagatgggttttcactatgttggccaggctggtctcaaacttctgaccttgtgatccgcctgcctcggcctcccaaagtgctgggattacaggcatgagccaccatgcccagtcagaggccaggagtttaagaccagcttgggcaacatggtaagaccttgtctctatacaaaaatttaaaaattagccaggcacggtaacatgtgcctgtaatcccagctacttggtacgctggaccaggaggatcacttaggcctggaagttcgaggctgcagtgagctatgattgtgccactgcactccagcctgggtcacagaaacccagtcttacaaaaaaaaaaaaaaaaaaaaaaaaaaaaggccaggcgcggtggctcacacctgtaatcccagcactttgggaggccgaggcgggcagatcacgaggtcaagagatcagaccatcctggcaaacatggtgaaaccccgtcactactaaaaatacaaaaattagctgggtgtggtggtgcacgcctgtagccccagctactcgggaggctgaggcaggagaatcacttgaacccgggaggcggagattgcagtgatctcagatccgccactgcactccagcttggcgacagagtgagactctgtctcaaaaaagaaaaaaaaaaaaagaccaataaaacatccagatgaatcactagagggtgccgtcatcctaaaaaagtcaaaactttcacaaagccatttcctcaactggcccacaactaccctgatagaaagccaactaggggggtcgggggttgggggggagagagcatcaggaagaatagctaatggatgctgggcttaatacctaagtgataggttgatctttgatctttgcagcaaactaccatggcacgtttacctttgtaacaaaactgcaaatgtaccccagaacttaacgttaaagttgaaaacaagccgggcgcagtggctcacacctgtaatcccagcactttgggaggccgaggcaggcggattatgaagtcaggagttcgagaccagactggccaacatggtgaaaccccgtttctactaaaaatacaaaaaattagtcaggcgtggtggcacatgcctgtaatcccagctacttgggaggctgaggcaggagaatcgcttgaacccgggagatggagattgcagtgagctgagattgtgccattgcactccagcctgggcaataagagcaaaactccgtctcaaaaaaaaaaaaaaaaaaaagttgaaaacaaagtttgatacttctaatatttggaattagtcacaacatataggcatttacataaatttcattattttaatgctatttttcttcctttcattataatcctcaatgactgccttacctctgcctaccctttgacttcatagattataccattatccctttccctcaatgggttccatccatactggcctccttccactcaggctctgtccagcctgacactcttagcccttcctgttccctctgctcagaatgttttttcttttttatttttttgagacagagtgttgttctgtcacccaggctggagtgcagtggtgcgatctcagctcactgcaatatccacctcctgtgttcaagcgattctcctgcctcaacctcccgagtagctgggactacccgcgcgcgccaccacgcccggctaatttttgtatttctagtagagagggggttttactgtgtttcactgtgttggccaggctggtctcaaactcctgacctcgtgatccgcctgcctcagcctccccaagtgctgggatcacaagcgtgagccaccgcgcccggtcagaatgttttttcaataattattctttgaatgggtccttcccatcattcaggggactcaactgtcaatttccaaagaaagatctttcccaatcatctgactttacgtagccaccctccagcttccacttattttgttttgtcttcaaagcattccagaacaatactacctgctgtgtttgtttccctactatgcttctccctagaatgtggcgtccatgaaagaatgtggataagaactttcctggttcacaaagttaaacccaaggctgaggtcatacatgacgggggcttgtaaatatcaactaatattttaatataaatgagtctgaaatcaggacacttctgggttcaagtccccgctgccactttttagcttctgagtgacttgaggcaaatgatttcgcctctctggacctcttttttcatctgtagcttggggataacactgactaacatggccacgctgagcactgcaaatctagcctgattgccagtcagaatgcacgcccggcctcgctgtttcaggagggctgtcctccggagttcagcaaggttaaaggcaaacctctgcctccacagcctggcaggggactggtggcaggatgtcagccctccgtttcaggggtctaaaggaacacagatttcgtttttggtggagaaaggacagagccagaggctgggcagcgagcggggcctgctcaccgcttggagatctcctggtagcgtagctgcagcttcccctgcaggtcatgctgtgggaagaggagaggagaggtcggcctgcaaggcaccccaggagagaggaaaggagagggcaagggaccagggatggtccggggatgcgcattttaagggaaggcaggggatgaacactcggggaaacggatgtgggtcctgcaggtgaagagcaaagccagagtccgggcccacagatccaaggctaagaaggtcggggactggggaaatcccaggcctgagtggttcccaggccaggagagggtcccgggctgaaggggtgactagctgggggttcccagggagattcggggagagcgaagggtcccggcttaggagggaggtgaggagcaggagcgggtcccggacacacggagcccgaagccccccatggtgcagccctgtccgccccgcgcaccccggacgcccagttccgcagccgctggatgagacgggtggcggacgccatcttccgtccgcgatactgaagggcgcagccggtgacgtctccaccgctggggctgctgggaaagacgcggcgtggtatcgcgagacgggagtgggcggtgctagaacgtcctataaaggctctccccgaagcacgtgactcctctccgccagaccgccgccgcgccgccatcatggacaccagccgtgtgcagcctatcaagctggccagggtgaggtgggggcccgaatttgggggcagggggagggattagaggagccaaacgggccgggtctgaacccagcttctttcctccaggtcaccaaggtcctgggcaggaccggttctcagggacagtgcacgcaggtaatcgggtgggggcatttggccgactgccggcgacctaaaccctgatgtgacctctaccctgccctaacccctgccagccggaatccgggagccgattctcatttcatcacggggttctgatggttccctttaacgatctgtattctggccccgacacgttctctgaattcatatctgcttcccactccgcggtgcctttccgcggcccgcccttacttcttcctccactccggtggggacccgtaggtgcgcgtggaattcatggacgacacgagccgatccatcatccgcaatgtaaaaggccccgtgcgcgagggcgacgtgctcacccttttggagtcagagcgagaagcccggaggttgcgctgagcttggctgctcgctggtgggtgcaaagaggacacccctttgatagacctttggttggtggtagggaggcttcgttaagcccagggtgagagggtttgggaggcagagtctacatacagagactgacaagagggaggcgggagtttgccaattgctgcggggcctgtcaacatctcatgtttgggtctgtttacagggtcttggatgtcgggttcgaccacttggccgatgggaatggtctgtcacagtctgctccttttttttgtccgccacacgtaactgagatgctcctttaaataaagcgtttgtgtttcaagttaactcaggttcttgtctgggttatacgactagggtttctccaggtttcttgagtggctcccaggcggtcaccgatcctccgcactctggaaatcctggccgtgcggtcttgc

SEQ ID NO: 8288 - DNA, 6000 bp, Homo sapiens
ggagcagcagcgcctgggcagtcctctgggctggcctcgggaaagccgccacctgtggtggcggtggggctctgacagggagtacagctgaccgcttctggagggtgtttctgttcttaggactccagtccaggctggacggctgcctgagggcccttcgttaaagacacgcttgtgtcctgggcgatggtaataaaaccagctcatgctgactgtgctgtatctggtgccaggcactgtcctcagcgtctctcattagtgcttgtgatctcccacagtcctgtacatgggggctgtttatccagggctgcacctccagtgcctagtacacagcctggcacatagtaggtcctcaataaacctgccttggggaaatgattcctattcctttgcccagggtcatggcatctaaacgcaagctgggccgtggcgataggcaccccctaccacctctgggctttctctgttctcagcacccttctccctcctggaggctcccagacacaagggggcccaagtcatttccacatcaagcatcccccaccccccagcggtgtctcctttctgagcctacctgcttactcctctgtcccggcaatggccagttcctgaacaactcctggaggtcccctcctcacacccctcacctgaaaggttaaccccatccccctacctcccatctctgccgctcctttcccagcccctctgttcacctctcttcctctttcttatgtggctttctctggctagggcctgggcttctccttccttgtgaccacagccccccagtcccccatggcttcagttgtttctgcagtgagacccacctctgtccccagcttcccccagtgttggtgacctacactggcctcttcatcaccccccatgcctgtacccatgcactgacccaatctgatagtcccactgtcccatcagtgtggtcccttctcccttggaaacgtggtgagccctcgggcttacaagccccaaactccagttatcctggaactctttgctcctcccttacctgttagcgccccctgccggtaaataaatacacacagccactgatcaccaacacctgggcttggcttctagtcactctcctaaccccacaaagccctgccctggtccagccctggcctcgtggcctcagctttcccatttcagacaacagccatgcagagcttcctaaagccaaatctgaccctgtccttcctctgcctagagctctccttggttcccaaagcctcctgtgatctgacccctgccagcttctgtagtcttacaagtccccttgaactcattccaaccagttatgttcccttgggaaaaacaggccccctctctgacctcaagaccattacctctgccttgccccaatcactcattctttaggtctcagctcacatgtcctctgctcaggggagcccgcactgcttccacggcaggccaggcggctcctctgggtccccataacccggggttttcccatcataaccccgatcacctgaagcctggctccccacagtccaaccgcccaggcttcaccgtcctctgccaactcaggcccagccactccagtctctctccctgaaccccatgtaagctgggattattccagttggtaattttgcatcctacacttgtctcaatatgtgtgaagagctatgtggggcatggaagtgtgggagaaagtgaccttgtcacaagtccacccagatagactgccccatctacttcctttctacatcaaagtcaaggtgatcaatcacttccagctcccaagagacccatggaccctgtctttactccaaacaatgaggaagagtggcctagatggcagctgccgtctgaaggcaaatgctccctctggaaacatcgagatggtcatagtgagctttcctaggcctaagcttaaaaaaaatcaggtggaacttcaacggcctggtggaggaggaggggcaatggtgctatcctactccctggggtaccccactgggaacaccaaggatggggagcatcttcctgagtggggagggtgtacatcaaagtggagcttaaacatgacattcaaaacttctgacacatccccctcagagaaaggcggggagccggcttcagtggaccaaggaaggctgagggtggaggggggcatccaggacaatgtccaagctgggggccccactgctctgcttcttggctgcagctgtctctccactccaccctgagaaggctcaggctgggatctgatctgagggccatagaactgaggagctcacagtcacaactctccccccagccccatgctgaccccatggcttgaacgatgttaagaatctggctggacaaattattctagggagcagtttcagaaaagctggttttgctggttgggtaaaaccaaaggccaagcaattggactgtccactgtgtaacaaggggccgcaagtggctgcaagtgggaggatgacctggttagacgggtttcagatagatcccctggctgccatacagaggatggattggagggggacactggggccaggagcctcagaggcaaccagcccgggaagggcccatgtgaggaggcccaggttggggctgtgaggaggaagagccccccaagggccttctcttggattctagctcccctctatcatctgttccctgagggccctggcctctgccactgctcaaagatcatccaaaccttctgtctactcctggcaaaccaggagcctgaggaacaagacatgggacaagtcagtgactggctagcttccagcttgtctacctggctcctgagacagaaccagggcctctgagacccaggtggacacggtattgggagacagttcccaagagagagaaatggaggcagcaacaactttccaaatactgtttacttcactaaaacctggagtgaggcagggaaaaggtacatcaatgtctgagacaccaagcctaggagtgcacattgacaacggcgacatacagggccaaagtgctgagggccagcagccccgttaccactgctcgggccagtagagctgcccaactgcccagcgagcagaggtggacgaaggtcctgcaggaaaatgtcacaataaggaagggagactagataacccaccccactttggacccagccctaaaccccacccaactcactccataacaaaggccttgtagacactgaggaacatcagcaggaggacagctggccggaaggtgtggtacagatcatagcgtgttatcatccagacctgagcagacgcgacgatgtaatggacctagagggaggcagaaagtcggggccaggccttggggaggagtatggccgccagcagaaatgtgtatgtgggagagcacgactgcctaccagactgatgttggagtctatgctcatctggatgtacttccagtcaaactcaatgccccgggctccgacccataggggaatgcagctgaggaaggcaaaggatgggattctccagtactcagacaccttcagcaccaggctttgagcccctgccctccagcacccccgtggaacccaggtgtcccttctcaggggtctgggctccaggctgctgtacgcaccgggacataataagctcagcagtggcccagcccagggcagcaaccatgatcttgtactctcccttgccggcattccgggacatgacaaggtttagacctatcaggtctgccacatccacgctggccttcatgaactcctgcgggtcaggttgaggcttaagtaagcacagggggacagggagccccattcctgaactcccttcccttccctggcccctctcaccccaatgaagtcatagatgccgccttcccaggtgggaaagaaagtggccaagaacagcatctgagaacagaaagcagaaagaggtcacttcaaggtgaggggatcaagataaaccacgtgggatttgtgggaagttcgtgggtaggaagagggcaggacaggttctgggggcccatctggaagaggaaccaccagatggtggcaaaattacaggaatcggggagatagaggataggtccccgggtccccgagggggctggaagtttgagttctgggtgatcacagggcatctgagtcaggtctgaaggtgctgctccttgggcagtgttagcagcacgtacggaatcagtgatcactcttaaccgcaccaaaaaaaacctgttagccaaccacactactgaggttttctcagttttactaagtgctacgcaaaagttgcttctaggtctcttctcaggtcgtgccctctttaaagtccatcctctctaggtatcctgacgcctcccagtgcggagtcccgagggcggtcccaccgtggggcggcgggggcgcggataggcaacgggggcgggtccctgggtctgcagagcctgggggccagaacacgtggcttcccggtggccctcaccttgcagagttggacaaagaggtaggtgactccagcctggacgcatttccagaaggcgttgtactcggacctggagaagcgggaggtgagggtcggcccgggccccgcgccctctccgccccgcgcccttcccgcactcacaggccgctgcacttgtaggtgatgaagtaggggaagtaggcaagagcgaagcagttcccgaagtgaaacagggtcatgatgccggccgcccggtcccgcccgcgcggggatcgcgaggcggcgtctccgggagcgggtctccggctccgccggctctttcgccacggccagggcctggcacccacctgactggcgggggcccgcgcgcgaccttctgggagcagtagtcccggcgcggggcgtcgcgcccagtgacgtcagagagcccgtggccggccctgggtcccaccgctgccggcccagcgctttggggagtgacttccggccatgcggggcctctaccgctgccatcgcggtcccggtctcctgaagtggaacccggcttggagtcgagcgcgacccctcgcccgtgggcgcaggcgatcgagtaagggtggggcgggcctcaaacccggatcagaacccgccctgaccggcgcagagatacgggacgcagccgtgagcactgttttttatttcaccatggacccatcggcgtggggcgcccgccccgggtgtccttcctcccccgggcagccagatgctggaacgggaggcacatgttccggccccggcccctgggaaggaaagaaaggaccttcccgtttcacttgtctcggctgaacatgtagcggaggaggtcgaccacccggtgactgtagccatattcgttgtcgtacctgtggaggaggggtcgggaggttcaagggggttccttccgaccaccccttagttcccctccctctaagtctccagctccttcccccttaccatgaaatgagcttcacgaaattgtcattgagcgcaatgccggccttagcatcgaagatggacgagtgggtatcaccgaggaagtccgtagagacgacctggaagtcagaatttcaaagataagtgtgtccggcagagcaaggacctccaggagctgaggccccgactcttaactctatcgcccatccatgcattcatctataatatttgatgtagccctactgtgtccagtctctggactggagggtatgaccaagtgcagggtatgaccaaggcactgtgtcagggtctggccaaagggcacaggtcacaaacaccctcatgctgtaccagtacatccctttcctaggaataatgcaagcgtttggaatgggccagcatggagggcctctctgaggggtggccatgagcctgggtctagatgactagaaagatctgaccggctggggccctcagcacagtgtctgaggtagaaggagctgcaggaagggaggacctgagggttttagccctagtgtcatgaaaggccacaggagtgttttcaatcctgaaaacgggtgatgcaatgtgattccattaaaacaaaagatcc

SEQ ID NO: 8289 - DNA, 6000 bp, Homo sapiens; identical to SEQ ID NO: 2050

SEQ ID NO: 8290 - DNA, 6000 bp, Homo sapiens; identical to SEQ ID NO: 2049

SEQ ID NO: 8291 - DNA, 6000 bp, Homo sapiens
atcagagaagacggagtggaagggaaggcccagtgtggggaggaaagctggaagaacatctggacccaggaacactgggattgcctctgaggtgtaaggaggaaggtgactggcctgggcagacaagaactgtgaggctggccaggtgcagtggctcatgcctgtaatcccggcactttgggaggcctaggtgggaggatcacttgaggccaggagtctgagacctgcctgagcaacatactgagaccccatctctaccaaaaagaaaaaacatgttaggcttggttggcaagtgcctgtagtcccagctacttgggaagctgaggtgggaggatcacttgagcctgggaggcagaggctgcagtgaactatgatggcaccactgcactccagcctgggcaacagagtgagaccctgtctctttaaaaagcaaaacaaaatgaaaacaaaaatggtgaagctgatgggattttctagattcccaggcctgttaacaccttgttccttatctcctgcagattaaggttgaggaagactttggctttgaagcagatgaggccctggattccagttgggtttctcggggtccagacaaactgctgccctacccgaccctggccagcccagcctctgactgacgcatgcccaataaactgaccccacactcaccccggccaccgtctacttgttcccacctctgatcacacacatgctcacgttcgggggttggttttcacatttttattgggagccgtgggaggggccgcctctgtcagtggaggtgctcacagtttcttcagccactccaggctggggccctgagggtcctgggggtggctgggcacgtcgggcatgttcccatcatcacggacgggcactgtggggcaggaggtgggccactgagaccagcacgtctccagggccctggagagaagagctggtctgtcgctttatgttcagagagggaagggggaccccaggggtgagaggggaagggtcagagaatcagtgatgcagaaagaggcgggaaatacagagactgagagacacggaaaaccagagagatagcgagggagagatcccgcgcactagagagctagggtcaaaagagatggggaaacaggacagaaacctgagaagatggagaccaagaaaccaccacagatgggaacccagagagagacagaaatctggaaaggtaatagaaactcgaagcacaggccaggcgcggtggctcacacctgtaatcccagcactttgggaggccgaggtgagtggatcacaaggtcaggagatcgagacaatcctggctaacacggtgaaaccccgcctctactaaaaaaatacgaaaaagtttgcgtgtcgtggtggcgggcacctgtagtcccagctactcgggaggctgagcttgcagtgagctgagatcgcgccactgcactccagccttggcgacagagcgagactctgtctcaaaaaaacccaaaaaaacaaaaacgaagcacaaacacagaatagtatacgaattatatctcaattcttaaaaaatggaacggggggtccgggcaccactgcagaatctctgataactgcttaggaaagacctgcccataactgcccttacgccagcacagggaggctgggcctattccggggatccctgcctggcccccactcacctgggtagttgtagggcgtggccttgttgatcatgacggagtacttgaagtaggggctcaatgggggcagaattacagctgtggagagacacaggggtgaggcccaggggaaggtggctctgaagagaggggaagagaaggtgagccttggcaaagggaagataaagtgcgcagggggagggcagcagggagggccagcacgtccaggaggatccttggtaccttgggatccctacttatagacaggagggtttaaaactcttttttggggggttaagtggaggtaggggttggagcctaacactcacagatacgtggggcctggaggaggcagcagtggggttggtcatggaatgagcacgtttgagtgtagggtcatcatggagcatcctgggggtagtgtcatgggactgttctggagaaatcaagactgttacaaatttggccgggcacagtggctcaagcctgtaatcccagcactttgggcggccaatgtgggcggatcacctgaggtcaggagttcgcgaccagcctggacaacatgatgaaaccccatctctactaaagatacgaaaattagccgggcgtggtggcaggagcctgtaatcccagctactcaggaggctgaggcagaagaatcccttgagcctgggaggcagaggttgcagtgagcccagattgtgccattgcactccagcctgggcaacagagagagactccatcaccaaaaaaaaaaaaaaaaaaaagccttacaaactggaggagaaagggttgcacaaacaacagtcactgaccacagtccatttagggtgggagccaggagtcctgggggatggggtacagttcataaaaggaatgttctaggccagtgctgtctgacagatggtaagagccaggtatataattttatatcttctagtagctacagtaaaaataagagatacagatgaaacaaattttaagaaacatacttggatgggcgaggtggctcatgcctataatcccaggactttaggaggctgagacgggtggatcacctgaggtcaggagttcgagaccagcctgaccaatatgatgaaaccccgtctctactgaaaatacaaaaacagccaggtgtagtggcatgcgcctgtaatcccagctactaaggaggctgagacaggagaatcgcttgaacccgggaggcggaggttgcagtgagccgagatcaggccattgcactctagcctggacaaaagcgaaactccgtctcaaaaaaacaaaaacaaacaaacaaaaaaaaccatagtacatccaaaacatcacttcgccatgtaatcaacaaaagattattggtagtttacacactctgttatactaagtttttgaaatccagtgtcttataccacctcaattcataccagcaccacttcaaatgctcagtggccagttgtggctggtggctgccatactgaataagtgttcagaaccttaacctagtgcctggctggtggaccagcagtactgacaagacctgggaactcttcaaaaatgcagaatcccatgccccaccccagacctacagaatcagaacctacagtttggccgggcgcagtggctcacccctgtaatcccagcactttgggaaggcagatcacttgcggtcaggagttcaagaccagcctggccaacatggtgaaaccttgtctctactaaaaatacaaaaattagccgggcgtggtggtgctcgcctgtaatcccagctacttgggaggcggaggcaggagaatcacttgaaccctagaggcggaggttgcagtgagccatgatcaaaccattgcactgtagcctggaagacagagcgagacgccatctcaaaaaaaaaaaaaaaaaaaagctggccgggcgcggtggctcacgcctgtaatcccagcactttgggagaccgagttgggaggatcacgaggttaggagatcgagaccatcctggctaacacggtgaaaccccgtctctattgaacatacaaaaaattagccgggcatgggggcgggcgcctgtagtcccagctactcgggaggctgaggcaggagaatggcgtgaacccggaaggcggggcttgcactgaaccgagatcgcgccactgcactccagcctgggcgacagagcgagactcagtctcaaaaacaaaaacaaaaaattagctgggcgcctgtaatcccagctactcgggaggctgaggcaggagaatcccttgaacccaggaggccgaggttgcagtgagccgggatcgcgccactgcacttcagcctgggtgagagtgagactccatcgcaaaaaaaaaagctacattttaacaatcccccgcccccatccctgcaggaactccggtgctaattaaagtgtgagtagggcagttccagggcagagggcagagattttcaatcagcaaggcacattgggatcatacggggattttcacaagacacagattccccagtcccacctccacccaagccaactcaattcagaatgggggagaggaaagatgaaaaggaggaggaggatctggacttttttttggtgctcaggtgttaaggcataagcagggttgagaacgtctcatttagaggggttaagagcgtattgggtaggtggagaggaacgcggggggcgatggtggagaggttataatgggtatggggatagataaggggatgccgtgggggtgcagacacactagaggggacccgagggcggcgatagggctttaggggtacaagatggagggatgtagggggacgggggtggacgatgcaagtttgcgcctggagcactcacgcaccgaggcccccgacgacgaaggacacgaccagcactggctccttgtcccaggcattcttgaggaaggcgccgactcctgaaggggtggcaagaagcgtcacccctgcaagtagctgcccccggtgacctctaaccctctcgtgccacccctgccctggaggagccccctcgtgacttctgcgttcccctccagcacggaccccatcgcttccacccctgccctgccgcacctcagtcccaggaccgcccagaggttcccagaactacccgagccccgtgcgccaccggaacctgcacttactcgcagccatctttgtctccgcggcggcgacagcggcgaggacgcggagcaccctgggagttgtggtccctatgcgcgagaacccgctcccagggctgcgcgtgcgccctggagcacaagtagaggcgaaagcaaggacgcggagcactctgggagttgtggtccctctgtgcgacggcccgctttcggagcctgcgcgtgcgcactcgcgcagaacaaagatggagccgtggaggtaaaggaagtggtgtcaggagcaagcgcaagcctgactttgcggacctgcgtggaatctccttagtctcagcctagaagtcgctccggagtgactagtcctcctgctgcgacccacctaaggcggaacaaaatagtccccattttatagtttatgtatgaaagcccattttacagacgaagaaactgagcccgggagaaggtgaatgactaacctgtccttcgaggtctcagctcaacatcggctcgtcctggaagcgctaggtctcatcccagatgggttaggagctttctgcgggctctcacagtgctctgttaccgccattatagctcagatcacttaagaaactgacctggtctgggccgggcgcggtggctcacgcctgtaatcccagcactttgggaggccgaggcgggcggatcacgaggtcaggagatctagaccatcctggctaacatggtgaaaccctgtctctacttaaaaatacaacacaaattagccgggcgtggtggtgggcgcccgtagtcccagctactggggaggctaaggcaggagaatggcgtgaacccgggaggcggagcttgcagtgagccgagatcacaccactgcactccagcctgggcgacagagcgagactccgtctcaaaaaaaaaggaaactgacctggtcttggtctttcagtcggactggtagctgctgcttgagagcagtaacggagtctgagttccctctgtgcctgccaacatggcacagcgagggtctggcacgtaataggttctaatttttttttttttcttctgagattgagtctagctctgtcgcccaggctggagtgcaatggcgcgatctcggctcacagcaacctccgactcccgagttcaagcgattctcctgcctcagcctcctgaatagctgggattacaggcgcgcgcctccacagccggctaatttttcttttttaggagag

SEQ ID NO: 8292 - DNA, 6000 bp, Homo sapiens
gcccagccagaactctaattttaaatagctttccagaatatttgcaatatagtatttcaagagttgccaaaacttgctatttggaaaagaaaaatgttggatccctacctcataccatttcccaaaacaacttccagattaattaaagaccctgtgtttctttttttttaaactataaaagtattcaaaaaactataggaaaatatatttgtcttggggtaaggaaggcttcttaaaatataaaataaaaagttgtatggaagattaattaatttgaccacttcaaatttcttaagttgtgtatgctaaaagacaaaactggaggacaaatgatagtactggcagatatcacttattcacaaatcacacaaattaagagtacaggaaggctgttgggtccggtggctcacagctgtaatcccagcactttgggaggccaaggtgggtgcatcacctgaggtcaggagttcaagaccagcctgaccaacatggtaaaatcccatctctactaaaaacagaaaaattagccaggcgtggtagtgctagcttgtagttccagctgtttgggatgctgagtaggagaattacttgaaccctagagtcggaggctgcagttagctgagatcatgccactgcactccagcctgggcaacagagtgagaactccatggtggcatgcactttgggaggctgaggctggaggattgtctgagcccaggaattcaaagctgcagtgagctatgatagagccaccgtactccagcccgggtgacacaatgagaccccatctctaaaaatgaataaaaataagggtcgggtgagggggctcatgtttgtaatcccaacactttgggaggctgaggcagagggatcacctgaggtcaggagttccagaccagcctgaccaacatggggaaaccctgtctctactaaaaatacaaaaattatccgggcattgtggtgtgtgcctgtagtcccagctactcaggaggctgaggcaggagaatcccttgaacccaggaggtggttgcagtgagccgagattgcaccactgcactccggcctgggcgacagagagaaactggtctcaaaataaataaataaataaataaaataaataggtagagatagctatagcgacactgaaatatctccaaaagagtttttgtttgtttgtttgtttgtttgtttttgaagtggagtcttgcactgtcacccaggctggagtgcagtggcgcgatctcagcttactgcaacctctgcctcctgggttcaagcgattctcttgcctcagcctcctgagtagctgggattacaggtgcgtcccaccacacccggctaatttttttttttttttttttttttttttagtagagacggggtttcaccacattagccaggatgatctcgatctgaccttgtgatccgcccgcctctgcctcccaaagtgctgggattacagacgttggccattgcgcccagcccaagatcctatttcttaagccctgtactgtgccaggctcagggttttgcacatgtgatttgatgagatctcacagcggcccattttacagagaaggaaatggagtcttagcaagctgtgacttgttctaggtcatatggtcacatataaatgaatacgatggtgaaactgaggtcctagcttaggcctctgcctcagaagttcctggtcttcagtactcacctataatggccactaaggggaatgagaaaagaaggaaggaatggagggagggaggaaaataaggatatctgggatgggattgggcaccaaaataaaatctgagtaattggaaaaggggtgtcagcaacaaaaggagagtggatggggtggctactcaccagacggagtgatgtctgtgtgacacagaggccctgtaggaggttgagggactagtttctttttcctttttttttttttgtctgaggcagactctcactctgtcgcccaggctggagtgtagtggtgtgatctcagctcactgcaacctctgcctcccaggttcaagtgattctcctgcctcagcctccgtagtagctgggactacaagtgcccgccaccacaccaggctaatctttgtatttttagtagagaggggtttcgccatgttggtcaggctggtcttgaactcctgtcctcaggtgatccacccgcctcggcctcccaaagtgctgggcctcggctcccacaggcatgagccgctgcgcccaacagcgagttcttttcaaaaccctttgtggccagccccatctcattggtaacccaggaatctgagttcccagctcctatctcctctgggaaatgagaatcttatccctccctcctcctgtctcagtaggcagaaatttggacatccattgcccacctaccgaagaagtctgaacgcagacccctctggcctgggcaaccaagagttcaggcccttgaactccacctttccagggaacaatgatcgtagagtttctcctctcacgagttcaggaatctgggtccccatttccctcttctctcaggagctaagagccctgttcccagcccccttttcccagggaatcaggagtcctggcttccatccccctcccatataagaatctgggagtcctccctgtctcctgacctcttcctgcctcaagaaccagagatacctgtccccacctccttcctctttcgggaatctgtgttctcttgctttaggacccaggggtctgggccccagccctgttctttatttgaacctagaatcccaaacctgctgcctggtccccctgcagggtgtctgggtctccattgcctctctctctgcccccaaccccagccaggaacccagggagaagaaaggggtgactcacagagggtcagcagctggaggatcagcaccagggccatggtgggcagatacccgctagagctggagccagggcttggtcgcaccctctcccctcccaggaaatgaggcaacatcagaaaaccagacccagatcctcatttacggaagagagtatcgaggtgggggcctgtgggtgactgtgtcatagccctatggcactgtggaaaaattagcagggggttcagtcataacctgtggtgttcatttatttaactctagaaacaaatactagtcaggaggtggaggcaggaggatcgcttgagcccaagagttcaagagcagcctgggcaacagagcgagaccctgtctaaaaaataaataaattgtgccactgcactccagcctgggtgatagagtgagaccatgtctttaaatatagatagacagatagaaagatatctgtctgttttaaaaataagaacctattatgtgccagactcttgctgtcattgattgacagatagataaaaatttgcacctattatgtgccaggcccttgctgtgattgaaagatagatagatggatggatggatagatagatagatagatagatagatagataaaaattagcacctgttaagtgccaggcccttgctgtgattgattgatggatagataaaaattaacaccaattatgtgccaggcccttgctgtgattaattgatcgattgatagattggttgacagagaaaaattagcacctattatgtgccaggctcttggtgtgatactgtgttagatagatagatagatagatagatagatagatagatagataaaaattagcccctctaggccgggcgcggttgttcacgcctgtaatcccagcactttgggaggccaaggcgggtggatcacctgagatcgggaagttcgagaccagcctgaccaacatggagaaacccccgtctctcctaaaaaagaaaaattagccggctgtggaggcgcgcgcctgtaatcccagctattcaggaggctgaggcaggagaatcgcttgaactcgggagtcggaggttgctgtgagccgagatcgcgccattgcactccagcctgggcgacagagctagactcaatctcagaagaaaaaaaaaaaaattagaacctattacgtgccagaccctcgctgtgccatgttggcaggcacagagggaactcagactccgttactgctctcaagcagcagctaccagtccgactgaaagaccaagaccaggtcagtttcctttttttttgagacggagtctcgctctgtcgcccaggctggagtgcagtggtgtgatctcggctcactgcaagctccgcctcccgggttcacgccattctcctgccttagcctccccagtagctgggactacgggcgcccaccaccacgcccggctaatttgtgttgtatttttaagtagagacagggtttcaccatgttagccaggatggtctagatctcctgacctcgtgatccgcccgcctcggcctcccaaagtgctgggattacaggcgtgagccaccgcgcccggcccagaccaggtcagtttcttaagtgatctgagctataatggcggtaacagagcactgtgagagcccgcagaaagctcctaacccatctgggatgagacctagcgcttccaggacgagccgatgttgagctgagacctcgaaggacaggttagtcattcaccttctcccgggctcagtttcttcgtctgtaaaatgggctttcatacataaactataaaatggggactattttgttccgccttaggtgggtcgcagcaggaggactagtcactccggagcgacttctaggctgagactaaggagattccacgcaggtccgcaaagtcaggcttgcgcttgctcctgacaccacttcctttacctccacggctccatctttgttctgcgcgagtgcgcacgcgcaggctccgaaagcgggccgtcgcacagagggaccacaactcccagagtgctccgcgtccttgctttcgcctctacttgtgctccagggcgcacgcgcagccctgggagcgggttctcgcgcatagggaccacaactcccagggtgctccgcgtcctcgccgctgtcgccgccgcggagacaaagatggctgcgagtaagtgcaggttccggtggcgcacggggctcgggtagttctgggaacctctgggcggtcctgggactgaggtgcggcagggcaggggtggaagcgatggggtccgtgctggaggggaacgcagaagtcacgagggggctcctccagggcaggggtggcacgagagggttagaggtcaccgggggcagctacttgcaggggtgacgcttcttgccaccccttcaggagtcggcgccttcctcaagaatgcctgggacaaggagccagtgctggtcgtgtccttcgtcgtcgggggcctcggtgcgtgagtgctccaggcgcaaacttgcatcgtccacccccgtccccctacatccctccatcttgtacccctaaagccctatcgccgccctcgggtcccctctagtgtgtctgcacccccacggcatccccttatctatccccatacccattataacctctccaccatcgccccccgcgttcctctccacctacccaatacgctcttaacccctctaaatgagacgttctcaaccctgcttatgccttaacacctgagcaccaaaaaaaagtccagatcctcctcctccttttcatctttcctctcccccattctgaattgagttggcttgggtggaggtgggactggggaatctgtgtcttgtgaaaatccccgtatgatcccaatgtgccttgctgattgaaaatctctgccctctgccctggaactgccctactcacactttaattagcaccggagttcctgcagggatgggggcgggggattgttaaaatgtagcttttttttttgcgatggagtctcactctcacccaggctgaagtgcagtggcgcgatcccggctcactgcaacctcggcctcctgggttcaagggattctcctgcctcagcctcccgagtagctgggattacaggcgcccagctaattttttgtttttgtttttgagactgagtctcgct

SEQ ID NO: 8293 - DNA, 6000 bp, Homo sapiens
gaggcataacctgcagatagtccccacggcgcacgtggacgccgacaaaggtgcgcgggcggtcccctgtgcggcccaggcggagctgacccagcacactctgcgcctcttcccgaaggtggtcgtgcagggtgaactctctgcggatctgttcccggagatggtggaagaaagtccaagagcaggggaagccagagagcttcaggaaaggatctctcaagtccgcgtactcctccgacatccagtcgtgaagctgcagctcccgccacggcgtgcggctgtccacttctggggccagcacgggcagggtgatgcggaataccggggccagggcggcatgcatggcaggcaggataaaggcccggcggccgttgagctgggccagagccagcagcgtggcatactgtcccatctgattaccaaaccggccattggggtagacagtccaggtgccggagagggaagcagggtgctggggacaggaagaggaggcgttggggcccatcgcagtacccggcaggcagaagatggccactgggggtgtcaccaggcggcggtctggacacaggatcgacaggcctaggccatgtggaaagctgtcttgatggatatggaggaagaagattacagagaggacacagactagcaggaaggccaggcagagctgacgatggctccggagccacatggctgcaggggaggaaaggcgaattagcaaatgctctgaggctgaggaggggaggctgaggagggatgtggggtaagggaggcgcctggggtgcagcactccttagtcccagggaaagaggaagttaaaggtttagactcctggggctgaggtagggagagcctgagtcctaggtttcagggatgagagccttggaatttcggggcatggggactggaagacaagtggttttcaagatagccatggtttggctgggcactgtggctcacacctgtaatcccagcatattgggaggctgagatgggaggatcccttgagcccaggagttcaagatcagcctgggcaacagagcactcttacaaaaaaattttaaaattagcttggcatgggccaggcgcggtggctcacacctgtaaccccagcactttgggaggccaaggtgggtggatcacctgaggttgggagttcgagaccagcctgaccaacgtggagaaaccctgtctctacttaaaatacaaaattagccgggcatggtggcgcatgcctgtaatcccagccactcgggaggctgaggcaggagaatcgcctgaacccggggggcgggagttgcggtgagctgagatcatgccattacactccagcctgggcaacaagagtgaaactccgtctccaaaaaaaaataaataaaattagcttggcatggtggcacatgtctgtggtctcagctacaccggatgctaaggcgggaggatccccggagctcacaatgagccgcgatagcaccgctgactgcactccagcttgcgcgacagagagggaccctgtcttaaaaaaaaaaaaaaaaaaaaaaaaagaaagtggtccaggttcctacacctttcctgaaggaatctcgagtctcccctcctgtaagttccgctgatactggactcttccaccagcctgtttctcaggagtacctgtctgtgaggcgcaaaatccaccacagaggtggtgatgggaaacgatagttcaagtaaaacaagagaggctggagggtcaggagcggaaggagcatcttggttcctggaggagtaatggctggggaggtggcggagattcctagggccttaggaagacctggagaagaggttgggggtgcacctcctggttctgaaggagttgttcctgggtcccaggaacaactgagtggggcagtccccacttacccgagctgcttgcaggtggcagatccacagtccgcttttcgtggccggagcgcaccctccgcaaaggcaggccacatccggccgcccctggaacgccaggcgtccggctatccggcccggcagccctcccctccgcgcagcctgtccggactggcagcgagggcttggggaggagaggaaggagagggcgcggccgggagtctcgcagcgtccgccctcccgggccgggcggatggctggaaggtggagccccgcccgtcacttggcgccgagccccagcgccaggggctaaggcgatggcccctgggcccaccgctccccagatcggggatgcaggggaccgcgccctgcccctccgccccgtcattgacctgcgcgaaggcttcacccagggcaggctacctggcttctgagcagccgcagcatcattgcgtggaccaggagacggagcgcccagttgcaatgctggagccgggaggtccaatccgccgccctctctcttccggtgccagggcttagagtcggcccccgacacctgggtgcttcgagcctggccacgccccagcggctgggcagggcccccgcacctggtcccggcgagtggagcgatcgtccgccctctgccgcgtcctcctgggggatggagaacctgtttgccaggctgccgccggagcgcgcgagggcctccagcctgcaggtgctcccgcgcccaccagggtctccgatctcccacaccccccgcctcaccgtccacactcaaattccagaatcccagcccctagtcactccttttggggaattctagggtcccgtgccaaactgctactttccagacctgcactgcacgaaggcaaccattccaaggctggagaccggagtggaacagggtctgtttcccacgccgtcagcgggggccgtggctgccggcgccagagacaaaggcctctgcccgcttgtcacctaattaaagcattttctctggtccaaggcccacctccagcatcgccaaccccgagcagggcaggctaacgtagggtccagccctacggggctttgcgggtgggtgttcttcccctgtgaggagaggagagattgtaagaaataaagacacaagacaaagagataaagagaaaacagctgggcccgggggaccactaccatcaagacgcagagaccggtagtggccccgaatggctgggcgcgctgatatttattgtatacaagacaagggggggcaggataaggagggtgagtcgtccaaatgactgataaggtcaagcaagtcacgtgatcatgggacagggggcccttcccttttaggcagccgaagcagaaagagaaggcagcatatgtcagcgttttcttctctgcacttataagaaagatcaaagactttaagactttcactatttcgggcgggcgcggtggctcacgcctgtaatcccagcactttgggaggctgaggcgggcggatcacaaggtcaggaggtggaggccatcctggctaacacggtgaaaccctgtctctactaaaaatacaaaaaattatccgggcgcgtggtggagggcgcctgtagtcctagctatttgggagggtgaggcaggagaatggtgtgaacccaggaggcggagattgcagtgagccgagatcacgccactgcactccagcctgggggacagagcgagactccgcctcaaaaaaaaaaaaaaaaaggctttcactatttcttctaccgctatctactacgaacttcaaagaggaaccaggagtacgggaggaaaatgcaagaggacaaggagcgtgaccattgaagcacagcacagcaggatgactgcgggcaggcctagataatacccagcctcccacaagaagctggtggagcagagtgttccctgactcctccaagaaaaggagattccctttcgtggtctgctgagtaacgggtgccttcccagacactggcgttcccgcttgaccaaggagccctcaagaggcccttatgccggtgtgacagaaggctcacctcttgccttctaggtcacttctcacaatgtcccttcagtacctgaccctatacccaccggttgtttcctggttatattagttatacaacaaagaataaaagtaatagctaatgattaataatgtttacactaatgattgatactgtccatgatcatctctatatctaatttgtatgataactattcttattctaactattttctttattatactgaaacagtttgtgccttcagtctcttgcctcggcacctgggtaatccttccccacagactgaccctcccattcaagatacatcaatgtcaaagactcaggagtttgacttgattcccagaagtttaaccatcatctccccaggctcgggactcccagcacccagacccttctgctcacacccagcagtccaggcccccagaccctcctccctcagacttaggagtccaggctcccggcccctccttcctcagacccaggagtccaagccccctgcccctccttcctcagacccaggagtccaggaccccagcccctccttcctcacacccacgagtccagatccctagcccctactccctcagacccaggagtccagaccaaagctccctcctccctcagacccaggagcccaagttccccagcccctcctccctcagatccaggagtacaggcccagaccctcctccctcagacccaggagtccaggccccccacccctcctccctcagacccaggagtccagagccccagccctcctccctcagacacagaaggcctacccttgcacccttaggggctccaggaaattagccaacctgtcttccctctgggtgcccactccagggcctggcttggctgccaactccagtcagggactttcagccacccctccccccaggttatttcaggagcacctgcctgggcctgggatggcttctctggtgaaagaaacaccaggattgcatcagggaggaggaggctgggatgtccagggtctgagcatctgagcagggacagatgaggttgaggttggcccacggccaggtgagaggcttccaaggcaggatacttgtgtctcagatgcggtcgcttctttcatacagcaattgccgccttgctgaggatcaaggaacctcagtgtcagatcacgccctccccccaaacttagaaattcagatggggcgcagaaatttctcttgttctgcgtgatctgcatagatggtccaagaggtggtttttccaggagcccagcacccctcctccctccgactcaggtgcttgagaccccagatccttctctctgagactcaggaatgtgggcccccagcccctttcacctgggtcccagctaacccgatcctcccctccctcatcccctagacccaggagtctggccctccattgaaaggaccccaggttacatcatccattcaggctgcccttgccacgatggaattctgtagctcctgccaaatgggtcaaatatcatggttcaggcgcagggagggtgattgggcgggcctgtctgggtataaattctggagcttctgcatctatcccaaaaaacaagggtgttctgtcagctgaggatccagccgaaagaggagccaggcactcaggccacctgagtctactcacctggacaactggaatctggcaccaattctaaaccactcagcttctccgagctcacaccccggagatcacctgaggacccgagccattgatggactcggacgagaccgggttcgagcactcaggactgtgggtttctgtgctggctggtcttctgctgggagcctgccaggcacaccccatccctgactccagtcctctcctgcaattcgggggccaagtccggcagcggtacctctacacagatgatgcccagcagacagaagcccacctggagatcagggaggatgggacggtggggggcgctgctgaccagagccccgaaagtgagtgtgggccagagcctgggtctgagggaggaggggctgtgggtctggattcctgggtctgagggaggaggggctgggggccttggcccctgggtctgagggaggaggggctggggatc

SEQ ID NO: 8294 - DNA, 6000 bp, Homo sapiens
aaaaattagccaggcgtgatggcaggtgcctgtaatcccagctaatcgggaggctgaggcaggagagtcgcttgaacccaggaggcggaggttgcagtgagctgagatcacgccattgaactccaacctgggcaacaagagcaaaactctgtctcaaagaaataaaaaagaatctactgaattgtacactttaaatgggtgagttttagagtatatgaattatatctcagtaaaagtattacagaaaagcaataatctcagtgagctgagatcacgccattgaactccaacctgggcaacaagagcaaaactctgtctcaaagaaataaaaaagaatctactgaattgtacactttaaatgggtgagttttagagtatatgaattatatctcagtaaaagtattacagaaaagcaataatctgtgttaactagttaaccacctggaaaaataaagtaacttccatccctcacacattaaaacaaataatgttcacgacatgtataacttaaaaatagactaccagagtgcttatcaaattacaaattgatgttattataattttggtctgtaggcttgacagccaaaacacaaattatgaagtaaatagttaataaattatagaaaatataaagtatgtttcagtaaacttccctgcctccctcaaatttaagtagcaaataaactaagggaaaatatttcagatacaacaaacagataataaatttaaaacaaatcaacatatagatgaatacaaaaatgtgtagaaataggtaaagaatatagactcttagaaggaaaaattgaaaatgaccaataaatacttgaatgcatatgtaagcttatgagaaataaaagacatggaaatattatgaaaataaaggccgggcgcagtggctcacgcctgtaatcccagcactttgggaggctgaggtgggcggatcacctgaggttgggagttcaagaccagcctgacccacatggagaagccccatatctactaaaaatacaaaattagctgggcttggtggcgcatgtctgtagtcccagctacttgggaaggctgagggaggagaatcgcttgaacctgggaggtggaggttgcggtgagccaagatcgtgccattgctccagcctgggcaactagagcaaaactctgtctcaaaaaaaaaaaaaaaaaagaaagaaagaaaagaaaaaagaaaaagaaaataaaatgttatcattggtttaaggactgggaaatggtcaaaacaattgtaaattttaagaagatattcattcacaatacttttggtgggaggaatccacttacaacctttctgagagtaactttacataaatatttaagagaagcatctcttttaattcaggaatccatttctagaaatgtagtccaattcggcaaagtttccgacgtacacaaattagtagctcttctatgcaccaacagcgaccaagctgagaatcaaatccagaactcaacaacttttacaacatctgcaaaaataaaataagataaaatacttaggaatatacctaaccaaggaggtgaaagacctctacgaggaaacttcaaaacactgctaaaagaaatcatagatgacacaaacaaatggaaacacatcccatgctcatggatgggtagaatcaagattgtaaaaatgatcatactgccaaaagcaacctacaaattcaaagcaattcccatcaaaatactgccatcattcttcacataactagaaaaaacaaccctaaaattcatatggaaccaaaaaagagcccgcatagccaaagcaagacaaagcaatggaggcatcccattacctgatttcaaactataaggtcatagtcaccaaaacagcatagtactggtataaaaataggcacatcgaccaatggaacagaatagagaacccgtaaataaacccaaatacagtcaactgatcttcaacaaagcaaacaaaaacataaagtggagaaaggacgccctattcaacaaatggcactgggataattggctagccacatgtaggagaatgaaactggatcttcatctctcaccttatacaaaaatcaactgaagatggttaaggacttaaatctaagacctgaaactgtaaaaattctagaagataacattggaaaaagccttctagacattggcttaggcaaggattttgtgaccaagaacccaaaagcaaacgcaataaaaacaaagggcctgggacttaattaaactaaagagcttctgcgtggctaaaggaacagtcagcaaagtaaacagacaacccacagagcgggagaaaaatttcacaatctgtacatctgacaaaggactaatatccagaatctacaaagaactcaaattagcaagaaaaacaaacaatcccatcaaaaagtgcgctaaggacatgaatacacaattctcaaaagaaaatatacaaatggccaacaaacataagaaaaaatgctcaacatcactaatgatcagggaaatgcaaatcaaaaccacagtacaataccatcttactcctgaaagaatgtctataatggaaaaaaaaatagatgttgccgtggatgcggtgaacagggaacacttctacactgctggtgggaatgtaaactagtaaaaccgctatggaaaacagtgtggagattccttaaagaactaaaagtagaactaccatttgatccagcaatcccactactgggtatctagaggaaaataagtcattatacaaaaaagatactggtacacacatatttacagcagcagaattcacaattgcaaaaatgcttaacaacccaaatgtccatgaatcaatgagtggataaagaaactgtggtagatatatacagttgaatactactcagccataaaaaggaatgaattaatgcatttgcctggatttatttatttttccttttttttttaagatggagtttccctcttgttgcccaggctgtagtgcaatggcgctatcttggcttactgcaacctccacctcccaggttcaggcaattctcctgcctcagcctcctgaatggctaggattatagacacccaccagcgtgcccggctaattttcgtatttttagtagagacagggtttcatcatgttggccaggctggtcttgaattcttgacttcaggtgatccagctgcctcagcctcccaaagtgctgggattacaggtgtgaaccaccatgcccggcctggagactattattctaagtgaagcaactcaggaatggaaaatcaaacatcgtatattctcactcataagtgggagctaaggtgtgaggatgcaaaggcctaagaatgacacagtggactttggggacttgggggaaagggtggaaagggggtgagggataaaagactaaaaattgggtgccatgtacactgttcaggtgatgggtgcaccaaaatctcacaaatcaccactgaagaagttactcatgtaaccaaacaccacctgtttcccaaaaacctatggaaataaaaaattaaaaaaaaatcagacccccaaaatattcagagtagtacttgtgggagtcattgagcaagtaacatgggaagagaggaggctgcttccaccagtggttttggaggtggagcagatgctgatgataatgaagtcccagatgggaaacggggatgggtgccgaggaaagctcaaggaccctgcagatgaggactcagacccacgatactggatgaggcatccatgtcaccatgggagtcaaccagggtagtggcctcagctgaggcaggggaaaagctgggatccaagagctctagtcttctcttgataagcaagagagaccaggaggtgagagatggcagaggatgagagaggtgatatcagtgaccagaaagagcccctaaaaagtaacttccttttctttctgttagttttaatataaaatttcgctttaatatttttagacaattcttttttaaaaaagtatttatatccaaaggttcttaccacaccaaccacagccccaatctttttgccctaacctcagaatcagttagttgtctcctttaaaacctttctctctctcacacacccacacacacacacacgcaaacacacaggagagagagagagggaatatatagtattgtttttggagtatgagtgtgtgcttcagaataaatggtttcatactctataaaaaatgagattcaaattttataatccatcaagttttattggaacacagccatgctggattgcttgtgcattgtttatggccgcctttgcactgccataagtctccacggtcacaatatccactcactaccacttattgttgtctttcaacagcggcatataaaatctgtaacacagttcatctcacacctaataaaacagactcacacaggcataaatttagaaaacatcccatgaacataaacaggtccacgcagggtcccagacaccgaatcgaactaagaaactccctcacagcaagacacacccatctgttcaattgccagacactgttccaggcgctcatacccaggtaaactggtagtgtcgcgcaggtcatttccagcgaacttaccccggattcccttgctcgctcacgtctaagtccccagacaccccagtcccatcttcgcctgttctagactccagaatgcgttccttagcgaaagctgagaaccttttaattcgctctcagtcaacaccaaagaccctcaagcaaaagcaagagctcccgggcgtcttcgaaaaaagcgcctttgacaggtgaagccaagttgcatgctgggagcatccctgctgtccaggtttcaacttccggagactctgccgctgtggactacatttcccagaagtctccggggcacaggccttttaggggcggggcgagcttgcctgccagaagctcctctcccagcctgcgagcatttccaggctcttgtttcccatcagcctctgggtccaaactaaccacaggtctctgggtccttttccggtgtccttaaggttcttggactctgcatggtgagttggtcgtgtctgtagaagtaatcagcccgggtgaagctgggagggctcggctggctttactggggcccgactggaaccggcagtgagggtgggggtggcatcgggggtgctggaggtggggagggctgggtcacggacagagcgtgtcgtgtccggatcctcaagcctgtgtgcacgcgagcagccgagggacagtgtgtctcagacggcgtggcagggacggggcgtgtccccacggaggtgggtgcagttgtgaatgtgtgacgggctgacagggtgcgtggccgtatttgtaaatgtgatttgctttgaccaaatgctctaggttccctttagcctgtcttcgggcctgccacaattaaatgaccgcaagaaagaagtctatgctaagccccataatgaacgtttcaagcaagaaggatgagaattttagatctggaagtgtccgcgggacaggatcttgtcaagacctgatggggaagttctagaggtgggattcctagaagaggggcctctaggagctctttggtggtgagctacatgtttcagagccattgcaagcagacctctgtccccaagaattgccctcaacacagagacagactctagcctcccttttcattccgtttggttttgtgtggatgaaggcagaagtggccccagagggtgttttgctcttctttttcttttttaattaagtctgtgacgcgctagaaatgctgatgtctcatgttactgttttttcccccagtgctgccaggttgccagatttctaagaaggagtttgaagaggagaaaaggatttttgcatgtttagaaatcaaggttcaggtgaggttttttatacatactttttaaatacatacacatacaattacctttgcttctaggtcatgagaacattttctttccttggcctgaaatatcttgactgggttttcccagttacatgacccgccatgctg

SEQ ID NO: 8295 - DNA, 6000 bp, Homo sapiens; identical to SEQ ID NO: 826

SEQ ID NO: 8296 - DNA, 6000 bp, Homo sapiens
ccatggaagtggaggcctggttttatttatttatttatttttgagacagactcttgctctgtcgcccaggctagagtgcagtagcgtgatctcagctcactgcaacctccacctcctgggttcaagcgattttcctgcctcagcctcctgtgtagctgggactataggcacgacccaccaccccccgctaattttttttattttgagacagagtctcgctctattgcccaggcaggagtgcagtggcgggatctcggctcactgcaacatccgcctctcgggttcaagcgattctcgtgcctcagcctcctgagtaactgggactacaggtgcatgccaccacgccaggctaattttttgtatttttagtagagacagggtttcaccgtgttcgccaggatggtctggatctcttgaccttgtgatccaacaaccttggcctcccaaagtgctgggattacaggcatgaaccaccacgcccagccatttttttgtatttttagtagagatggggttcaccatgttggccaggttggtcttgaactgagctcaagtgatccacctgcctcggcctcccaaagttctgggattacaggcgtgagccactgtgcctggccagagggttttttttttttttaaatcccactgaccgtctgggctggggactgtgggaccttaggatagtacagaaatctgggacaagggactcctggctccattaccacaaacaggagttggagttgcagagacaatggccgggattccgggagaacttggaggaagtaagataacagagaaggaagggactatggcatctttgaggatcgaataaggtaggtgaagggtccgtcgggattgcagccctcaattgtggagaagcagagagactctctgggggaggggttcccagagctgggtactgcagaatgaataagagtttggggaatcgggccaggtgtgatggctcatgcctgtaatcccagcactttaggagcccaaggtgggtagatcccttgaggtcaggagtttgaggccagcctggccaacatgatgaaacccctgtctccactaaaaatacaaaaattagccaggtgtggtggtgtagtactgtaatcccagctactcgggaggctgaggcaggagaatcacttgaacctggaaggcagaagttgcagtgagccaagatcgtgccactctactccagcctgggcgacagagcaaaactctgtctcaaaaaaaaaaaaaaaaaagagccgggggtggtggctcatgcctgtaatcccagcactttgggaggccaaggcaggcagatcacctggggtcgagagttcgagactagcctgaccaacatggagaaaccccgtctttactaaaaatacaaaattagccgggcatggtggcgcaagcctgtagtcccagctacttgggaggctgaggcaggagaatcgcttgaacccgggaggcggaggttgcggtgagccgagactgcgccatcgcactccagcctgggaaacaagagcgaaactccgtctcaaaaaaaaaaaaaaaaaaaaaaaaaagagagagagagagagaatctgggggatgaagcagggggaaacattctgacaatgcatggcctgtgtgtgtgtacagatcccagtttaaatcccagcccagcattttctgcaggcgggaagggaagcaagacaaggttactctcagttacagcctcagtttcctcactggatccccaggaatcaggagaggctctagggaggagatgagaatacaacacctgggaaacggtgagccctgatgagggtgcatagttcttatgttgatcccagcagagacaagggctgggaagaactggggtggtgcctccccgaactccgtgggctcctgaaaacgtcctggagcagggaagggaggtgtcatcgtcaacggggtgtccactctcacctgcaggggcggccccaacgcttgggtactaaaacgatgatactccaggaactcgagagtcaggtgtgctctccctcaaaggaagtgtttattttttggagctcaaagaccccagaaaaaagcaaccccccccgcaaaaaaaacccataacaacaggcagcacatgccccccacaccgcaccccatgcccaatctcagggtgggagacaagaggggggactcattgtccggagggaggctctggagggagacagccctgggtcaacccgactgtgtccccacacccaggacttccccatggcccctccagacctgctccagaggcccttctccggctaccccgtgctctccccgctaaccgtgttgccccatgacccgctcagaactgatgagatcaagggaatgttcaagcgaaaagccgagcaggacggaccttccaagatgtgcctaaaggaccagaagagggactcagggcagactggaggcagcagacactggccccgctccaagcccggccccaagccccgcccccatcgctagacccgccccacccatccataagcccctcccctccatcgatagacccgcccccattgatagccccgccccatacagctatcagcccgtccccgatccagggcatccttctcactggattctccctccttccccaaggcccctcacctctgcgcccagtcccttcccctgcagcctctctctctagacttcggagcctctgcttccccgccccgcttccccagctttcttctccctcccggggccgccccctcctcactgaccagcttcctgggatctcactgcagcagagcgctgaggcccagcagcacaatcagcagctggggcgccgcagcggagctggagtcctgggagctggggtagtacttcttgtccgcgattctcacgcttaagacctggttttctcttctgcggtacagatggcaaatcaggcatctgctcgtcctggctcctgccgccctccctgtaagcccaccgcccccgggagttccccccgcaccgccccaatccaagtcaccggggagggaatggacagcggccacccatggctctgtgaccctaggggctaagttatccttttgtgggactcaaactttatcccttggggcaatggggattttgggagcaaaggagatcctgggtcttgggctagggatgtgggggtgagaggaatgtggcaggtggagggtagcgggggaaggctatctctgacctcagtcgctccacctctgcagacgcgtcctgaagcttatggtttaatgtagtgatctctcctggtagggtgggaggacagaaacagggggcgggtcagcatgtggccatgctggggccctgctccactctgggacagaacctcccccttaccccaacctccagccctggtctccctgcccccaccccctcttccatacctgactcacccctccccggccctctcccttctccctttctcaccctcaagctcctccactttcttttgtccttgggccttctctgcatccagggaagccattagggccatctaagaagagttagaatctggggttttggcctggggagtttggctgctgcccctgggacctgggcctcctccctaggtcctggggacagaggggcttaaatgcaaacccctttcaggttttcttccaaccctctctgcaccatggtctccaaccttaaagaacagccacaaccacacactctcccagggccacccataagcatgtgggtcctcaaaatgggagttttgaggccaccccacgtggaaacttggaggctatcgataaccaaagtttagtggacatttccagattgcctgagcaatggcccaagaaaagttagagggccctaccaaatccagaatgcagtgggatttccccgcccaagtgacatgcccagcgagagtttcaagatcccccatatcaggacccaggtgaatatttcagtttcttagggatgaagtgaaaatttcaaaagccccctttttcagggtctggtgaggtcccccttcaaccctgaatagggatttctactcccccaggactggtgcccacgaggagtttcaaggcccccgacaccagtgccctggaaagaatttataaattcacctaagtcccagggggatactgaggtccccgatttgggggatctggagagttttaacaccctgcccctacaccagtgccctggactgggttaggggcccacaaaccctggtaggggaacctaggtcccttgatgtgggggcccaggagcagtttcaggacctcccctgcatctccctggagacccaccctgggtcagatttctggggagagattcttgtccctcccaccgcctagtactaggccatccaaaggagttgaggagcttaccacagtgtggttgcaggtggcggcctgggcctccacatcctgaaagcccttctgggcctcggtcagctcttgttgcaggagatgggtgacattgcgacactccatcactgcccgaaggccgtcccggcaggcctcgctgttggccttgatggtgaagataatcaagggcacccccagaatcacgatgatcaggagcaccagaattcctatccccagcagaagcttacagcgcttatccccgtcttccatgggcactctgcaatagtcatacgaagtagatgccatccagatctcccctttagagtctggcctggagttaggggagggtgctggaatcttctacgggccacccctttattagcataggaaacgtcctgaccaatagcaagttccaggaagtgctctgaccagcagctcttgcatgaggcacctacaggcagaggattaattaggttttcagtttcagtttcccagaaaggaggtgggcttttttttcaccctgctttaaaagcccttgggcccttcccagctgggtgccagccaactgtggctgcctgggacactccatcttaagtccctgtgcctctgctgtgtgttactgagtgcctaggccgtgccagcctgtattcatctgtactatgacctgaagaggcagaggccatcactgttggtccggtctccacctggggaaactgaggttgcacagttgcgtggtggagtgagggcagggcctgggtctgggggcggggcctgggtctgaccccagggactggtttttgtgttcaggtgtctctgtggtgacgagcagggcttcatccagtgcctctgtccccaccgaggggactatgggagacatggagggtgtgtgagcaacaggtgagactggagccagctgaaaactgggagaccgacccagccaacaaacaatgtcggtctctgtcttggcacctgcaggaaacaagctcctacttccagaaaaagtgctcctgggactccaggataccaggtaaactctctgagcctgtttcttcatctgcaaaggggaataacagggccagcctcagacactgtccatgtggccaagagagccagggcttcctacaggaaatcaggcccattatcggcacccaactgctgggcatgaccgctgaaaggggactgcatgtttttcttgtggcttcttcagccacatcctgaccacagcccagattctgttaggtctgccatttccatgtttttttttcttttcagcagggccagacagtaggcgaggtcaagtccagagcccaggcctcccagaaggcctggggaactccccccaggccctgactccaacatccctcagaaggaccccattaaagccacttagagccaggcatggtggtacatgcctgtggtcccaggctgaggctgggaggctgaggcaggaggatcactcgagcccaggagtttgaggctgcagcgagctatgattgtgccacggcactcaagcctgggtgatagagtgggatcccatctcttaaaccaataaacaaaaaaatcacttagaaccaagaaccaattaacaagctgtgggagatgatcttgctgaaaattctgagggtgaacttgtcccaggaggagggacctaccagcctggccagga

SEQ ID NO: 8297 - DNA, 6000 bp, Homo sapiens
attcaaacatagctcagaggagagacagagtgagggtggggaagggagtagctgagattgcagcaaagccttgggcagatgcagagggtacggatcacgtccacaactctcctcaggcccagcctctctcctgaacccccgacttgggcctgaagcctccctctcaagggtcgcctcactgtccccaagtccctccctgtacctcaccatggatacccctctccctcccctacccagcccaccaaccccatggcctgtccactaggcctcccgagtgtctctcccacccacctcctccctactctacccatcctggtcctgtcctttgctcccccttggctccctgcctcagtgtcccccttctgatacaccctccacaaggcagccaggggaatcttcctgaaaaataacaaacctgaccctgatcttcccttgcttggaaacttccatgactccacagcacccaggggtggagtctgcactcctcagcctggcactcacaggtgtacaccttccctcaccatcatttgtggtcacacccacttctcttttctttctttcttttcttttcctttctttttttttttttttgagacagggtctcaatctatcacccaggctggagtgcagtggtgtgatctcagctcactgcaacctccgcctccccggctccagcgatcctcctgcctcagcctcctgagtagctgggactacaggcttgtgccaccacacctggctaattttttttttttttttgtattttttatagagacagcgtttcgctatgttgcccaggctggtctcaaactcctgacctcaagtgatctgccagcctcggcctcccaaagtgttgggattacaggtgtgagccaccgcacccagcctcccactttgttttaataacacttttgccatgggacatcctacatcattttactattatctttctgtctaaattctgcacccctcccactgcccttaccatgccaggcctgggatccggtcagctccgccccaacccaaaattctctcctctttctaagcttcacccattgaccacagttcctattttctaggattactggaatatagtgactgtgaggattaagagtgcctgtacttcaggctcacagcaagatgtgtgactctgatcactgctggaaatggggaaactgaggggaagccaagaaaagagaacttctcggctgggcgcggggactcacgcctgtaatctcagcactttgggaggctaaggcgggaggatcgcttgagaccaggagttcgagaccagcctgggcaatatagcgatactccgtctctatttaaatattttaaaaatttaaattaaaaaaaagaggaaagaaaagggcccttctcagagttaccggctcaggattccccatgtcctaccacgcacgtcattgcccgagccaccccattcaatctcaaagcgacttcaagcgcacaccgggagggtgtgaaggtggcaggcaacgctcgctgcctgatacagcgattgtcaggtgggcttcagggaaaagtcgtgcagtcccctttccgcgatactcccttccaccgggactccacaccctgtcaacccgatggtcccgacaggcccccgacgtcagggtcctcacctgatttctccactttcaccttcacagggaacatggtttgggtccgggatctggctagctgggtcagaggcgccccaaagggcctagggtcacaagtcaaggcgggagaaggcggggacagttcaaagatgagcttcgtgggccacgggtcctccgcctttggttgtgtccagcctggaccgtggccaccacccttctgtgggcgggccccttcggcagtagcttgttcctattagttattgcagccgtcaatctcgcatcctgaccaattgagagctgcctccgtagtctcccagctttaggtcccacccacctggggctttgcttccggaaacaaaccatctaccccctagcttcctgggaggtgtagttccagcttcccagactcaccctgagtaacagcgcctgcgccgcgcggggcacggtgggaaacaaaggattagggcatcgcgaggcttcccgggacttgtagtgtgagaagggttgagcaacaccaagttagctctttaccggatttaaccaaccgttggggtcccttcatccctaagaggaagactaatgtaaaataacgttgggttccctctcactgagcactcgctaggtgccaggtatctgttaatctctttgcaggtacaacttcattcattttgcaaatatttattagtgtgtcgggcactcttctaggcattggagacaccttgaggaacagaatagacaaaaatccctgcgctaatggagcttatcttttaaaggagggaagataaacagtaaacaagtaaattttaagtgaaatgtaataggagaaagaatatgatctgggcggggcatggtggctcacgcctgtaaatcccagctctttgggaggcctaggcaggcagatcacctgtgaccaggagttcgagaccagcctggccaacatggtgaaacccagtctttactaaaaatacaaaaattagccgggcatggtggcatgcgcctgtaatcccagctattcgagagtttgaggcaggagaatcgcttgaacccgggaggcggaggttgcagtgagccgagatcggacctctgcactccagcctgggtgacagagcaagactccatctagaaaaacaaacagacaacaacaacaaacccctctccccccccaaaaaaaaaacccacaaaaaaagtgtagcctgaaagggacataggaatatcaaggtggtgattgaattttaaataagatggatggtcaaggaaggattctctgagaaagctcttgactatttttatttttgcagacaacacttccttcagaaaacgggaaacttccatttgtcacacgtcttggtccagataaatcccaggaagtagcatcgtgatctacacttctgatgagaatactgcagcccacagtaggaaagttatatttttgaattcacgactaccagtacaggataacagcccctagaaatggaagcactaggccgatcctaccactgcactccagcctggctgacagagcaagactctgtctcaaaaaaaaaaaaaaaaaagaaaaaagaaaaagaaatggaagcactattcctttcttagtttctcatctaatagtttcctgagcaggaaagttcctagttcagaagattatgagtagtatgcactgtaaaaaatgtacatcatgtctaaatactaagcctcgtacaaagctctcaacagatgtttttaaatattaataatcatttatgcctcaacctctaaaagatcccaggaagtcagtatcgaaagttagggtcctttattgggggatgtcagcagagaacgtgggacatgaaaacaagtcttaggagtttgagaaggggctcccaggacaggctcctctgctttaaggagcctgtcctgggagaataagcagggccccagtatgtgcagaagttgtcagggggtgcccaggggtatggtgaaggagaggtagtccccaagggcaccccagcggggccggtagatctggaagatggtgatccaggaggtgagcactatcacccagaagaggaagcccacagctgagcgccagacatctgtcatgggaaacagaagctggaagggttggcctccggctgctctccagacttccctagaccagccttcccttctcacccagagccccaacattttggatcctccattgtcccttcccaccaagattccccgcttccccctctcccctgccactggcctccctcctctgtgctctagactcacagcctttgatttggctctgttctgtgtaggctgggacaaggaaggcctctcggaagaaccagaagatgttgaccaaccagagaaaaggcaggaaagcaaacccccctagggagaaagaaaaacaaacaaacaaaccccaaaacctcataaggcaatgaagatcttctccaactcccaccgagatctatttggaagaaactctcccacacccaagttcaaatggagatttctgttgtcagggactcaggaatctggctcctctttgggatccaggaatctgattcctcaaccatctctttcacaggacccaagagtccaggccctcaatccccctcctctcttgggatccagaaattgaggccccagcttcctcattcctcaggacccaggccctccccactcaaatccaggagtcggcgttcgcaggtccttcatctcttagacttaagaatccaggccccgaggccctcttccctcgggtgctctagtccagtcccctctcttctcctgggaccctagcgatctgccttacccaggtagtacttccggcacaggttcaatttctcctcattggacactcgctccaggttcatagctgcgctggggccgggtcgtcccaagggtctgcggggcaagacccaagccttgaccctaagtaacagatgcaaggatcacgaacaaccacgcccctattagaacaaatcagagataaatgtaaaggtcggtttgctgaaagcagggcatccccacccccactagtaagctggctggattaaagagctctttatatttactagggtgggcgaaacgacccccaactcaccaggagagctcacttcctccggctggggtgccttagctactttcagttatggacgtttgcgcgagacgccccaggtttccctggagattgtagtcttctttgggcgaggcaacactgcacgcatgcgctgttaaaagaactcctaccggggagtctatggggagggcgcgcgcctcccacgcgcaagcgccctggggcgtttccgagcgcttggtaagcgcctggagagggcaacgaactacacttcccagtgctcctaagcaacggaagtgacgtaagagcagccagacctggagggcttgggtaaaaatggctgaatatttagcttcgatattcgggactgagaaggacaagtgagaacgggcgctgggagtggactctcggggggtcggggccggggtactggggtcctgggtggtggggcggtgtttctggggtgcccagcttccccggccctcggttcacctttgtctttgcaccttttccagggttaactgctctttttactttaagatcggggtctgccggcacggggaccggtgctcccggcttcacaacaagccgacattcagccaggtgagacccggcacggagcctcgggggttaacggctccctggcccttccccttctggggccgtcgtcaccatgtcccgcctattccgggttcctgagtccctccccaccgcccggctttttttctcattggacctttctgcaggctcctcccaccggtcttcgtgccgttttcccgggaacttggtcgcgcccccatgcgtacaggctacacacggcggctgttcatctttgccagtcccttccatcccgctgttcatccttgccagtcccctccatcccttttctggtttcttaggggcaaaggatcgccgatgcactcatgatgcttaggctggggtgtaaggttccacccccaaccttcatgcctcactctctgttcatgcagccctgccctctgagctcaggccccgccccttttaaattctgtgcagaccatagtgctgctcaacctgtaccggaatccacagaacacagcccaaactgcagacggatcacactgtgagtaagggaccaggcctgggggcaaggtgaacagcccccagtaggctacactctgattccaccctgcccgcccccaccccaggtcatgtgagtgacgtggaggtgcaggagcactatgatagcttcttcgaggtgagggttggtaggggcagatggggtttcttgtgggagctcagctgagttcctccccgtcttccacaggaggtgttcacagaactgcaggagaa

SEQ ID NO: 8298 - DNA, 6000 bp, Homo sapiens
tgtctaaactttaggctcactcctgtaatcacaacactttgggaggccgaggcgggaggatcacctgaggcctggacaacatagtgagaccctgtctctacaaacaaaataagaaaattagcagggcgtggtggcctgtggctctagtcccaactacttgggaggctgaggtgggaggatcacttgtgcccaggtgttggaggctgcagtgagctatgatcccaccactgcactccagaaagggcgacagagggagactctgtggcttaaaaagaaaaagaaactttagtaatctgctttcctttgagtcctgaaaaccaggaactcagtacctttctatttctttccagatcctctctatcctcccacactccctccaactgacccctccgaccggtccctcttagaggctcacccctcacttccgtctccttccaatgcatctcctctcatttacctccaaatagggcagcccctccctccccatagcagggccctcccaggcaggctcctagtggccggcgccggtggatgggggaggggccaggtcgcctgaggcgggggctaagtttaggcacgctggggggagggggcctccccgcagctgttctggcccgtctggcccctgagtgacagcgctgcctggggccgaggctgggggagggggtcctccctgctcctgggccccaaagtgctggctcgaaggagaagggaccccatgctccctctgggtcctccctatactgcccctcggccccctagccccagcctgcagcgctgcggaagcagatcagtaataaaaatgctccggatgtgcaggagataagggcgagtttggaccccgttccgccgacctcagcccccgtccagcccgttccgcaagcccacctttactccccatatcggctccgagtgagaggctggggacaccgctgcttctcggggattttgcccacttcagtagaacccggaggacaggagtagggggggtggggcccctttggacccagccaatggctgtccacagaggtggggacaattccaaaattggaaccgtcttgtaaacagccaaaagcaatgatgtctttaaccattccatagctgttcctggaggcggagcatattttaaagtaaggctgggtcattttacaactggccaatagatgtggtcaggaaaaagagggtttttgtttgttttttcaaatagagatcgagtctccctatgttgcccaggctggtcttgcactcttggcttcaaaggatcctcccgcctcggcctcccaaagtgtttaggattacaggcatgagccactgcgcccggccaaaaagaagagtttttaaaaggcacagagtttacttataaatattctacggccacatctaaataaggagagaactgtattttttcagggatttggcctgtccaaaatcagccactaggaggagcactccagaagagggaggattattttattttatttttattttttgagacggagtctcgctctgtcgcccaggctggagtgcagtggcgcgatcttggctcactgcaacctctgccttccaggttcaagcgattctcctgcctcagcctcccgagtacagacggggtttcaccatgttggccaggctgatctcgaactcctcacctcaagtgatccgcccgcctcggcctcccaaagggctgggattacaggcatgagccaccgcgcccggccggggaaatttttttaaaaagcggagtttatcacgtctagccagatgtgatatcacgtctatctcttcccttttccactatgtactgttcctttgcgaggttggtccctttaattcaaaatcctctcaccttttgccttctgtgggccaatgcagcatcttcatacacgttgcttacctagaaggcgtggctccaccgtgaattctaattggtccgtgctatcgaggcactgtccccttactggctctcgctccagtggcccccactgcttttcttcctcttccagcaatggctcttcgggcccagagttcgaatctcgcgatcgggatggggacggagtaccggcctggggtgtcccagagcccggactgagctggggagtcaagacctcgggcgatgagggctgagcaagtcggagtcgtaggtccagttctgatacggtagagagaggaggccgtgagctttcttcttggaggtgccccaaggagaaaccacccacccctcttggctttggtcccagcacctcggacatctcaccttccccagcttctcctgtctccaatctgttgggttcttggggttcttcgtcttccagcggggtggagctgctggtggaagagtcctccccggatcccgttccccgggccacccagcccagatggtccaaccgaagcctcaggtcttccagagggcgctcggatggaggcgcggtgtcaggatcaccccgtcgtccaggctccggggattggctcaggctggggatgctctccaagctgtcgcccaggctgggctgagggtgctggtctcgtggttccgagactgagcggccctgggggcgggggcggcgggcagttgaatccctgcggcccccggagcccactacaccatcaaaggcgatgtaggagaaggtcagctcccggggggtgccccagtcctgcgacgtggtctcctcctcgtcctcctctgagaattcccgggctgtgtgcagctctcgaaaatcagagtcgtcgttccctcctgcagtgggtgaaggagagccttgtttccctcagcaggtccctgagctgcccagccctgagccccttcacatgctccccaccacttaccttctgtggaatcaggagttgaggaggctgtagacggagcttcttctgcgagagggaaagaatcgaagactcttagaagcttagactgtccgaatcacagaagtgtcccagtcctggaatcttagaatatttgaatcacgggatttttagaacattctgcacacagactctaaaacctagcatcactgcctgatgaagctcagagtctttgaagtccaaatccaggaatcttaatcttagagtcttcaaagtaggaatcttaggaggtttcaattcattcattcgttcaacaaccacttattgagcacctactatgtgccaggcactgttctaggtcctggggatacagctgtgaagaaaacagacaaaatccctgccctcctagagctgacactctttgggatagacaaacaataaacaagtgaatatatgacgtcgggtgcagatgagcatagggagcaaagtaaagaagggtaggggaagagaaagtgaaggggtgctgtttctcatagggtggtcaagaaggcttctctgataagatgacgtttgagcagagatctgaaggaagtgaggaagccatgcagatgttcagggacgtcttccaggtagagaagaaagccagtgcaaaggccctgagccaggcaccatgcttggcatctgaggaactgagaggtgcgaagatatgactggagaagagtgactgaggaggagaggagtgggaggtgagaacagagaggtaagggcggtggggagagacagacgaggtggtcctccctttgtaatctgaagttaacgacaagatcatagaatgttgggatgatactcgaaaatgctgaaatcaccaattcttagaattttggcatctggacacgcgagacatggaaatggctagatctaagggtgttgaaatccccagctgtcagaacccccatgtgtgggacagagaacggtagacatggactgttatagctgtgagctcagagattgtgaggctaggcgttttcagctgggaatccagccccttagagctagttcagagctttgcacatagatgatgctcaatgcggtttggaaattgaaatctgacgccctgtgccctcacctcgtttcctcagctggggaataggaggcctggaatggtgtgggtcttccccaggattaccattaaccagtggtaaagaccgctaagaacccatgagtccttgcccccaaaccacggatggctgttttcccgggacagggttggacagtttgggcgaggtcggggctgcctcttggacagaaaacggggatgggatgcgaaggcaagtgattgggagccagacccctgttttccatcctggctctaccctccgttcaaccccctccccgccagctgcggccagcaccagagccaggggacagctccccgcgcgcgtcctcgctcccgggcggggccgggcggtacgtcccagagcgcagcgcgccccccgcctgctgtctcagtgccccctcacctccgccctgtttcgtccaggtcctccgggtcaggctacccccgtcgccgccagagcgcgggggaggggagagcttcctttgtctcctatgcctcctccccccatcccggctctcctgcgggcaagcgccgaggggacaccggggagtaccccacctgaacctctggggcccacaccaggccccagtcttcctctactcactgcagtgggcgaagaccggcaggacctgccccatggcccccctcgggcctgcatcgggacccccgcccactccggctgtgccgccctgggcccggggtcgcgggcgctcatctccgccgcgcccacgacgccgctgccattctcgccgcctcctcctcccgggctgctccagccgccgccgccgccgccgccgccgccgccgccctggtgctcggctcggcgggggcgggcggggccgaggtggggaaggcactgcagcgcgcggccgggggcggggccagaagacgggcggggcggtaccagagggagggtgaggggcggggaaacgccgaggatcaggcggaggggcgtggccttcttactaaaggggcggaaccaagagggtgggctacggagccaggaaggaggggaaagcggcctgaagggcggggcctagatcgcagagggcgcagcctttaggggaagagggaaggaggcctggagtctggcgagggacttgggagaggatggtgaacgagccacggcagagaggatgagagcgtggatccctgggtgggttggggtggtgctcggggtgccattgaggagggggtggaaagattctaatgctctgaggtagggtccgagcctagatttgcagagggagcgagaaagggggccgaatgaaacgattcagaaacttttggggcacgcggaggagctcaaacgtgggcagggctaaagcaacagggaattattcaaatataactgggtggggtcggattccaggcgattccaggtctgcgaaaattagaagggtctggagctgtgtgcctgaatcctggatgggcggggcctggaagagaaaataagcgaagccccagaggggaggggtcgaactaaaaacagtaaagaaaaaaaaaatatgtatatatatatatatatatatatatatatatatatatatatatctttttgagacagggtctcgctctgttgcccaggctggagtgcagtgatacgatcacggctcactgcagcctcgacctcccgggctcaggtgatcctcccacctaagcctcctgagtagctgggatcacaggtgtgttccaccgcgcctggctaaatgttaatttttgtagagacggggtctcgctatgtttcccaggctggtctcaaactcctgggcttaagcgatccgcctgcctcggcctccctaagtgctggggttataggcgtgagccaccgcgcccggccaagtatggtatttacaggttttgaggctgggggctgtaccactgaggtgggaggagcttggactgagtgttgtgttgagaacacagattctagaattagtttccctggaacaccggttacttctgtgactctgtttcttcttccatatgtaaactggagatgatgatgtataacagtgtgtgacacattagtactatgtaatagtttgccactggtacagtattatcttttttctttttttttc

SEQ ID NO: 8299 - DNA, 6000 bp, Homo sapiens
cttactagcaaggtgacccagagaccccatcatttggcttccttgtgcctcagtttcctcatctgtaaaatgcagagagcaggatggggcatggtagctcatgcttgtaatcccagcactctgggaggtggaggtgggcagataacttgaggtcaggagctcgagaccagcctggccaacatggtgaaaccccatctctactaaaaatacaaaaattgggccgggcacagtggctcacacctgtaatcccagcactttgggaggccgaggtagatggatcacgaggtcaagagtttgagagcagcctggccaacatggtgaaatcccgtctctactaaaaatacaaaaattagccaggcttggtggcgggtgcctgtaatcccagctactagggaggctgaggcaggtcagaatcacttgaacctgggaggctgaggttgcagtgagccgagatcacaccactgcactccagcctgggtgacaggttaagaccttctctcaaaaaaaaaaaaaaaaaaaaaaattaccgggtgtggcagtgcatgcctgtaatcccagctacttgtgaggctaaggcagcagaatcgcttgaacctggggggcggtggttgcagtgagctgagatcgcaccactgcatttccagcctgggtgtcagagtgaccttgcctcaaaaaaaaaaaaaataaaataaaatgggaagagctagaatccgtgtttcctgggttgaaatgaggatttaaagaattaattgatgggggacacttacagcagtgcccaacacatagtaatgctagtaaatgtcacattttactatttgtttatttttggggggattttagctgggattacaggcacctgccaccacatccagctaatttttgtatttttactagtgatagggtttccccatgttggccaggctggtctcgaactcctgacctcaagtgatccacctgcctcagcctcccaaagtgctgggattacaggcgtgagctaccatgcctggcccaacagatgtttgtttgtttgtctgagacagagtcttgctctgtcacctaggctggagtgcagtggtgtgatctcgcctcactgcaacctccacctcccgggttcaagcaattctcctgcctcagcttcccaagtatctgagattacaggtgatcaccaccacgcctggctaatttttgtattttttgtagagacagggtttcatcatgttggccaggctggtctcgaacgcctgacctcaggtgatccacttgcctgggcctcccaaagtgctgagattttaggtgtgagccaccgtgcccggctccaacagatgtattttagagtttggacttgaattcccccaaggcagcacatctggaaggcacgtgggcactgctatgggatgacaaactgggaggagcctcagtcccccaccctccccgaccccacgtacgcttatgagggagagagaaaggctggtggttctcaacatatgaaaaatatcaacagagaacaccaagagaaaaagtggactgacagaggtggttgggagaaacacagaaacacacacacacacacacacacacacacacacacggcaggcacattacagaggaaactagcagatattaggatatgaggggggaaaatgcagatacactcagaggccaagtgcacgcacccaaataggttaggtgcatgcacagatgaaaaggcgggggcggatcacctgaggtagggagtttgagaccagcctggccaacatggggaaaccctgtctctactaaaaacacaaaaattagctgggcatggtggcacactcctgttgtcccagctacccaggaggctgaggcaggagaattgcttgaacccggaaggtggaggtttcagtgagtcaagattgcaccactgcaccccagcctgggcaacatgccaagactccatctcaaaaaaaaaaaaggaagctggccgggcgcggtggctcacgcctgtaatctcagcattttgggaggctgaagctagtggatcacaaggtcaggagatcaagaccatcctggccaacatgatgaaactccgtctctactaaaaatacaaaaattggccgggcgtggtggctcacacctgtaatcccagcactttgggaggccgaggcaggtggatcacgaggtcaagagttcaagaccagcctggccaagatgttgaagccccgtctctactagaaatacaaaatttagccacgcatggtggtgggtgcctgtaatcccagctactcgggaggctgagacagaattgcttgaacccgggaggcggaggctgcagtgagccgagatcacgtcactgcactccagcctgggcgacagagcaacactccgtctcaaaaaaaaaaaaaaaaaaaaaaattagccgggtgtggtggcatgtgcctgtattacagctactcaggaggctgaggctggagaatcgttgagcccaggaggcggaggttgcagtgagccgagactgcgccactgcactccagcctggcaacagagtgagactgcatctcaaaaaaaaaaaaaaaaaaaaaaaaaaggaagttatgtgcgatggctcacgcctgtaatcccagcactttggaaggctgaggcaggcagatcagttgatgtgaggggtttgagaccagactgaccaacatgacaaaaccctattaaaaatacaaaaattaggccaggcgcagtggctcatgcctgtaattccagcactttgggaggctgaggcaggtggatcacctgaggttgggagttcaagatcagcctgaccaacatggagaaaccccgtctctactaaaaatacaaaattagccaggcatggtggcgtatgcctataatcccagctactcgggaggctgaggcaggagaattgtttgaacccaggaggcggagattgcggtgagccgagattgcaccattgcactccagcctgggcaacaagagtgaaactccatctcaaaaaaaaaaaaaaaaaaatacagaagttaccctggcatggtgacgagcacctgtaatcccagctacttgggaggctgaggcaggagaatcgcttgaacccaggaggcagaggttgcagtgagctgagatcaagccactgcactccagcctgggcaacagaacaagactctgtctcaaagaaaaaaaaaagagtaaaaggcaggcatgcgtcctggaaacaggtgcacacaggacaaatggcatggaagcagaaaggagataggtacacaggcccccagccctctcctgcaacaggaaaccagtatagacccagaggacacagtagagaggaacccacggacatatacacatagagaggttcaggtgcacacaccgagaaagtgcaggcaggtagacagcaagaagataactgcccacagagaggacgggcactgtcgcaaaagggacaggtgaacacgcacagagggatctggcttggttacccccaggggctcaggtgggcagggtgggtcaggaaggcttacctctctgttattcctctccaaaaatgctacggctgttgggctgaccatatggtccttcatttcctggaggtaaggacagcattagggaggaaagacactcaggctgggcgcggtggctcacgcctgtaatcctagcactttgagagaccaagccgggtggatcacctgaggtcaggagttcgagaccagcctgatcaacatggtgaaaccccgtctctactaaaaacacaaaacttagccgggtatcgtggcaggcacctgtagtcccagctactcaggagactgagacacaagaatcgcttgagcctgggaggcggaggttgcagtgagccgagattgcaacactgtactccagcctgggcgacagagcgaggctctgtctcaaaaaaaaaaaaaaaaaagaaagaaagaaagaaaaaaaaacacactcaaaccttcccccactccccgcctgcaggacctttcctgacctggactgcctctcgcatccgctccacgaacacctttctctcctgcaggtccccggctgggagcttgaacttgcctgggttggcttccactatacgtgggctgagagtcaagggtcaaggccggagccagatatcatccccgtccctaggggtccagccctacccgaaggtgggctgccaccgcaatgggctctcccatgccaccctctgccacaaagccccaggatatcgatggtctcttccaggtcctcgaggtcccactcgatgctgcgcaggccattccgcagctcattggtcgtccagtccagctcctcgcgtccgaccgccgcgctttcctgcaggagctcgcaccagcgctggtacagcccgcgggccgtgttcaccgccttctgcacctcgctgcgggcaggggcacggcgggcgcggctgggggcaggcggtcctcccgcctgcctctgcccccgactgcaaacccaaacgcatgggggactccggagacccctatatacccctgcgtgcgcctcccactctgcaccccgacggccttgcccagcccgccgggcacgctggggccggcacccgggcactggctggcttgggtacagagcaccctccgccctcccccgtcgttgtcactcaccctcggactacaaaaaaggggtcttcgagagacatgtcagtcccttcccccccaggccgaacccccctcccggcctgggttcgcgggctggttccctcccaaccgaggagaacgcgccgccacccccgcccccgtcacgccaccatcgagagccggaccgccaggggagaaagagaagcctcggaggcccgacgtgcggacacttccgccctctcctcagccatcttggttgtgggcagaggcagcttccggtgcacatgcccccgccccttagccctctcgtgccgcaccgtagggggcggtgtcggagttctgtctgggcctattcgggtccgagttcggaatttcggttcaaggcccagttcctcggattgttcctgcgcaacttcagtttcccttccaggcacgggcaatgtaaataatgatagcctccctcatctctggcggctgggtattatggctggggaaggggctcattcgattcgttgaagcttttcatggactccctgagctggcacctgggagatcgtcccatcccagggtcccgagtgtcaggtttggctagggtctgggggagaggtggtcctcccttctccctgcgggggcgcggtgaggagcgggcctgctcctccggggagttctgccgcattctcccaatctctttcctgagaagtggcggagttgggggcacttcgaggtcgccttggggcgaggtggtcgtgagggggtcccagatatgccagcagcggggggaggtcacctttgagaaagtgcgtggaggtgggtttcttcagaagcgcggagtctttctgggtgcgagcctgggggtagcgggtggtggctttgaggatggtctccaggggggccctctgtgtgtggggtctccgtctgggtaggggccaggaatatcagcggagggactcagggtcgtccctatgtgtgacagtggcgctgtgtgttggggagcttcgggaaagcactttttttgagtgatagggggcctggtctcccctggagggtgggcgggttatctgagggagtcctcggagggtcgcccccttgcgcgtcagagttgctgcgtggggtctcagagatagcgcctgggctggggaaatcattgtggggtctccgtggtaaggttagcggggtggggacggcctgcgtcttcggcaggtcgtcgcagtctggcaccatcgttgaatggggacgagtttgggaagggtattttaggggggaataacttttgagttcccagcgtgcgggggaagggcgggacgggagggtgtcccaaggcctgagaagatcagtgtggggcaggggtcaggaataacctgggagggggccttgtatgggggaaataattgggaagaggagagatgggatgaag

SEQ ID NO: 8300 - DNA, 6000 bp, Homo sapiens
agctgggattacagatgcgtgcctggctaatttttatgtttttagtagagatggggttttgccatattggtcaggctggtgttgaactcctggcctcaagtgaaccgcccgccttggcctcccaaagtgctgggattataggcatgagccactgcgcccggccagaaaaacaaactatttaaaaagcaaaatgacaaacagaaaatcagcagaatggcaatcaagatttttctgctctaatagcaaagaaatttctactccgcctgttttcccaatgccaccagtttgctgcccgcacacccctgaaaccccatgcatgtccgctgatggtgaccaaatacctttttggagaaaatgttctgaagcgagaagcacagcgtggcggcgagggcgctgacgagtccccacatgtcaaaagacaactcggtgacggtggccagcaggacaccgctgatgatggggatgagtgacaagtatacctgcaggaagaggtcatcaagaagggctcacaggccagactagagctgggccacatgccacagatgcccagggaagagcccctctcctccctcagcaaagggataccacctaacactttgaaagtggtgtttgctgtgccagtgacgctctggtgggtggctgggggcaggtggttatcagagcgccaggggcagggcttatttgtgggtagccccatccccataccgtcacccccattaagagcctctgctcagggccacagcccggggctggtcctaactccacagatctgttcagctgccactgacgcaccagggtttgaagccctgatcctctataaggctcccccattccctctttttaaaaaatagtttttttgagacaaagtctcgctctgtcgcccaggctggagtgtagtggcacaatcgtggctcactgcaacctctgcttcccgggttcaagcgattctcctgcctcagactccccagtagctgggattacagggatgtgccaccacgcccggccaatttttttgtacttttagtagagacaggatttcgccatgttagccaggctagtcttgaacgcctgatccacgtcatccatccaccttggcctcccaaagtactgggattacaggtgtgagccactgtgcccagcccccattccctcttacttcaggctcttccagtatggttactcctggctggcacactccactgatgccttctcctcccagtgacctcctgcctccacaaggagtgctttctccaacccacctccaccttgggaggctcctgtgctgtgctcccagggccactgcctggacttccccagcagagagctctccactcactctttttttttttttttgagacggagtctcgctctgtcaccaggatggaatgcagtggcatgatctcggctcactgcaacctctgcctcccaggttcaaccgattcttctgcctcagctttctgagtagctgggactacaggtgcctaccaccacgcccaactaatttttgtatttttagtaaagatggggttttgccatgttggccaggatggtctcgatctcttgacctcgtgatctgcccaccttggcctcccaaagtgctgggattacaagcgtgggccaccgtgcccagcctctccacccactctgtctgttacatcatccggtcccgttagtgtaccttagagcaggtccttgttcactgctttatcctggtgcctagcactcagtaggcactcaatagctgctagctgaatgaacgagtagcaaacatagtgacagagagccttctagaaggtctggcatgcagggctaaacaactcccaacttccaggatccaccaggatccattcccgcgtgtccagctcttctgactctcggctcaatcctgtcctacaaagaacactcttcactttgggaggctgaggagggcagatcacttgaagtcaggagtttgagaccagcctggccaacatggtaaaaccctgtctgtattgaaaatacaaaaattagccaggagtgatggaacgcgcctgcaatcccggctactcgggaggctgaggcaagaatcgcttgaacccaggaggcggagcttgcagtaagctgagatcgcaccacggcactccaatctgggcaacagagggagactccgtctcagaaaaacaaacactcttaaggagagataggagaggtggagattttaggagggagtggtcatgccacaaggagggcagaccgagggctgtggacctgaattccagcttcccgaatatcaggctgtggccctcaggcacatgattctcccctctcagtccatctcaggaaaacctgagatcaggaatgatgactactggccttatctgccttgcagggcaggttcctagaagttatgatgtcattataattagtctggctgcctaaccgggccaattcccagtctttcctcactgtgtgaagttccggctccttgcccaagctgggtacaatgtcccgtacaacggggaaacctgatacacacgatgatatccggtgatgcagctacacacctcagggacaactctgacttctcaggagccaagtcacagcctgacatcaccctgggggagcagggctacagagcacacacaggtcttgctgagacaaagacaggcaggaataaaaaaaaatcagccataggtggcccaatttctataagccgatccagggcactacctctctgagttacataaaatacaacatgccagaaaccaaccacttggaaaagaggcacggtgtccagcatcagcatgaaatggattccggctgagacaacaagcgcccaacttccacttaagaatacgggataaagctgtctccggctaaagccatggctattcttgccccaagccaggaaataccctggcttggcatcttgaacagaatttggactgtgcccaaagcatcctccttatgcagccctgagtcctgtgtgccactttcgcttccgttcccagaccatcacaacttctggctgttttaatttctaagactttgctggattttgccaagatcgaactccttggatcgcgtctggcttctgatcccagaggtcccctgacagaaatctcttgtcaagaagtgaaaacctagccaagtgcagtggctgacgcctgtaataccagcactttgggaggctgaggcggacggatcacttgaggtcaggagtttgagaccagcctggcaacatggtgaaaccctgtctctattaaaaatacaaaaaaattagccaggtgtggtagtgcacgtctgtagtcccaactacttgagaggctgaggcaggagaactgcttgaacctgggaggcggaggttgcagtgagctgagattgtgtcactggacttcaggctgggcaagagtaaaactccgtctcaaaaaaaaaaaaaaaaaagtgaacacctaaccgacagcgttctgatccatccatccctagtcccactggaaaggccacacatggggtgtatggccaagatgtgaccaacccatcacctaccagcaaacccaggtagggaatcaaaacggggaggaaaattggatctgaaagggacaacagtgttcctaagaccacacagcagagatcacagagggacacatactccacacaccactgctcacagggtgattctagaacttgagtagtaaaaggccactggagacctctacactgacttccctatttgacgggaagccaggcagcctgcagaccaggatcctgaccacgtcaccagttggcaacagggaggaaccccctggagctcccatctgcccagagtccctgcccggggttaccttggtgctctgcttctccttcataatgatccgggacaggaggaccacccagatgggcatggtggccttgactgcaaagagagggatgggcactcagggggctgcctgaatttcagggcccaacctgttccacctccacggcgggatgggagggcctggcagcccctcacacctcttcgccccttctctttcggtagggcttcctcctgccacggctgttgtggtctgtcctgcttacctctcagctctcttctcagctcctcttctccctgagaaccccgtgcgtgtccctcccctaccaaacccttggcagcccctctgctgacttctcagtccggcgggacgcgccccgggcggcgcactcctatccatgcgcccaaacccgaagcggcgggcccggccgccgcccccgaggccgggcgcggaacctaccggtgtgtgcataggacacgggcaccttccagatgctgacgtgcgctgacacggacgcgaagtacttgccgaaggcgagcggtagcacgtagcgcgggtagaagcgcggcggcagcagcgggccggacgacggatgcggactgggtccggggcccgagacgggcggcgcggggggcacgcgccaggcgcgcagcagcggcgggagcccagcgcacagagccaggatgtggcacagcgacacggtcaccgggaacgggaaggcgctcaggatcaccttgttgaccacgttgccgcccgcgctcagcgcgtaccacagcaggcacagcgccgccacccgcgcgccctcgcgcgccccaccactgctgctcgctgcgcccgggccccccgcgccgtggcccgcgcccaccgcggccgccgccatcctgcccgagcggccgccccttccagcccgtccgacggcccgacgccgggcgggggcggggctgggcgggggggcaggcgccccggtctacgccgtttcccattggtcgctgcctcctcgcgtcatccctccgcgccggccgacgcgccagccaccacgtctcgagtgcaggcccagtccactgtagatgcgcttccggcggagccgaggccggaagcggaagaaggggacacagacctgcgtccaagctgtgccacctgagacgtgggcggtcccagtgaccgggagccggagctcgaacgggacgggcgaacagaagcgcggagggcttcgcagcgtcggcgtctgtgcgtgggccaaacatcagggcctcgaccagggatacaagggcaaccgctaactagattcctgattcctgatggctggcggcggctgacaccaaaggtaaaaggccttttagggaaagaaaccatttgtgaaaagctcttgggctaaactcgctctgcaaactgggggcgcacgctcgtggccaaactctggcagtgggactatcccggagcacccgatccctggaatcatgttctggaaaccaccgcgacgtgcgcagttctcgggcgtggccctggtatcatcccactgaatcctaggaacgcggtgcggtaggtatcactgtccgcatttcacagaccgaagtccagaatggggaagcgacttgtcttaggcttcctggccacactggggaccgtggtcatggtagcgtccttggacacctgtctccaaggctctgcagaagggggaggtgccgggccctgacggctgatgtccaaggaccagccgggatggaccagccccaggaggccccagtggaggaaaacaggacgaggttttcagtaagatgatcttatactaattcaagggctataatttgttctccacatcgtgtgcctccaactttttcggggaaagggtgttaaaattccgttacagtgtttttacttgtcaaattagaagcagcaaccggctgggtgcagtgagtcaagcttggaatcccagcactttgggaggccaaggtgggcggattgcttgagctcaggagttggagatcgtggcatcgataacatggcagaacctcatctttgcaaaaaatacaaaaattagccaggcgtggtggcgcacgcctgtggtacccactactagggagactgaggtgggtggatcggcttgagcccaggtcaaggttccagtgagctatgatggcgccactgcactgcagcctgggtgacagagcgagacccagtctcaaagaaaagtagaaagcagcaaccc

SEQ ID NO: 8301 - DNA, 6000 bp, Homo sapiens; identical to SEQ ID NO: 831

SEQ ID NO: 8302 - DNA, 6000 bp, Homo sapiens
ggctcctcctcctcctcctccaccagtgtcgctggctgggagctcaaatggtgtcagcttctcaggtgtcaccttggtgtcctcgtggccaactggctgcctgtggtttggcacacagtgcctgcgctggctcaacactgaagcccgagcttcctggggcggctctgtccccacgcctgcgccacagtgaggttgaacttgactgtcttttggtccccagagctagagccggtgcaggccacgcagaacaagacagggaagtatgtgccgccgagcctgcgcgacggggccagccgccgcggggagtccatgcagcccaaccgcagaggtgaggggcaccccgacgccaggctggtgggtgggcacctcccggcacctcgtaattatccccgaagcgtgcacacgagggctgggcagcacacgagggctgggcagtgtcctccccctcacagccacctcccctctcccacacagccgacgacaacgccaccatccgtgtcaccaacttgtcagaggacacgcgtgagaccgacctgcaggagctcttccggcctttcggctccatctcccgcatctacctggctaaggacaagaccactggccaatccaaggtgggcaggcaggcaggcacggtggggctgtgtgagggtcacttgtcctagggtcgcctgtcctagctcgtgcccgaccccatcccgcccctccacagggctttgccttcatcagcttccaccgccgcgaggatgctgcgcgtgccattgccggggtgtccggctttggctacgaccacctcatcctcaacgtcgagtgggccaagtaagactccatccctgccccagcccctgctccctgccttgtcccagcaccttcacggagtgttgggccaaccaatagccctgagccaatttaacagtcccccggctggttttgaggggacagtcctttattgtttttttccaaaaccgggcagaggggtggcagctcttgtgcctggggtccctgccagtccgtggaccaggcctggagactggccatctggctccgtgcccgcttcgtcctcacattaccccgtcctctgcccacccacccccaagatgccacttgggtgtctggggtcttggggtgcccccagaagtcttatacctgccaccctcccctaccccaggccgtccaccaactaagccagctgccactgtgtactcggtccgggacccttggcgacagaagacagcctccgagagcgcgggctccaagggcaataaagcagctccactctctctacttggttctttttgttcttgcgtctccagtcctgtggcgggggccagtgcctcccctcctctgggcgtggtctggtccctgaccctgcagggagccctgtggccagcgctgtgggtgggaaaggcgactgctcctgcctgggctgcagctgggcctgacctggctgcaagcacaggtgttgctttttgggggaagggatgtgtcggggctcgggccctgccctcagggttctccagcaacacctagggtgaggaggcagcttccgctaggccacatcattggctcagctcacgggactggggctctgacggtttaggggcggctgtggcattgaggggcagggcttggccagtgctcttggcgtcctctgggttccagctgtccctgtagccggggcagtgtcggcagcagcagcccaggctgggcactgcggccatgtagagtagagggtggacacagaaggccaggggcatgaggccccgcatcacctggtagcccacgtagggccccagctccagggctgctgtggcctgggctatgtctgcaaagctcgggcagcgggtgctccagcgccgccgagcatccacgttgagcacccgcatgatgtggtagggcacataggagctggcgtagagggccacaccactggccaccaacgctgccacacgcagcttctcggccacagtcatgcctgggctgcgtagcacggcccgcccgagggcgccgtaggctgccagcgtgagcagcagcggcaggccgcagcccaaccccgccagcaccaggctatacgctctgtaggccgccagcccgtggtctgctgtccccagacacttgatgcaggcctcgggcctggccacgctgcagttgcccgccccctgctgcggcctcttcaggtgggagaagctgagtgtgggcatggccagcagggcggccaggacccagccggcagcgctcacggcccaggcgtgcttgggtcgcaggtggcttcgggcgaagaaggggtgcacgatgcccaggtagcggttgaggctgatgcaggtgatgaagatgacgctgcccagcaggttgcaggtgaagaggaagcgctccaggcggcacgcggcctccccatagcgccagtgcttggggggatagaggtaggcggccagcgggggcagcgtcagggcgcagagcaggtcgctgactgccagctggacagagaagaccacggcggggtgccatgggcgctgcttccggatgctgaagcggtacagggccaggccattgctggccacggccaccaggaactcaaccaccagtatgggccacaggaagtccccctggaacccactgagtttgtcgtcggcagctgccaagaagttggcagggcaggacttggcacctgtgggcagaaggtgtcaccagctgagccctattcccccataaggcggctcctgctaccccaagagcccacgtctgccatggcgtggatccctggacacgagttctttcccctccctggagggggaccgggctccactcctttatgtggacaggattgaggctcagagccagggttatgcattgggccccaatggaccagcttaggcgggccaggcagtcttggagctcaaggtccactggtaacacagacagcggccaccctactcccccaccacacctggccccactagaggcctcctccccaaagtccagccccagcaaggcctgccggctccacttcagatctgtgccgtccaaagccccgtgggggtccagcccccactctgccctgaccttggcacccgccgccgcccaaagcctcttctccccgtggccaccagagagcacccgcgagcgctggagtcctgccccatccttttgcttccaggtgctcacacttggccagggagttgccgccaaaaagccagactcaccccacaaggtcccccaagagcgctcccgcccgccataccccccagtgccaccctctgtgctccgcgactcactccctcgcaccagcccacccaggcttcctggctgctcttgcagacttgtgccttggtaccttcgcacccagacttttttttttgagacagagtctcactctcatcacccaggctggagtgcaatgatgtgacttcagctcactgcaacctctgcctcccgggttcaagtgattctcctgcctcagcttcctgagtatttgggactacaggcacccaccaccacgcctggtttaattttaaattttgcatttttagtagagatggggtttccccatgttggccaagaggtctcgaattcctgacctcagatctgcccgcctcagcctcccaaagtgctgagattacaagtgtgagccaccgtgcccagccacacccagacattcttgaggctcctcttcccacgtccgtggtcctgcctgcgagaggccccaaggccaccctaaccactgttgacagcagccctcgtgcctccactctcccttccctgcgttattttcccccataccctgcgccacctgatgacggtgagaaaaatctccctccttcgggaggatgggggggcctgcttacccattactggtgccagtgctcaccacagtgcccagggcacagcagcacaggggcactcactccttgtgcaccccacccctgcctctgcaggctggggacaggcttctccggaggcgcctccctgctcccaacgccagcctgcttaaggaggaagtgtcgtctagacgtggcttttttttggagacaggatttcactgtcaccgaggctgaggtgcagtggtgcaatcacagctcagtgcagtctcgacctcctggggtcaagtgatccccctgcctcagcctcccgagtagctggaatcacaggctcgcatcaccacacccagccttgacctaggctttttttttttgagatggagtttcgctcattgcccaagctggagtgcaatggtgcaatctcggctcatggcaacctccgcctcccgggtttaagtgattctcttgtctcagcctcccgagtagctgggattacaggcatgtgccaccaggcccagctaatttttttatttttagtagagacggggtttctccttgttggtcagggtggtctcgaacccctgacctcgtgttccacccccctcgacctcccaaagtgctgggattacaggcgtgagccaccgtgcccagccccagacctaggtgttttaccaatacccactacccccacctcctgacaatctgcagacccccagagacagccaacatgccttctccttacccgagacgttggctgccatgctcccgtgccgatcctcagcctgtgtctgctacccagttccccagcccctcccccagtcaccagtggcttagtgggccctgccccagccccatccccagttactggcccagccagcagagcaggccagcgtgcctttccacccacgtttccttcctcattgtgccacaaccctcctgaggttcaagctcatctgctgaaagtgtgacctgtctgcttgcacggctctttggtgggactggggggaggggccactcatggctgctgctgccaccaatgaaaccaaccccgtgcagggtaggggagagacccagcttccaggaagaaaccaggtgggagggactctcgggtgtggccggcccaggactctctgggttgctttgtatggctccagaatcccccatcccaaacgctgacgtggacccctggccaattcagttctttactggagtggaagggctggggacacaactcctttatgaaaggaaaccgagggccacatctcgggccccaatctggggcgttcaatccagccgctgctccggtgcggcttgggctcaggccactctcttccctgggcggccccggccccggcctcgcccaccatcccgggaagcccctctgggcccccgcctggcctgggctccctgggacttgtccttggtcttgggaaacttctggtcacaaaggcgacccctgcctcgatccatttcccaccgcttccgcttccgccctggagacttggcaagccgtttctgcttggcctcggggaacaggtctgtggggagagacagtgtcagggcccccagagacaaggacaggctctgggtgccctgctgcagaccccactccataccctcactgggcgcctcgcccaccgcctggcagaaatactcgatgtcatcatcttcctgttcatcatcgtcctcacccaactccaggctcgccgtccttgaagggatcccagaggcctcttcatcactacccccgacccgtgccttcttcatgccctccaggctcttctttctggaggagggcgtgggggtcaacatagccgcccatcccagggacccccccttggccctgcccttcccagctctgcctggacctgtgggcctcccgctgctcctgcttgcgctgcacattctgggcctgctgggcctgcctctgcgccttcagccgcagcttcttctccttggcttccaggatggcctgcagctcctcctccgtcttgctcactgagccaagagacgcgggtcaccaagatccgggtgcagctccacacccatgaccccccacccccggcggccccggcctcaccaaaactgtggaacatcactttgccctccccgacgccctcctggaccttgatgagctgcagtgtcatccgcgggccgatctgaggggacgaggaagaagcgtcagccc

SEQ ID NO: 8303 - DNA, 6000 bp, Homo sapiens
gctcaaagcaacctccatcttccaggttcaagtgattctcatgtctcaacctcctgagtaggtgggatgacaggtgcccgccaccacacctggctaatttttgtattttttgtaaagacagtgtttcaccatattggccaggctggtctcgaactcctgacctcgagtgatctgcccacctcagcctcccaaagtgctgggattatagggatcagctaggaatttgaacccagagctcagttgtattccagggcagtacatggttgaactaattcatgaacaaaacaatgcaaaatctcccttcatcacatcaggcgagggaccctgcagcttgagggaggcgtgagcctgcaaaagtgcagggtgtggagtgagacaatggggcttcttgcattcatttttgattttttttgagacagggtctcctcgctttgttgcccaggctggaatgcagtggtgggaacacatctcactgcagcctggaactcctgggctcaagtgatcctctcgcctcagcctcctgagtagctggaaccacaggtgtgtgccaccatgcccagctagttttttatttttttgtagagttgggatctcaccacattgcccaggctgctattgaactgctgggctcaagtgatctgcctacctcaacctctcaaagtgctgggattacaggcataagccactgtgcctggcctcaaagcacttaatatatttgttttatttttttaaattggacttaatatatttaattttcacaacagtcctcttaaaaatcccacttagggaattaaggatccagagaggtgaagtcacaggtataaagagaaataggatatgtggtaagcctggaactggactttggttaaaaaaaaagagagaggaaatggagcaaggatttgaacccaagctgcctcaagcttccagggacagatgccacatgacagctgcctctcctgttgttcatcatctgtagatcccctgctgcctgccccccaccgtctgggacagcagctgaaccccgtggtggcgccggcctctcaaaaattccgttagcatttccctagcctgccctcaaattttatgactatttatttatttatctgagatggagtcttgctctgttgcccaggctggagtgaagtggtgtgatctcggctcactgcaacctctgcctcccgggttcaagcgattttcctgcctcagcctcctgagtagctgggattacaggcacaagccacaacgcccagctaattttatataattttggtagagatgaggtttcaccatgttggtcagggtggtttcgaactcctgacctcaagtgatccgcccgcctcagcctcccaaagtgctgggattataggcgtgaaccaccacgcccggtctcgatctttgacagggatatttgaaactttctcccaacataaaggatatgtgagtgcggactgaagaagattctggctctctttccaataaggctgcctctcactagtcgatcctgggtagaagttctggagctgccacagctcagggtgatggcttcatgtcacactggaccgcatccctcctcggctccacatcctcctgtggcacccacctcactgggagtaaaagccagccttctgcatggctcacaaggccttccacgatgtgccccatcacccctccaatgtcgtctcttgcccctctcctctctcactgacctccttgctattccttaaatattccaagcttgctcctaccgcaagacttttgcttttgctgttctctttgcccagcatgctgttcccccagagggccatgtcactctttctttctctctctctttttttgagacagaatctcgctgtcgcccaggctggagtgcaatggcgcaatctcagttcactgcaacctccgcctccctggttcaagcgattctcctgcctcagcctcctgaatagctgggattacaggtgtctgccactatgcctgcctaattttttgtaattttagtagagacgaggtttcaccatgttagtcaggctggtctcgaactcctgacctcaggtgatctgccagccttggcctcccaaagtgctgggattataggcatgagccactacgcctggccgtttttttgttttgttttgtttttttgttttgagacagggtctccgtctgttgcccaggctggagtgtattggcaaaatcatggctcactgcagcctcgaactcccaggctcaagcgatccccccacctctcagcctcccaagtagctgggaccacaggcgcacaccaccatacctggctaatttttgtagagatggggtttcgctatgttgcccaggctgatctcaaactcctgagctccagcgatccaccttcctcagcctcccaaagtgctgtgatcacaggcgtgagccaccgtgcccagccctactctctcttctccttcaagtatttgtttcaaatgtcaccttctcagaaagctttccctgaccaccctatttaaaactataaccttgaccccacattccccatgccccttctaatacatccaataatctacttacctatttacccattgcctcttacccccactagagtgtagtacacagtccataaggccagattttttttttttttttgagatggggtctcactctgtcacccaggctggagtgcagtggtgcgatctcaactcactgcagcctccgcctcctgggttcaagcaatcctctcacctcagcctcccgagttgctcagattttaggggcgcgccaccatgcctggctaatttttgcatttttagtagagatggggcttcaccatgttgtccaggctggtctcaaactcctggtctcaggtgatccacccacttcacctcccaaagtgcttggattacaggtgtgagccattgcgccaggccgagatatttttgtctgtattgttcattgaggtatccccagtgtctagcagtgttgggcacatatatagtacatgcttaagaattatgtgcagaatgattaatttgtgttttcattcccatattgcagatgcagtaactgaggcgctgggaggttaagttagttgcccaagatcatgcagtttttttttttttttttttttttgagacggagtctcgctcttgttgcccaggctacagtgcaatggcacgatctaggctcactgcaacctccgcctctcagattcgaacgattctcctgtctcagcctcccgagtagctgggattacaggcatgtgccaccatgcctggctaattttgtatttttaatagagatggggtttctccatgttggtcaggctggtctcgaacttccgacctgaggtgatccgcccgcctcggcctcccaaagtgctgggattacaggcgtgagccaccgcgcctggcctattattattatttttttttgagacggagtctcgctcttgttgcccaggctggagtgcaatggcgcgatctcggctcactgcaacctccacctccccggttcaagccattctcctgcctcagcctcccgagtagctgggattataggcatgcaccaccacgcccggctaattttgtatttttagtagagacggggtttctccatgttgatcaggctggtctcgaactcccgacatcaggtgatccgcccaccttggcctcctaaagtgctgggattacaggcatgagccaccgcacccggccgagggtgacatggttaataacaatattagccaaaaacaccatgtcaagctgagcctaccacaagaataaactcacagaatcgtcacactcagccctgatgtggatgtccccgtgtgcattttgcagatgaagctgggattggaaaggtgccataaggcagtcaaggtatccagaggtgtagtggtggggctgggattctgacacaccccaggtaatgggctgcagtaccccgtatgttatgtgagatgtgacacggggaaatgacgaagacacggagggaagaaaaataactgtaaggctgggtggctccttatggggaaaactggaagcatgaggagtggatggtgactggtcagaggaacagtgatgccaagggagggacaaagacacaaggggtaatgatgacgtaagagttgcattagcgcgatttaagaagagcgatggggacagtagccatgcgaaggtgacttgggggtatgatgagggtttaaagagaaatgaggattttataaaggagaaatggcaacaaaagcaggatgcaggtaacatatggcgatgacgaatttaaagggagcgattacgacctatggtggcaaagagggcttacagggaacgaaagcgagttaagggcgttgatgacaacaagaggagttgtgaggatttaaagagggtgatggcgacagaaggagttgtgaggatttaagtgggatgagacagaaggagaggaatggtgacataaagagaccgaggacgacataaattatagcgtggaagacaacgctataattatatatattatattccatatattatattccatataatatatattatattccatgcattatagcgtggaagacaacacgaggagggtagccgaggcgccgcgcccccagatcgcacagtacctgcactccacgtctcccactccgagacccagccccacacgcaccttccaggctgtatccccgcctgacggcccctcctagccgcgcgcaggcgcactacggctagactgcaggccggcgggggccaggcatgcgcctttctcattggccgcgccgcttgctagcttcgggcggaggggagcgccgggccgacggtgggcggtcacgtgacggttacgactgcactctcgctggtgtcggtgggcggtcacgtgatggttatggccgcactctcgctggtggcggcctgttggggtagagcggccgcggacgagtcagttcagcttccggcggtgagaggatgcttccggggcgggcagcccgggccgggggaggagtgtctgacagttggcgccgccgggagggagggcgggcggcgcgagtgggcgcgggcccggtgggccaggtgaggcgcgggccgggggtggtgggactgggccggttgcggtagggacgggtggcgtccgggtgtctggactcagttcgggctccgttgtacggcttcggacttacgatttgtttctttgagcctcagtttcctcccctgtggaatgggggttagaatccgactgtatcaccggctttataaatgggagtgagaagtcaggtcgtgtacgttggatgccttagctcagcgcctccgcataacgctcacttcgttactatactattattattagtattgatgtttgagcgcttagtatgaaaaattgttgggtttggaagccgtcgaattttggttcaagtcccgctccactgtgcggcagtggggcctgtgtcttcgcttccttgaaccccgttttttctcatctgtacaatgagagcagatagtcccaatatcatagggtcgtcttgaggattctgatgaaatctgtgtgtgtaaagattttaagcagaggggctggcacagtgagagctcgtggattgggactataatgataatgattctgagagtcattggtgtagctgggaattccagggaagctgggggagaaagctcagagacagcaataggaaaaacttagaattggagccggggaaatcgacatcctgtcacttactatttgaccaattttgctgagtcctgaagtactagtttttttctttttcttgataatgactagtgcatttttttccccagtaagttaatttgagaaggcaaatttgcattgctgtcttcttcttttttttttctttgagacggagtttcgctcttgttgcccaggctggagtgcaatggtgcaatttcgtctcaccgcaacctccgcttcctgggttcaagggattctcctgcctcaaccttccgagtagctgggattacaggcatgcgccaccacgcccggctaattttt

SEQ ID NO: 8304 - DNA, 6000 bp, Homo sapiens; identical to SEQ ID NO: 3304

SEQ ID NO: 8305 - DNA, 6000 bp, Homo sapiens
agctccccgcagtctcactcctcattgggggggtctggtttaatctcacggcccaggattacgtcatccaggtaggtgtccgtcataatgacgccacagtgatgtaatatgactggagttgagagggtggagctggtagttggacatcactagggccggaaggggccacagaaacatttcttgtccccggggttgggggcggagagagcacggactcccagggaaatggtggttcctgcggcctggacacccagttgccgccttgtcgccttgcagtttgctcagggtgacgtccgcctctgcttgtccggcttccgggccttggacatcgcttcgcctccagtacctgtgtggatcctcggcgacgttttcttgggggcgtatgtgaccgtcttcgaccgcggggacatgaagagcggcgcacgagtgggactggcgcgcgctcgccctcgcggagcggacctgggaaggcgcgagaccgcgcaggcgcagtaccgcgggtgccgcccaggtgatgcgcatgcgcaccgggtagcagagctagcgctactcagtaaaaatccaatatttccattgaacgaacctgcctaggttgcttcttttcagagcgtactttttgaagagaaagctttgtgcatggacccacggagttgaggaagagagggaggcgaagggtatcaccccttttctccacggcgcacccttgtgatgggccttgtactacgagtcccatgaaggccctcgcctacgctgcctttcgtcaaaggctcctggctccgtggagcatcacggtcgttgtagtccacgccgtggtcacgccctgacgggggcgggcgcagccacaacatgcgtgggaggcgacaggtcgcgacggcagccacaggtggcagtcgggggtggctgtaattggtaagggtttaccagttcctgttctaaggggcggggataccgttccctcggacctcgtctcctgtttctcctctctgccttggcattccaggaccccggggtccgccataaaggcggagcttgaagcccctgggttgggggagcggtgctgcccctcctccggcggtgatgtcactcccccctctgcagcctcttgctgcccagagctgccggggctgggtcacccctccccccatctcgagccccggattcccccatccccacctcgcctcgacttggggtgagtacgggggagggggcgaaggctcagggtccgggggcggtaagacagcccgaatcctagttttggagacgggggacttgggatccagggacccaaagattatagcggggagattcccctcgactctgagctttcggggccaaggtacttggagggttttaggggacgaaggatcgtaggcagagagtcctcacattttcacctttggtgtccagagaccaaggctccgaatggaaccgggtgggaatgggggcagaggaacaaggaaggggtcgtagaagtcagggagggaagacccttccccaattccagggcctggggtaatgggggagggagggttatcaggggacgccgaagatgacgtagatgggagttggagctttcaggaattttgtgtcttgagggcctgggaacggatggattgggaggagcaggggtggggaaaggaactgaaaacgagacagacgttggcctctcccctcctggtgtccctagtcaagagtcgagtctacttcctcctggtctgtgaacatagctgagtgtccagtatttggagccctcatgaagcttccagaagccccctcctctctaatgggtgggtggagactccaggctcacaaatcctcccatagaccctggtggggtctgtggagggccatgagggagtgctggcatccaagtttcccagggcctgatggaatgtggacggaccagcctgctactcccggcccgctgcctcttcccctcccatggcctctaatcctgagtcgcatcgcacattcctccttattccagccccttttccccacagcccccaccttctcccacacttctgacctctgcaaaaaaacgctgatttagccacttgataccgtgcctggctgctgtgaaaagcagaagggaaaagcagggttgaggggggagtgtggaggaggatggcgaccgaggtccttacctagcccatagtgcctacccagcccttgctcctgcctccaccaccccacccccaattgcccaggagcctcatccagccccagcccagtccctcacctcaggattctctgcttctgcctgggggtgcaccagaattcggggaaggggtaggaagtacctatgtcttttctgtgccctcttggattccatcagaagctgaaggacatgatggattgggtgcaatggagagccctgggtctggggagtgagggcaacgaccttcctgggctgcaggacaggccccacttctgcaactctctctgcagtgacgcagtcccagctaggacgggggttagagagggtgatggggggtctgagaaaaaggaacggagacccagagagagggggacagggtccccaggaagtggagacagagacctagaaagagagagacccagaagaaggtgaaacataggaggaatagagactcagggaggggacatagagaaagtgaagaggcagaaacttagagggagagagagaagaacagagagccagcaagagaaagagcagagacagaggagggaaagagacggaagagggggaaatacaccagagatggggagaaggggaagaaggagggggaaatacaccagagatggggagaaggggaagaaggagggggaaatacaccagagatggggagaaggggaagaaggagggggaaatacaccagagatggggagaaggggaagaagaagggggaggggaaagaggttgtcagagagcaaggaggagacagactcagatgaaagggcagagacccagagaggaggcaggacaaagcgggttgcggggagggagtagaggacagggacacaagacccagggagtgcggtacagagccccagacagagaggcacacccctgataaaatggtacagaaaccaagagaaagagactcgggggagctggggtgggggggcggggactgagacaccagggaggagagactgaggcctagagagaagaggagcaaagactcagaaggagggggacagaatcagagacccaggagggcagatttacaaacgaggggtcggagactcagaggggtgggaacagagacggcggcacaaatactcaagaagggagaaaaagagacgccaagaaacccagaaacgggagcgggggtgggatggggttgggaggcgatacgaatcagccgccgcacctgcagcaggaagcggcgggccagaaactgtgctgcccgagggcgcccgcagccccctgacccgcccccttcgctcccgcaggcgccgcctcctccctccgcagccccagccgcagccgctggccccgccccagccccctgagcctgcgctctgcctctcggagcctacgaccgcccagggggcggggacggcccgctccgaggcggtcccctttttctggccccgcccctcactccattcttccccagaacccgacctctgagactcctagcccaccccattttttatcggtcctgcctatattgcctcagtcttgacggtgcttcctggcgctttggcctctcccctctcccgtcctctctgcctccttgcgtgccccctcctcaccagtcctcatctaccctcggtcctccaatctgcagtccgccgcggtgtagcgttcgttagaagttctcgcctcgccctttgagaccctgtgacctttaggcagtgccctctcccaggtcttctgatcccgaagactccccgttccaggtccctcccctccatccagcccagtagctttgtactctttgtagtctcattgttcccctgggatccacctctcccgttcctctaccctcccttagccctgccctgccctcgcctaccctggttgctttcaagaccctcaagccccgctccttccttagtctctctttcctaccgcccattcaagacgttttctttttcttttatttatttattttttgacacagagtctcgctctgtcgcccaggctggagtggagtggtgcgatctcgactcattgcaacctctacttcccaggttcaagcgattctcctgcctcaacctcccgactagctgggactacaggcacccacaaccacgcccgactaatttttgtatttttagtagaggcggggcttcaccattttggccgggctggtctcgaactcctgacctcaaatgatccacccacctcagcctcgcaaagtgctggcgttacaggcgtgagccactgcgccctgcctcaagacgttttctatttgtcgaccccactcaccttcctcagtaccactcatccatccggacactcattctccgggcccagccccgactaaccaggcccgccttggagcctcagccccgctccctcccttaggcctatccagaccctctcgggtttccaggactctctcaagtttcaacaccttctcaccgagtctaagtctttgttcttcccgtgtcctctttcagtccagcctgtcccccttgcgcgggaaagtcctccatctctagttcccgccccatgcagtctcatctggaccgtttctactttctgcggccctgtctcttccaagcaatgctcctccccaccaggtcctgcctagcggtgttttaggtgagggcgtgcgatctgttttgtttctctccgcccctttctcagcccaatcaggacggcctctctcatggtggccccgcccctccaggccagtcgggcgtctttaaatagcttggatgtgtcccctcctccctctaccccgcccgcacttttttcagttcagtaaggtctctctctatcgtatctagccccgccttcccctggctaccagtgctgccgaacacaattagtagtaaccggtcccgcctcccttgacgccccgccccgcccctcctccctgctctcttagaaagagccaatcgctccgtctcattggcggccccgactcgtccagctgggtcgcgttagagtgcccgccccactcctcccagccacagccccgccccacctcccccaggccaatcagtttggttcctctcccctaagccacgcccccgctacctcgctcctcctcccacccaatcccgtcggtctctccccccgtgtccccgcccctgcgtccccgcccctcccgccccgccccccgtccaatgctgagctcagtctgcgtctcgtccttccgcgggcgccagggggccagcaagcagcagccggcgccaccgccgcagccgcccgagtccccgccgccgccaccgctgccgccgcagcagcagcagcctgcgcagcccggccccgccgcgtccccggcgggccccccggcaccccgcgggcccggggaccggcgcgccgagccatgccccgggctgccggcggcggccatggggcggcacggcggcggcggtggcgacagcggcaagatcgtgatcaacgtgggcggcgtgcgccatgagacgtaccgctcgacgctgcgcaccctgccggggacgcggctggccggcctgacggagcccgaggcggcggcacgcttcgactacgacccgggcgccgacgagttcttctttgaccggcacccgggagtcttcgcgtacgtgctcaactactaccgcaccggcaagctgcactgcccagccgacgtgtgcgggcccctgtttgaggaggagctcggcttctggggcatcgacgagaccgacgtggaggcctgctgctggatgacctaccggcagcatcgcgacgctgaggaggcgctcgactccttcgaggcgcccgaccccgcgggcgccgccaacgccgccaacgccgcaggcgcccacgacggaggcctggacgacgaggcgggcgcgggcggcggcggcctg

SEQ ID NO: 8306 - DNA, 6000 bp, Homo sapiens
caagagaggtcccgggtcgcacctgcgcaaacagcgaggcctgctcccgagagtggccgaaggggtcaatgtgccaggccacacggggtcgcccatcattgccaaatgtgtcctccagaaagcgcagcccaagtgtcatctggtccacgatggcaccgtagtgggtggctgcctcatcgttcatcacccagccaccattggcgaactccaggcgccctgtgccaggacaggcaaggtcagggtcagcggtcagagccaggagtgggagtagggtgggtgatactgggaatgtgaaagcctgcctgtgtacacatttctggcggaaggacaagaggggtcgctcccaggccatagttcccagatatgggaaagaggccccctgcatggcaggcttcccagaggatgcacagcaggtggggctttgtgggatgtataggaggtctccaaatggagagtccaggcaggcggagcgacacgcatgttatacagcttgcacgtggcatgacaaatctcagaaaccagagatgcagaagcagaagctgggctgggcttcctcttttcacttccttggggtaggctcaccctggcgcacaaggtctcgcacgacttcctgtgtggcatttgtctgctggtgccaccaacgggagaagaaggcaatctccacgtaaatgaagcgacgggtgggatctgccagcaaggcagagatgaccgagtccaggatgtactgcacaccggcgtgctggatgtcattcttgactgtggataacagggataaggctctcagggaacagcagagccaagggggttattcctagacagaggagcccaaaccctggatattagggtagcactggccccaccctaatgtccaggacccagagggattacagggaccatggggatcccagggaccagtccccatcctctactcacttccataaaagtactggtccacggttttgagccagcccacgtcatcatgtgtgtgaggcagcaggtgcacgttcagcatgttcggctgcactgtggggcatgtctgcacagggaccccaaacacacataccttgtcaataacccccgaggtcgggggctgcagagtaagtcttgatctagaggtgagtgactcagagaggcctgatctcgcctatgtgcagaggaggccaggccctcccaggcaggacacacacatacatagttgtgctcatagatacaactccactttgcacaaccccacagggcagctctcattcacactccgggaaaataataatagaagtagctgatgtttgttcagcatttgccgacagcagacggccaccgtgggaggtggggtgatgttatccccagtttccagatgaaggcactgaggcttagagaggataggtgacttgcccaacgtcacacactcaggaagtgtaagagctaggctggaatttcaggcagactccagagtcccagctctcagccagcacctccccccacacatacactgctcaccccctgccacctcctgcccctccaatcccacagttaagtgcagacaaagtctaggcaagcatcccggagacacggaggcaggtacaatcagacacagtcctatactcagatgcgcacagccagacctcgcaatgacacaaagcacgcactcagaccacactgtcatatcatcagccattcactagacacccacaggacagacccacccacacctctagactgtattctgggtttcactctgcctcctgtacgtttcagctcggaggccccactcacctcgtatcccccggcccgagcaccggcagccgccagcaacaaaaggaaaaagcagagaggcgggagcggtggccgcagggcgcgggacatggtccaggggcctgctgagtccaggcagccgcgagcgcagacccccgaagcccgcgcgtaggcgcccatggctcagcagcttcctcctggggttccccggccctggaaaggccgggcaaacgccccgcccccagacccggccgggccaatcggggtggggggcggggccagggcgcggtctggaggctcacgggagagaggctgtagccctgggcaatcccgggggtcgttacaggaaggtaggaaaatgccaccctcagggcactggttgggctaaaggtgacactggcgtctcacgggctatgaagacggaatgcctcttaatgccggaattccaagacggaatgcctcttaatgccggtaggagcagaagtgcttttcctaagggggccgggttttcctagccggtgtagtgtgtccatgggaatccagggtgtccgtcccatggaccttcagcgctagggtcctggaaggacctagcttgcctaagaggaggatctgatgaagagtcctatactgtggggattgggacgttgggtaaatacccctggagtaccagggatgggatccagcctggttgagaaggatccctgggtgttccggagagaaaagagggtctgacaagtggggaaggaccccgagtctttcatgcctttcccaattcctaccagttcattctctgataagaaaacaaagcccagggcaggcgcagtggctcaagcctgcaatcccagcactttgggagggccaggctggtgaatcacttgggcctgggagtttgagaccagcctgggcaacatgggttgttttgtagagacgggtttgaaaacacaaaatttgtaattttacacaaaatgtaaaaatacaaaaattagctgggcatggtggcacatgcctgtaatcccagctacttgggagactgaggcaggagaatcacttgaacctgggaggcggaggttgcagtgagccgagatcaagatcatgccattgccctccagcctgggcaacaagagcaaaactctgtctcaaaaaaaacaagaattaactgggcatggtagcacgcatttgtggtcccagttacgtggcaggctgaggtgggaggattgcttgagcccaggagtttgaggctgcagtgaacatagattgtgccactgcactcagcctgcatgacagatcaagaccattttctttcttaaaaaggaaaaaaaaaaaaggaaaccaaagcctagattatctaggtcagcagggccatctggtgagttgccagagggcagaagtcactgtcttgtccctagcacctgacttaagacacaaggtttatgaagtaagcaaatgaacagccagaagcctccagactggggccccacaccaggcctatggggctagagcccttcccgccaggtaggaggaacaccccactgaacagaagaggctgacagccagagtgaaaaactttattaacaacaggtttcaacgagaaagcaaatgaatacccctagaaacatggacagcatctcccccagcagcaggcaggggaagggaggcaggaggggtaagcctagggtgttccctaggaaagggccaggttccctctatccagctgggggcaccgagacggcctcattcagggaagtccaggatggcagctgaaggcagcaggtttagcagccaaagcccaggcctagtggatagacagggtccaaaatgtgacccttctaggctggtatcaccatgggggcgtcatgggctgaggattctgcagataggacatcaccacggcagagatggacagcctgagacaggagagaggtgtcagtctaggatggccaggctggggtccccccaccccttactcaagagtcacttgttctgtagggcaagtctcacatgaagctactcatcatttgcttcgtgtcctccgagctccgagagttggcaaagctgatgaaggagcagtagacagcgacccaagcacaccacttcagctagggaaaggtaagtgggtgggcaggttagtgaaaggcacaacaatgagtccccgaagccacctttccagacaccagatcatgcccactgattccatctgatgcagctgggaccttgccccacccggaattcctcagtcccacctgctcatggcatactctagatacgtggtttctagtcctactgtctggcctgcgtctctcaggaccaagagagactctgacatcccacatgcttaagaccctgccctttttccacaactcctctccaagttgcttcaaagcctggccccactcgcagaccaatctgccacatccccaacctgactcgaatccttgacttcaccaaagactggggctttctcggcccagcgtcatcgcagccccactcccggccgatctcaggtcccgccccatcagcaatgacaagacaccccgcttcattccaaacccgcccccgggcctcgttctcaggtccaactacacccatagaagctcaaccccgcccaccttaagcatgaggccgcacatgctgaagatcatgcccagcaggttcatgtagtccggcgtcgggtcgtccaaggccgggttacattcgctcggcgggggcttgtacctgcgacaggctcgagggtcaggggcgctcaggtcctgcccccgggatagacaggcgcttcccagggccccgatccacacccacaacccgaacccgtgcccacgacgctggggtcctcacctcagcactttgttcggcctccgtgggtccgacatattgttagtggacatagcgagtcgaaggccagatcacgcctcttccgctgcaggaatcgcagcttccggcgtgcaagctgagggcggattttagagtaacacccgaggccctcgcatttccgttcctcatgacagaggcttggactccccttacccagagaacggagatttaggagaagccagaagtcttcctttcaaagggaaaatggggaaaagaacctgaaagcgggcttcaatagttccaacccgatcaccgaaatgccaaaatgatgaacccggaagtgataaacaggaagtaggtcaggaagaacaataataaggttacacccaagcgtgggtttctaaggcgcggaattttccgtacagaccgatttaaggctgcaaggaaggagtcctgggagcatggctttccctgagccaaagccgcggcctccagagctgccgcagaaacggttgaagacgctggactgcgggcagggggcagtgcgagccgtacgatttaatggtgagcgccttcgtcttcattccgggtcctcctcccgcctcctgagatcgacggcccagtaacccccgcctggtgttccccagtggatggcaattactgcctgacgtgcggcagtgacaagacgctgaagctgtggaacccgcttcgggggacgctgctgcggacgtacagcggccacggctacgaggtgctggatgcggccgggtgagccggggaccaggctgggatgggagcgctgaggctgggatccgaggtcgatgctgatcctcctcctcctttactccagctcctttgacaacagtagtctctgctccggcggcggggacaaggcggtggttctgtgggatgtggcatcagggcaggtcgtgcgcaaattccggggccacgcaggggtgagtgaaagcctggagaccctcatttgagtggaggggacccgtattagcgcataggtggtgacacggccacccccattacaccgtaaggatcccttccccagatgacgatcccccactccgcatgccaggctaggcagtcaccaacccctgtccttgctgttcccccaaaacctttcacctccccttcgcccttgctttaaccgacactgggaaccctgcctttatcccagtcctccaaagtccagcctcctctgagtggcaataactttctcagaaggtgaacacggtgcagtttaatgaagaggccacagttatcctgtccggtgagtctggggcctaagcacgggggcccagggtgctgccctccccctccaaacctgacctcaccatcatgctggcctcacaggctctattgattccagtatccgctgttgggattgccgctcacggaggcctgagccagtgcagacgctggatgagg

SEQ ID NO: 8307 - DNA, 6000 bp, Homo sapiens
cgggaggctgaggcaggagaatggcgtgaacccgggaggcggagcttacagtgagccaagatggagccactgcactccagcctgggcgagagtgcgagactctgtgtaaaaaaaaaaaaagaaagaaaacaccctaaatgtgggttatgggggaccccaagaggctcgcttctgggtattcagctgcgggaaatgggcagtgacctggactgctggaggctgaagacagactgattttctcaggaattaacaggctcaattacaagatgtagtagctgtttttccagttgctgctgggctcattgctttgagtctcatctgcagtggcaaaaacagcaataaaataaaaaaatacattaaaaaaatactgtatcctaggataagcagttcgcttaccgacctagctctgaccccaagacaatgctaaggcctgctctggtattctaagaagacggcttcagccaaggcctggaggtgacccgttctagagagaggcttcacctcaattaggccacagagtggaaaacttttcctctcagatcagatgagatttggcagtgatatgaggctactatggaaacagccaccgatctccactactgctgggatcccaactgccatgataacagtcctcaaccagacattaatttgttgcgtgacagtcagcacgtcctgcacccctctgggcattacctctatcagttgtaaactgcacttcataatctccaaggtctctccaggggccaacctttcagtggacaacagactgcttgagggtgggaagatggatttagtcccaagcagaaatagatttttttctttttttttttgagacagagtctcgttcttgtcacccaggctggagtgcagtggtgcgatctcagctcactgcaacctccacctcccaggttgaagtgattctcctgcctcagcctcccaagtacctgggatttcaggcgtgcgccaccacacccagctaattttttattttttgtagagacggagtttcatcatgttggccaggctggtctcaaactcctgacctcacatgatttgcccaccttggtgtcccaaagtgctgggattacaggcatgagccactgtgcccagctgaaatatatcctttatttattttttttaaaacagagtctcgctctgtcacccaggctggagtacagtggcgtgatctcagctcatggcaactccgcctcccagcttcaagtgattctcattcctcagcctcgaagccagtagctgggactacaagcacgtgccaccatacccagctaatttttttgtttttagtagagacgaggtttcaccatgttgaccaggctggtctcgaactcctgacttcaagtgattcacccgtctcagcctcccaaagtgctgggattacaggcatgagccacctcgcccggccagaaatatattctttgatgtagacaaaccttttctcaaattgcttgttaagtgtgagtgaaagcatcctttctatttttactgacctacaatacacacatgcagttaaactaatctgcttgctatgcaatccgctgggccgggaaacaactgcttctcccacccagaagccctgtagctatcgcctctatgggtacttggcaaaggttggcagagaataacaaacaacacagcaaaataacaatttattttttccttcaaggtcactttgaacagtgagtttgaagcttccctttttttttttttttttttttttgagacagactctcgctctgtcatccaggctggagtacagtggcatgatctcagctcactgcaacctctgcctccaagtagctgagattacaggcgtgtgccacaacactcggctcacttttgtatttttagtagagacaaggtttctccatgttagccaggctggtcttgaactcctcacctcaagcgatccggccacctcagcctaccaaagtgctgggattacaggcgtgagccaccatgcctggccaaagctcccccttctttctgggagagaaaaggattaagtacggtggagcatattctccagtccaagtcttgggcctcaggctgtgcccagcttcctggaacaaaagcacgcacccccagggtgctcagaggcctactttatctgactgttaactagcaaaactaaaccaactacatttgcaaaatgccatatggatgttccaaactgcatgtttcaagctggacatggtagcttttttttttttttttttttttcttcaaacagggtctctgttgcccaggctggagtgcagtggcctgatttttgggctcactgcagcctcaacctcctgggctcaagccatcctcctgcttcagcctcccgagtagctgagactacagtagtgggactacaggtttagatatagagtttgagaggggaatccacatcagaacttcattctagaatgaaaacttaaatgacagagattattgaatacaaacctcctcattcttgataccatgtcaaaaattacaggatttgtgggttaaaggcttctaaggggctaggcaccgtggctcatgcctgtaatcccagcactctgggaggccaaggtgggtggatcacctgaggtcgggagttcgagaccagcctgaccaacatggagaaaccctgtctctactaaaaatacaaaattagccgggcatggtggctcatgactgtaattccggctactcaggaggctggggcaggagaatcacttgaacccgggaggtggaggttgcggtgagccaagatcacgccattgcactccagcgtactcaacaagagcgaaactccgtctcaaaaaaaggcttcaaaggattgtgggtaaatttccaaaaatagtagcaataaagggggcaggaggcagaggtagtaatattcaacttgtcaataaaaacaaacagccgggcgcactagctcacacctgtaatcccagtactttgggaggccgaggagggcaaatcacttgaggtcaagagtttgaggccagcctggtcaacatggtgaaacccccatctctactaaaaatacaaaaaattagccgggcatggtggcggtcacctgtaatcccagctattcaggaggctgaggcaggagaatcgcttaaacccaggaggcggagtttgcagtaggccgagatcgcgccattgcactccagcccgggcaataagaccgaaactctgtctccaaaagaaaaaaaaaatccttctacgtatccaaggtacctagagtagtcaattcattaagacggaatggtggctgagtagaatggtggctgccagaggtggaggtggagaggaatggggagttagtatttaacgtctacagcttctgttttccaagatgcaaagagttctggagatgggtggtggtgatggttgcacaacaatgtgaatgttcttaatgccactgaactgcacacttaaaaatagtcaagatggtaaattttatgtgtattttgccagaattttttaaattggaggggaagtgagaaacaagaaatcgctcgacctgctatttttcatttgaggaccagcatggcatagtggctaggaactaagaccttggcgtcctgagttcccctatctgttttgcatttactaactaggggcctttgaacaagtcactttatatctctgagactttattcatccttacaaacaggaataataatagttcttatacaaggtaacagaatctcaccagcacaagagtaagcacttgctaaattgttattttgaattttaataacaaattttattatttgatgatagttacttaaaagtcagcaataattcagggataattggttgaattattaatattatattatcacctagggcgataagcacatcagaagacttcgttttaagggaaaaagagacccaagttaggagtcagaagacttgggcttcaagagtggctgtgggtgggtataagatttctccttggtgacacccaagggttgacgtagatgacctctttgataaccagaaagcaagatcagcttcgctgctctgcgaaagccagccgtggagctgcacctccctcaccgcctaagtctcccgggaacgtcccgggcgagggaaggggtccaaaggtcgtacacaagaatactgatagcaaagccccttcctacgctggtgacggcggcgtggcgcaagatttgtgcaagactccctcggattgggagcaagggtcccgcaccttcgtggctcccatgacaaagtctgcaactcagcccgctgggggagctgcaaggaacctgcaagcgtcccagcccctgcagagacccccaagaaaaagtacccccaaaacagcctgggttgcagatttataaatacttcctgcgcacatgcgcattggaatttacgagtggcccggggcgcaacgcttgcccactgcgcctgcgccgtctggctcttccttcggggcacaggaccagaaagtggggtcccgtggtcccgcaaagaaggaaaaagaatgggtcagcagtggccacacggcccctgtttctcgcttcttacctcgtaatgcttcatggctccctcccacggcggctactgctccgcggctgctgctgcctaactgcgcggcacagcacaggctccctacagcgctcgcaaccgcagcgatagactaaacgcggctctgcgtccgccccgcccctccaggccgcgcgcgccccgtcggccaatcagggcacgaggcgcccacgttcgcccctgctccttggggccggtccgaaccaagactaggactagcaccaggggattgaccaatcaacttgcgagaccaatcgaagggggcggaacgcctgtaggaggggctaaagagaaggggcttgaccatccaccaatccaaaggaggtctctgccccgcgcgtccctttgccacgccccctgatggcgtcgctgtggaaaccaaggtaagcgacggttaggccagacgcgggggcggggtaagaagttgagtgacaggcaaggcagcatccacatgacaggcggcgccgaaggggtaaattctgaggtgggcggcccccggggtacaccgggaacagcaggagagggctaggggctggggtcgcgggctgcggagtctggttggcgaggaggtcactatgggaggagactcttgagtgggagggaaggaaaggcgaaacggagtcgcgaaaagctccccatttgggaacccccaacctgcaagaaccttgagccccagccccattctggggtggcttcactgccgtttttaatgaaagccccgccccactttgtttttctgttttgttttgtttttgaaacaatctcgttctgtcccccagctggagtgcagtggcgcaatgacggctcacgcaacctccgcctcccgggttcaagcgattctcatgcctcagcctcccaagtagatgagattacaggcacccgccaccacgcccgactaatttttgtattttttttagtagagacggggtttccccatggttggccaggctggtcttgaactcctgacctcaggtgatcctcccgcctcagcctcccaaagtgctaggattacaggcctgagccaccccgcccggcccccctccacactttgctccgccctatggacaggggaactacattggtctctgcctgacgtccagaatcgtgtctagtggctccaatggggccactgagcccttgaaatggggctggtccaggccgggaacgatggctcacacctgtaatcctagcaccttgggaggccgaggggggcagatcacgaggtgaggagttcgagaccagcctggcagatatggtgaaacctcatcgctactaaaaatacaaaaattagccgggcgtggtggtacacacctgtagtcccagctaatcaggaggctgaggcagaagaattgcttgaacccgggaggcggaggttgcagtgagccaagatctcgccactacactccagcctgagcaacagaccgtctcaaaaaaaaaaaaaga

SEQ ID NO: 8308 - DNA, 6000 bp, Homo sapiens
ggcggatttgggaagctgggagccaggcagggcctcagggcctctcacctccagccacacgcctccccttccttcgaaatgcaagggaaggcccccagagctgccaaggagcacagcagaatccacacagaacctcacactgtgcctagcactcgcctgccaggaacagcccagcccaaggggaagcgtggggagtgcctcctcccgccaggaccttgcagccctccccacagcaccttctgaggtcagactccccaggcaccgctacaacacacacacacacacaaggacacacgtctgcaaacacacacaacacatacacacgtgcatatgcgtgcacacggctccgaggctgcgtggcagtgcacaggtcacggcccccaaggccacggggacaggaatgttcacgtctgagcacctcaggtgagctctgggcaggcgcagttgacaagttttggcagcgccattttctttctcctcttcttcttttttttttttttgagacagagtctcactctgttcagcagtggtgtaatctcagctcaccgcaacctctgcctcccgggttcaagcaattctcctgcctcagcctcccaagtagctgggattacaggtgcctgccaccacactcagctaatattttgtatttttagtagagacggggtttcaccattttggccaggctggtattgaacccctgacctcgtgatccaccctcttgggcctcccaaagtgctgggattacaggcgtgagccaccgcgcctggctggcagtgccattttcacaaagggatctcctcctggtaacctacatttcttgggagttaagatttcccagactgcaacactggcagctatgtgcagagctgggcgaggtgagtcagggcaggaagcacagccagaggctgcccagctggcaagctccttcctgccctgcagcagcccctctcctcatcctccagacctgcagggctgggctccacatcctcctcacccaggggtgctaggagagggctggcccctgactcacctcaccccacctccaggcagggcagggcacacaggaaagtgaggaggaccaggtggggcccgcagccgagctgcccccagccacctttccaggagtcccgggctcccaggcgccatctgcaccggtcccggtgctcccgctgggtccgccagcttctcagcgggcagcatcgctcccaaagggaccaaaaggctttggatggaacaaccctgtgtccctccggatgctgatgatgctggtgtctgtgtattgacgtgtcactgggggtgggggggcgtccggaagagaaagcctccatagaggctcctcggggacaatgcagagcgcccccaccccacggaccaccccatctcgcccgccgcaccaggagcctccacccatgagcagcaggaggagggacggcgcctgaccctcggccacagccccagaaaggttagaattcgattctggccacatgagacgtaacccatgttctcaagtaaagtcaccttcatctaaaaacagcctccgcctccttgcccagggctcagggccaggcaggccgcgtggtacttgtacacaagcagccccgcaggataaggctgcccgcccccacccgccctcctccccacccaccccagtgctcagacagcagccagcgagaacagctctgggaagcagcctcgggcacctcccccacccacccccaccggccgcagccaggcactcccactcctctcatctgaggctcgggggtgaagccctccaccctcgggacccagctagcacaccccggccctccggtccccgacaagcccacaggagacgcggacggccaaccttgggcactcaccccacccggctgtgccccaccaacccgcagacgcccctgaagcaagtttcaggagaggcaaacacagtcacgaattcacagagcaaacagcagtgtccaccccacacgggccaaggctgtgttgcccagaccttgtggtcttcacgagtcagtccccagcaaaagtggggtttctcaccacacacacacacgcgcacacacggctacaccgctgcacggcggcgctgccagcactgcagactccacctgcttcccaggctgcaggcagctctggccagtaagccccaggctaagctttctgctcagaagaaacccttctcagtctcctgcacaaatgcacaaaaggaacaaaactgtgaaccaccctacccagcagggagagaccaaaggtctttcacccacttggctgtccaaattagctcaatgtgggaacctcgtgctgtgcttgaaacccagtcaggcctggctgggtttccacagggctggcgggggcggcttatcttccgcgctcacctcacccatgggctcctatctgtgtctccccagagagctggccgcagtgctggggccaggcccttgcccaggagacattcgataaagggccactttggttaccaggaagacgaaatctcagacgtaggtcaggagttagctggcaaagcctctggaagaaggagccccctccccagcctctgcccaaggccccctacggctcaatgcccaggacagaggctcgaagcccttgctcttgacccttcaggaggccagaccctccagctctgcaccttgttcccaacacatcggtcacaataaattttttttttgtttttttttgagacggggtctcgctctgtcgcccaggctggagtgcaatggcgcgatctcggctcactgcaagctccgcctccctggttcacaccattctcctgcctcagactccctagcagctgggactacaggcgcccgccaccacgccaggctaattttttgtatttttagtagagacggggtttcaccgtgttagccacgatggtcttgatctcttgacctcgtgatccgcccgcctcggcctcccaaagtgctgggattacaggcgtgagccaccatgcccgacctcttttttttttttttttaaagacagagtctccctgttacccaggctggagtgcagtggcatgatatcagctcactgcaaccttcacctcccaggttcaagcgattctcttgcctcagcttcctgagtggctgggattacaggcgtgcgccaacacgcccagctaatttttgtatttttagtagagatggggtttcaccatgttggccaggctggtcttgaactcctgacctcaggtgatccacccgcctcagcctcccaaagtgctgggattacaggtgtgagccaccacgcccggcctcactataaatctttaacccagaaccaaatgggggtctcaacaaaggaagaaattttctatgaagcaagaaaggatgtcatgcttttctcccggaaaaacacacctcaatccatttcccaaatgcgctctccaaaccacgtttgcccaccctcaacacacggccctcctaagacagcactggaaaccgaatgcgggtcagagtcggctaaaaacgactttctcactatttcctgcgctgaatcgggtggccagggccccctcactgtgaccttggaacctcgacttcccacagggctgtttcctcgcctgtaaaggaggaggggcgttcagagaccacctcattctgggtgctgaatccaggcagaatcagagggagattccgccttcccttccacgcagggcccctcgagggagcctgcgaggtcttaagagtctgggagaacacccgggggcaggtgcacgccctaggcaagacgccagggctaaatcccgtgaagaacggtaatcccttcccgatccggagggctgacccactcagagcctccatgtgctcttggaggacaaaagccccttttccagaagggagcgccaagatgatcgctccaggccgcacgggcccttgcgggggccccagagagtctcaggggagggtctctgaccctaacactcgcaggcagggtggacccgtctccagattccacgcccaggccgctttccccaggtcctgcggagtccagccccagcaggacgggttgggcaggcaccaaccagcccctgacccctggctccaggccaaaggggacgctcacccaggctttgggtctcccttctcctggccgatgggaccggcgggcgggccacctccaaccgccttcgcagacgccctcacccaggaagcaggtcacccccaaccccaggtgaccgaaaagcaagacgcccacctcccctgaccaagaccggcctggccaggaccccctggctcccgcctccaagcagggagcttcacgcccacacacagaggccgggctcgaggccggagcgcccgggggagcccggcaggccgcgccgggaggaacctctagtcccccctcaaaccctgggacttcacccccaagctccatgctggcgcgggaagcccccggggccggcctttcgcaccccaggccgccccgcgccgaggccccaggctcccgtcggcttcgggtcggcaccgcggcctccattcccggcccctgcaggaccgcacccccgccccctacccgctcctcaccagccccggaggctccgtgggtgcccagcagcgcgaatcccagcagcacgaacagcgcagccgccatgattcctattcctcgccggtcctacaacctccaaccgctgccgccgccgcccgcggccgctataaaaagcggcggaggcgcggaccgggcgcgcgcacgcacggcgtcatctcgggggcggggcgagcgccggggacgccggtcgccccgcctgcgcacgcgcgcacacgctcgcatgtacgcgccggctccggcaggctcacgctacggaatccgggcggcggcgcacgtgacccggcgttgctaggaaacgggagtggggcctgcggggacgcggctggagcctgcgcatttcttccttcctgctttcaaagttgcaatgagcgcagagcggtgcgcccgagggggttgaagcgttgaaagtgtgttacccagattttatctgagttaaacacgggccggccgctgtggctcacgtctgtactcccagagccttgggaggtcgaggcgggaagatcgcttgagcccgggagctcgagaccagacgcggcaacatggcgagacgcacatctctgcctttaaaaatgtacatatatatatatatatatgaacgtattaataaattaggtgggaggaagtgacctcctccgcccaaataaaaatacttaaagggcacttgaatctggatctcagaaaatgaataatttcttagtataaacgtcctgtgcaccatttggttgggacaagtaagttcctcttcagaaactcaacttccaggtctaaagttgtcaatcaaccttacccccttcttctttcctcgcaggtggcgcgtttaccctattttaaaaaagttttaagttttagccaaccgggatcagcttagattgtgggcgtccaaccccagccaacagggaaaggacagaggaacagaagctcccttcctttgtcccgtgtgctctggagattgcatcccacgcaggcagcccccttccgtacaagtaaagtggtctcgctgagaaattttctaagtgctggtttctctttgcgggaccgactcgccgcccccaaatatcccatttggatcccattctgtttcaggagaggctggcggttacctttcttggggagacgcgtccgactgcttcattgtgggggcctcaggagcggaggatcgggtcccgcccgaggtgacgcgtaaacccagactctcagcaacgcgggtaggaaggacccttgaagttccgcggcgaccacggtgagaaaagtcgctattggggcgacacaggtgggggcgtctcttggaggttgaaagtgtgtgttggaagttaaactcggagtcgcaatgcaagaggaccgcagactaagccgaacgcgaagggctaactggaaaggggcaggaatgtggctacactggcgggaagagcccgtggcgacgggagggggatg

SEQ ID NO: 8309 - DNA, 6000 bp, Homo sapiens; identical to SEQ ID NO: 2035

SEQ ID NO: 8310 - DNA, 6000 bp, Homo sapiens
ccttggttttatcatgtgtctaagagtttgcttggaacttacaagtgtctatagggcggggagggggagggatcaaaaggatgcatgttgagaattgagcatttcctggaataaagactgaggctggcaaaggaggggggctgttctggaaataaggacatttctaggctgaaggctccagaagaagagagagcctagaacaagcttagaatgccaaagtggcagatggaggagaaaacccacgatccaccaggggacaagttctaaactaaggctgcactggggaaaaaatgacagaaaatgaatgggcctagaacctagaaccgggggaaggaaaacattatgtagaacacttcactgggaatcttttacatttaagaacatgaggccaggtgcggtggttcacgcctgtaatcccagcattttgggaggctgagcccgggggatcatttgaggtcaggatttcgagaccagcctagccaacatggtgaaaccccatctctactaaaaacacaaaaattagccaggcatggtggtacacacctgtaatcccagctcctcgaggggctgaggcaggagaatttgcttgaacacgggaggcggaggttgcagtgagccgggattgcgtcactgcactctggcctgggcaacagagtgagactcgatctcaaaaaaaaaagaatgtgaaattagggccaggcacagtggctcatgcttgtaattccagcactttggaaggccaaggtgagaggatcgcctcagtaacataatgagatccaatgtctaaacaacgataacaggccgggcgtggtggctcacacctgtaatcccagcactttgggaggcaggagggggatcacttgaggtcaggagttcgagaccagcctggccaacatggcaaaaccctgtctctattaaaaatacaaaaaaaattagccaggcgtggtggcatgtgcctgtagtcccagctatttgggaggctgaggcaggagaattgtttgaacccgggaggcagaggttgcagtgagctgagatcataccactgcactccagcctgggtgacagagtgagactccgtctcaaaaataaaataaaaactaaacaacaggccgggcgtggtggctcctgcctgtaatcccaacactttgggaggcagaggcaggtggatcacgaggttaacagatagagaccatcctggctaacacggtgataccccgtctctaccaaaaatacaaaatattagccgggcgtggtggtgggcgcctgttgtcccagctacttgggaggctgaggcaggaaaatggtgtgaacccagaaggcggagcttgcagtgagctgagattgcgccactgcactccagcctgggagacagagtgagactccatcccccgccaaaaaaaaaaaaaaaaaaaacaactaaacaacaacaacaacaaaaaagaatgtgcaattagatagaacttccttagaacctaaaacagggaaacagggaagggcattctagaatcaatggcacgaattaggaagcctagagcacatacttggaacacacacatcttagaagttagattgctcctgggaagagaatggaatctagaacaacgtggctgaaacctggaacacacttgaaatgaacatttagcaaagaaggaaggacttgttgttagaactttggaacatgtctgaggatatggtgggatcagaatctggctcaggggtcttatctaaatatatgaaaaaaacaaaggctgtgcacagtggctcacgcctataatcccagcactttgggaggccgaggcaggtgatcacctgaggtcgggaactcgagactagtctgaccaacatggagaaacccccatctctactaaaaatacaaaaaattagccgggcatggtggtaggcgcctgtaatcccagctactcaggaggctgaggcaggagaatcgcttgaacgcgggaggcagaggttgtggtgagccaagatcgcagcattgcactccagcctgagcaacaagagtgaaactccgtctcaaaaaaaaaaaaaaaaaaattggcatctggcctagaactcagaccatgcctggaatgaaaatggaacacagaacagacatcagctgggagtgttctggtgtttagaaggaatctagaacatggagcaatgcaagagcacatgtgcgacaagaaatgtggcccggccaggcgcgatggccatgcctgtaatcccagcacttttgggagccaacagagaaggatcccttgagcctaggagtttcagaccagtctgggcaacatggcgaaacccccatctctacaaaaaataaataaataaataaataaataaaatttttttttgagacagagtttcgctcttgtcgttcaggctggagtgcagtggcacgatctcagctcaatgcaacctccgcctccggggttcaaacgactctcctgcctcagcctcctgagtagctgggattacaggcatgtgccaccacgcctggctaattttgtatttttagtagagacagggtttctccatgttggccaggctggtctcaaaatcctgacctcaggtgatccgcccgcttcagcctcccaaagtgctgggattaccggcatgagccaccgcgcctggccaaaaaaatttttttttaattagccaggcctggtggtgagtgcttgtggtcccagctactcaggcggctaaggtgggaagatgacctgagcctaggaggtggaggctgcagtgagctgtgattgtgccagtgcactccagcctgggcaacagagaccttgtctcaaaataaataaataaataaatagaaagaaagaaatttgtatggcagcaggtagcttctagatctccttatgagcccaggccacagaatacatctggaggaggtgatgtgtgttcggctcattggcctgggagagtgtacttggagaaggggaactcatctgagcctcagggggcaatggagtgctagaaacatctcaacaagctgcatcttaggggaaagagtagagagtcctgaagcccgccacctggggtgacatgaggatgagacaggggtttggtagggccacaggagatgtgaagttgatggggcagagtgatgaggctgtgaagacctggttcctaaaagtgagacctgagaaactagatacctgctggggagggcagtggacagagctgggagcctggactcctgaatccttgtggaggtaaatgatgggggattggaaggtgagagcctgaggtcttgtttggagagagggttgaggcagacagcctcagtaaaagctggtgggcagtacggaagctggggtctgaactcctgggtccctgaggggataggagactgggaccaagacatttaggtccccaagtgggagtgtgaacagaagtcagagaactgcattgagaatcacattccgggtcccccaaaggaaaggagtcatggcgcctgagtccctcggggagcagatgctgggtgccaggaggctaagtctgtgtgtctgcagggcacagcggggttctaagcagagcaaacgctggggaacaggattcctaggtgctgacggggtgagggctaccacctggggccagcagaggtgtagacacggacaggcttcccgaacggggtgggagctgcatccccgggtgccatggtccccacggcgaccagaataggaaaattcagaagccctggatcctcagggagcagctggagtcccaggaacctggggtgccgaggacggggccacgagcctggccggcagaacccagaggctggggcgccctggtcggggagggcccgggtattcccgggtcaaaggcgcggcggggggatccccgcgccgcctgcgccccctccctggtggcggcggcaggaggtggggggaggcgaggctgccgagcgcgctgaccatggacagctccagagcgggcctgtgtccagggcggccgccgagcctgcctggaccgtgggacgcagccggctgtgcaagcccgaggctggcgacgggagacggagtgcgcgaagcggggacgatgcggacgcgtctggggagtctggcaccgccgcggcgggtgtctggagctcccaggacagggtcaggaagggggatctaggctctaggaggggtcccggggccggaccgggaaatccaagctcctgggccctggaggaggcgcgaggcggcggtgcgcccgggattctagggttcggtcggggactctgggcgccgggaggggcacgcctgagtccccggggttggggtgtgaaatctgggctcgggggtcccctgggatgaggaagggaatccgggatctcggggaggcgggggaggctcgccaaggggtccccagggtgggcgctgccaggagggccgggccgggctcttacctgcctggtccgcggcggctgcgggcggagctgggctgcaggagggacgtggggtggagtgggggggccgggcggggcccctggcagcggccggggcccggctctgtcgcttcggagccctggagccctgtctccgacgctcgcgcgggctccgcgtctctggctccggcttgggcgctggggacccccctccccctcacgctctcactgccttctacccccaaaatagccccctgcccctgtcaccgatcagcctccccccgcgaggccgcagccgccagatccaggggtgcccaccagcgccccccaaatcccaccttccccccaaaaaaattcctcctccctccccctccccccccacggctcccgggcggtcgtggcccctttaacaggagactgacagacggcgaagagcggccaatgggagagagcgtcggcgccggccggcgactagaccccgcctccacaccggccgggaggggtcgcgcgggcggagagcgagaggcggggcataaggcgcgtcgaccaataggcacgcggcgtgaggcggctggggcgggaggcggagcccggcagggggatgatgtcacctggagcgagtagcgcgcggcgtggaacgcgagtcgcgaccccggctcccggcagtggcgcgcactagccctcgcgccgcacgggacacgagggctgggcgggcagcgggatgaggctaaaggttggatttcaaggcgggggctgcttccggaaagacgcgctgtgtttggaaggtggagtgagcgcccggtgggcgagggcacctcattctgcacccctgcgcccgcctcgggaactgcacgcggcacccccacccgcgactcccacgcagacagtagtgcggcctgcagggttcccccggcggacgaggctaatggttcgctccgccccgcccacacagaggccgcccactggctccggctgcgtttcaggactctggaggaagggacttggccttcgccctcagacgctcttaagggtaggcagcgttgtcctcagttctgccccagcactcagacccagactgggtccctgcctccgccctccgccctcggactagtctcttggaagccggcctgtctccgccttcagacctagggagaggtcttaacctctgttctcagactctggaaaaggcttctcaacggcttggcctgacctcagctcctcgcattccctccacatctcaagacaccaacccagggatgcaggacagacacacagacactcagtgagggtcaaatatctttaaataaagtgccaggaacaataaatactgtacaggaagagagtgcacgtgaacgtccagatctgtggtttcaacctcgagactccaaggacctgcaaggggggtggacaagggacccgggatcagggaggctccgggtagacaagaggggcaggactggggttgcagaggcaagggcccaggtaagtgggctgagggatcccagccacagtaggttccgtatcttgggatggaaggaagctaagggctccccaggggatttggccaaactagcctggggtgagagcctgggccaagggtcaagggtcaggatccc

SEQ ID NO: 8311 - DNA, 6000 bp, Homo sapiens
gcccattcaatcctcccagccaccattcgagatattatcagccctcctttctaggagtgaagctgaagcccagaaacgcgaatcacttgctcaaagttattcaacatgtcagtggcagagctgggatttgaactaggctgtcgggctaccaagtctgggctcttcttcataggaatatctcatcaccctattcagttatcctaaaattgtaattagcacatgaatcaagtcaagatggtcattaacatgtgaatctctttgagtcgctgattaccagcgcttgttcctgcccaaatttgtgacttagacctgcttcaggacaaagttgacaatcaacatagatttatagttagcacatgaatcagcacaggtttctgttcacagggatcagatttctgattagcacttgaatcagcagtggtttgtgtcaacagctggagtctttaggttcctgatttgcacagggatctccatccagggattattttcttgcctaaataggcctgttcctttatgtccaggtgaccttctcttcaaatgttgtcccagctgggtgcagtggctcacgcctgtaatcccaacactttgggaggctgaggcgggaagattgcttgggtctgggagtttgagaccaacctgggcaacatagcgagaccccgtgtctccatgaaaaataaaacaattagcctggcatggtggcatgctcctgtagtcccagctacttgagaggctgaggtgggaggatcccttcagcccaggagtttgaggctgcagggagctatgatcatgccactgcatggcagcctcagcgacaaagcaagaccatttctcttaaagaaaaaaaaaaaagggcgggcacagtggttcatgcctgtaatcccagcactgtaatcccaggttgaggtgggcggatcaactgaggtcaggagttcgagaccagtctggccaacatggtgaaaacccatctgtactaaaaatttttttaaaaatggccaggcacagtggctcacgcctgtaatcccagcactttgggaggctggggtgggtggatcatctgaggtcaggagtttgagaccagcctggcctacatggtgaaaccccatctctactaaaaatacaaaaattagcagggcatggtggcacgtgcctgtaatcccagctactcgggaggctgaggcagaagaatcgcttgaatccgggtggcggaggttgtagtgagccaagatcatgccactgcactccagcctgggtgacagagcgagactccgtctcaaaataaaaatcagccaagcgtggtggtgcatgcctgtaatcccagctactcaggaggctgaggcaggagaatagcttgaacccaagaggtggaggttgcagtgagccgagatcatgccactgcactccagcctgggcgacagagcaggactctgtctttaaaaaaaaaagagatgggggctgggcgcagtggctcacacctgtaatcccagcactttgggaggccgaggtgggggtatcacctgaggtcaggagttcaagaccagccttgccaacatggtgaaaccccatctctactaaaaatacaaaaattagccgggcatggtggcacatgcctgtaatcccagctactcgggaggctgaggcagaagaatcgcttgaatccgggcggcggaggttgtagtgagcaaagatcacgccactgcactccagcctgggtgacagagtgagactccgtctcaaaataaaaatcagccaagcgtggtggtgcatgcctgtaatcccagctactcgggaggctgaggcaggagaatagcttgaacccaggaggtggagattgcagtgagccgagatcatgccactgcactccagcctgggcgacagagcaggactctgtcttaaaaaaaaagagatgggggctgggcgcagtggctcacacctgtaatcccagcactttgggaggccgaggtggggggtatcacctgaggtcaggagttcaagaccagccttgccaacatggcgaaaccccatctctactaaaaatacaaaaattagctaggcatggtggtaggtgcctgttatcccagctacttgggaggctgaggcaggagaatcacttgaaccaaggaggcagaggttgcagtgagccaagattatgccactgcactacaacctgggcaacaaagtaagactctgtctaaaaaaataaataaataaataggccggacactgtggctcacgcctgtaatcccagcactttaggaggccgaggcgggcagatcacgaggtcaggagatcaagaccatcctggctaacatggtgaaaccctgtctctaataaaaataccaaaaaaattagctgggcatggtggcagacgcctctagtcccagctactcgggaggctgaggcaggagaatggcgtgaacccgggaggtggagcttgcggtgagccaagatcacaccactgcactccagcctgggcaacagagctagactctgtctcaaaaataaataaataaataaaataataataaaatggggttatttgttttttgcttgttgcattgtttaagtcccttatagactgaattcctctttatgtctctaaatacatttgtctctttggtacacatctgcggtgctacatgccctcaacccaccaggttttagcatagctgttgtggtagacagttccgtgtgcagtgcagatagccctggttcagcccagctgttctcaaaatgtggtccctgaccaggtgtagtggctcacacctgtaatcacaacactttgggaggcctgggagggaggattgcctgaggccaagagttcaagaccagcctgggcagcatattgagaccctgtctctacaagaaattttaaaaattagctggatatggcgatgcatgcctgtagtctcagttactctggagcctgaggtgggaggattgcttgagcccaggaatttgaggttgcagtcaattatgattgcaccaatgtactgggtgacaaagcaagaccctgtctcaaaaaaaaaagtatggtctttgaaaagtcacattagcatcacctgggtactcgttaaaaatgcaaatgtttgggtcccacctcagacccactgaaccagaaactctgaggttgggacctggagatctatggtgcccccgggtgatcctggtgggctgcactgcaaggacacctggcctggctcctgcaaggcaaggcatccctctctgcttttctttctttctttctttcttttaaagacagagtctcactctgtcacccaggctggagtgcaatggctggatctcagatcactacaatctccacctcccgggttcaagcaattctcttgcctcagcctcccgagtagctgggattacgggcgtccgccaccacacccggctaatttttgtatttttagtagagacggggtttctccatgttggccaggctggtctccaacgcctgatctcaaaagatccgcccgccttggcctcccaacgagccgggattacaggcgtgagccaccgcccccggctgtcagtgtgtcttgaggtctttccctaatcccagatggcacaagttttccctcttgcaggcagagaaaggagccttgggaaggagcccctctggcctgaaagatcaagcctattgctgggcatggccaggtaaggaaactccaaccgtggaaaggacattccagggaggtggtgctgagataaggggggcagaaagagacaggtttggggggccagtggctctggaatgaagcgctacactcaaggctaggaatagttactgaatgcacatacacacataccattctcacagcccaggtgctgcgtcttagagcgtgtgagtgtgtatgtgtgtgtctgtgtgtgcgcgcgcacgcacgtctctatctctgtttctgtctttctctgacttgtccttatctcttgtctctccatcactctctgtgtctcgctgtctctgtgcatttccatgtctcgaatatgtgtgtgtttcaatctgtctctctgcctctttccattttctcctctctatccatcaatctaagcctgcccatctttttgtctgcctttctgtatctccgttcttctctgtctctctgtctcagtctctctgtatccagggattctctttcccagcagcgccagtgcgactccatgggaggtggggccggggcgcgtctttgagagaaggggcgggtgcctacgcctttaagcgcgggtgcgcgcggagcctgcgcctttaagcgccggtgcgcgcgctgccctgggttgccggcgaggaggccgcgggagcgcctggacccggcccgcccagcccggcccccgcccggcccccgcctcggccccggcgggggaggggtctctgagcgcggcccctcccccctgcgcccccgcctgcgctgcggtgcccccatcccgcgtgtcccagtctgtctgaccgtccctccgctcccaggcctcgccccacccggccctggggctgcccggtcgcccccctccccaccgcagccggtcccctccctcccagtcagcctccgccgcagcccaggaagccagccgggacgccgccgccccggaccccgcgccctaacctccacctcgggggcctgcacccccagattgaatcgggaattccggaaacccgagcctggaaccctgatctgggaccagcaccccgagatccggccgtggaaccccaagatctggagcctgaaccccagtatatggggctggaatctcaacatcggtcactgggacctcaatatttggagccggaaccccacaatttggaacacagaccccaatatttggagcagaaccccaagatttgacatctaaaacctcaagcctggagctgaactctgaattctgggcctgggaccttgaaatctgggactggatttccagtactgtaccctggaacccactcttggggacctgaaccctgggattcaggcctcaaattccaagatctggactgtgggattccaaggggcctgaacccgagtttgggcctgaagtccttgctgcagacctgagtgcttaaatctggggcttgagacctcccaatcttgactcagcaccccaatatctgaatgcagaaccccgggatcggatctcagactctaaaccccaccgtttggctgcttagcatcccaagactggacctgggagaccctgaccctgaacaacccaaactggacccgtaaaactggaccctagaggcccaatatttaggggtctggaaccccgagtattaaggtctggagactccgttgccacagatttgagccgagtcaggacacagtccctctacagaagccttggggacaggaaaagcatgaccagatgctccctccagagccctgacctctgactcccctggagctaggactctgctccctggggctgcttctagctcaggtaaggctgctgaaacctcaaggtggggacgggctgggaggagcattgtggctgcgggttacggtaccaggtaccctttgacactcttggggtttctccagaaaaaaagacattcccccatgggtctgccttcagctcctgctctgctccaaacactctctggacactggccatccttgcccctctctgaccttccctgcctcagttgatgggacctccaggtctctgacccctgcaacccttacagcctttcgctgtctatccggtccgaccgtctccgccacctctcttgtccaccactcctctctctgggctcctttctccacctgtcctctcaatggccatctctgttccctttttctctctctgatcatctttgtgacacccctgtccacaggtcctctctccagtcgcctctgcctgctgcttctcagtgaccatcgctgacatctgtgtccactgtgcctctctctaatcatcattcaccagctctcttgctccttctccacccctgaatctaagcctaggtctgtgaccgtccccatccatctttgacattgctgt

SEQ ID NO: 8312 - DNA, 6000 bp, Homo sapiens
actcgagaggctgaggcacaagaatcgcttcaacccgggaagtggaggttgtagtgagccgagattgcaccactgcactccagcctgggcgacaaagtgagaccctgtctcaaaaaaaaaaaaatctggatgtcactatattagaacttgaaacatggaatagttcacaccacacacaccgaagcccagtctctatcgaacctcctccctgcaatttccttctaacctctggtctgatttctttttctaacagagctgcttatttcattgtttctgggctccctgtgctttcctgtttgatctccttttcttcctgcagcccagctagtatctagtcctgtcatctggaaaacctggtgtttctctctttatctttacaacttaaatttatttttatccccttatcttccccacccacccttgcccattaacattttattcttctgccctgattactttctcctcccgctgcctggtttcctttttatgtttgctactactatttattcttgctgcctaatttctttttactcatgcagcctgatttcgtttatccttattgcttgatcttttttagccctgtagcctgatatattttaacatttgctgtctcatttacttcgtccttcttgtctgacttctttttatcactgctgtcagatttcattgaccctttctgccagagtcttgttatccttgctgcctgatttcttttacttttgctctctgatttcttttggaaccttccagcatcacttatcagttgtgcttcggtgtagggtattagtaggtgtaccctcaaccctccccttgcctcactcccccacccaagctaccccagtgcctggaccctgcacctgtagacgaggatgtcatcagccgagctgttgtactggatctggtacatgcggatgcccgggataggccgctgatccggccactggacaagagcagctgtggccccgtgctcagtcacctggacgccacggtcggtagggggcccagtgtcggccaccttggcagaagcagaggcagcggagggtggggtgagagcatcaggatccccgtcccgcggggggtcacagctggtgctgttggctagctgaggaggtggtgggggacccacagtcagctccacagcagctgtggcctcgccagctgcattggccgcaatgcaggtgaagatgccaccatcacccggctcggtgaccagcagctccagcgtcccattggggaaggcgcgggcacggcttgagttgcctagcagccggccctggggtgacacccaacgcacacggggctctgggtcccccactgcccggcagcgcagggcagccggccgacctgcgggcacagccagaggtggtgagcggtgagtcaccacgggcggctcgcagacaaactcctcctcgcccaccgcccagaagtagcggccgcccagagcaggtggggacgcgcaggcctcgaggtcgtcctcccgcgccaggcgacgcagccacaccagctcgcagttgcagtgcagggggttcccgccaaaggccagcaccagggcagaggcgggcgagccccggggcctggcgagcaggggcaggcgggagaagagtgggtcgggtgggattgtggtcaggcggttggaggtcatgtccagccgggccagcttgtgcaggcgggaaaaagcgccggcgggcacagaagccagcaggttgtggtcgaggcccaacgtgttgacgttgcccaggcggcccagggcctcccagggcagctgctcgaggttgttgtaggagaggtcgaggtcctccagtgtctcggcacaatcatccagggcgccggccgccagcgctgccagctggttgttgctgaggatgaggtggcgcaagttgaccaggccgcgcagctggccctcgcccagtgaggtcagccggttgccatccaggtgcagggcacgcagggcccgcaggtcggcgaaggcgccggcagccacgtggcggatggtgttccgcgacaggctcagatgcagcaggcctgtcatgttggccaggtcgcggcggcgcacggaggcgatgaagttgtctgccagccgcagctcggctgcccggcggtccagcgagggtggcacgaacaggaggcctgcccctgggcacagcacgcttaggggcagcgactgtgtctggcagcggcagcggcggggacatgggctgggtgtggctgactggggtggggatgaggcaggggccagcggcagcaggcacaggagcaacgggaggatggccatcgcgggcaggggtgtcctgcggagaagaggggaggcgtgagggcagaagaggggttctgcaggggctgggggtggtctgagaccaggagagaaggtcacagtgggctgagggcagaagggctggtcaaagaccgtcagatgtgaccaaaagccagaggaaggccaggcgcggtggctcacacatgtaatcccagcatttggggaggctgaggcaggaggatggcttgaggccaggagttcaagaccagcctgggcaacaaagtgagaccgtgtatctattatacaaaaatttttaaaaattagctaggcatggtggcgcccacctgtggtcctagctacatgggacactgaggtgggaggatcaatttgagcccaagaatttgaggctgcagtgagctatgattgcgccaccacactccagcctgggcaacagagcgtgactctgtctctccaaaagaaaaaagtaaagaaatggtcagagaaatgacagctggtctgggtgagtggcaggaaaaccagagggctttagacgtggtcagagatggtaaaagctggccatggggagacggggcagccagggtggcaacaatgatcagaagtggtcagatatgaccagagaagagaaggggttacagatggtcaggaagatgagcagtggacaaagagaagggagggcatgggttgggctcagatctgggggagatgaccatgtcagagacacgtggtcagaaacggcccaaagccagcaaggtggtcagagaggaggaaaaggacagacatggcagagtcagtgggagcccaggacagctgctcaggaggatggtgcggggagaggtcatcggagagaggaaaggcagcagagatgttcgagatgatcagagggcatcagcaagtgagagaggagaggtggccagagattatcagagggcatcagtgagtgagagagagagaagaggtggccagagatgatcagagggcatcagcgagcgagagaaaagaggtgggcagagatgatcaagagggcatcagtgagtgagaaagagagaagaggtggccagagatgatcaagagggcatcaatgagtgagagagagagaagaggtggccagagatgatcagagggcatcagtgagtgagagagagaggagaggtggccagagatggtcagacagttgcagactgggagttagggtcaggggtgggaggagggcaagagcagtgggagagatggccagagaaagggaaaggtggccagaggaagctagagaggagagatggacagaggctgctggagagaagagtggtggacagcaatgtcaaagatggatggggacggtcacagacctaggcttagattcaggggtggagaaggagcaagagagctggtgaatgatgattagagagaggcacagtggacacagatgtcagcgatggtcactgagaagcagcaggcagaggcgactggagagaggacctgtggacaggggtgtcacaaagatgatcagagagagaaaaagggaacagagatggccattgagaggacaggtggagaaaggagcccagagagaggagtggtggacaagagaggtggcggagacggtcggaccggatagacagcgaaaggctgtaagggttgcaggggtcagagacctggaggtcccatcaactgaggcagggaaggtcagagaggggcaaggatggccagtgtccagagagtgtttggagcagagcaggagctgaaggcagacccatgggggaatgtctttttttctggagaaaccccaagagtgtcaaagggtacctggtaccgtaacccgcagccacaatgctcctcccagcccgtccccaccttgaggtttcagcagccttacctgagctagaagcagccccagggagcagagtcctagctccaggggagtcagaggtcagggctctggagggagcatctggtcatgcttttcctgtccccaaggcttctgtagagggactgtgtcctgactcggctcaaatctgtggcaacggagtctccagaccttaatactcggggttccagacccctaaatattgggcctctagggtccagttttacgggtccagtttgggttgttcagggtcagggtctcccaggtccagtcttgggatgctaagcagccaaacggtggggtttagagtctgagatccgatcccggggttctgcattcagatattggggtgctgagtcaagattgggaggtctcaagccccagatttaagcactcaggtctgcagcaaggacttcaggcccaaactcgggttcaggccccttggaatcccacagtccagatcttggaatttgaggcctgaatcccagggttcaggtccccaagagtgggttccagggtacagtactggaaatccagtcccagatttcaaggtcccaggcccagaattcagagttcagctccaggcttgaggttttagatgtcaaatcttggggttctgctccaaatattggggtctgtgttccaaattgtggggttccggctccaaatattgaggtcccagtgaccgatgttgagattccagccccatatactggggttcaggctccagatcttggggttccacggccggatctcggggtgctggtcccagatcagggttccaggctcgggtttccggaattcccgattcaatctgggggtgcaggcccccgaggtggaggttagggcgcggggtccggggcggcggcgtcccggctggcttcctgggctgcggcggaggctgactgggagggaggggaccggctgcggtggggaggggggcgaccgggcagccccagggccgggtggggcgaggcctgggagcggagggacggtcagacagactgggacacgcgggatgggggcaccgcagcgcaggcgggggcgcaggggggaggggccgcgctcagagacccctcccccgccggggccgaggcgggggccgggcgggggccgggctgggcgggccgggtccaggcgctcccgcggcctcctcgccggcaacccagggcagcgcgcgcaccggcgcttaaaggcgcaggctccgcgcgcacccgcgcttaaaggcgtaggcacccgccccttctctcaaagacgcgccccggccccacctcccatggagtcgcactggcgctgctgggaaagagaatccctggatacagagagactgagacagagagacagagaagaacggagatacagaaaggcagacaaaaagatgggcaggcttagattgatggatagagaggagaaaatggaaagaggcagagagacagattgaaacacacacatattcgagacatggaaatgcacagagacagcgagacacagagagtgatggagagacaagagataaggacaagtcagagaaagacagaaacagagatagagacgtgcgtgcgcgcgcacacacagacacacacatacacactcacacgctctaagacgcagcacctgggctgtgagaatggtatgtgtgtatgtgcattcagtaactattcctagccttgagtgtagcgcttcattccagagccactggccccccaaacctgtctctttctgccccccttatctcagcaccacctccctggaatgtcctttccacggttggagtttccttacctggccatgcccagcaataggcttgatctttcaggccagaggggctccttcccaaggctcctttctctgcctgcaagagggaaaa

SEQ ID NO: 8313 - DNA, 6000 bp, Homo sapiens
cgcggcggggccgggctgcgcaggctgctgctgctgcggcggcagcggtggcggcggcggggactcgggcggctgcggcggtggcgccggctgctgcttgctggccccctggcgcccgcggaaggacgagacgcagactgagctcagcattggacggggggcggggcgggaggggcggggacgcaggggcggggacacggggggagagaccgacgggattgggtgggaggaggagcgaggtagcgggggcgtggcttaggggagaggaaccaaactgattggcctgggggaggtggggcggggctgtggctgggaggagtggggcgggcactctaacgcgacccagctggacgagtcggggccgccaatgagacggagcgattggctctttctaagagagcagggaggaggggcggggcggggcgtcaagggaggcgggaccggttactactaattgtgttcggcagcactggtagccaggggaaggcggggctagatacgatagagagagaccttactgaactgaaaaaagtgcgggcggggtagagggaggaggggacacatccaagctatttaaagacgcccgactggcctggaggggcggggccaccatgagagaggccgtcctgattgggctgagaaaggggcggagagaaacaaaacagatcgcacgccctcacctaaaacaccgctaggcaggacctggtggggaggagcattgcttggaagagacagggccgcagaaagtagaaacggtccagatgagactgcatggggcgggaactagagatggaggactttcccgcgcaagggggacaggctggactgaaagaggacacgggaagaacaaagacttagactcggtgagaaggtgttgaaacttgagagagtcctggaaacccgagagggtctggataggcctaagggagggagcggggctgaggctccaaggcgggcctggttagtcggggctgggcccggagaatgagtgtccggatggatgagtggtactgaggaaggtgagtggggtcgacaaatagaaaacgtcttgaggcagggcgcagtggctcacgcctgtaacgccagcactttgcgaggctgaggtgggtggatcatttgaggtcaggagttcgagaccagcccggccaaaatggtgaagccccgcctctactaaaaatacaaaaattagtcgggcgtggttgtgggtgcctgtagtcccagctagtcgggaggttgaggcaggagaatcgcttgaacctgggaagtagaggttgcaatgagtcgagatcgcaccactccactccagcctgggcgacagagcgagactctgtgtcaaaaaataaataaataaaagaaaaagaaaacgtcttgaatgggcggtaggaaagagagactaaggaaggagcggggcttgagggtcttgaaagcaaccagggtaggcgagggcagggcagggctaagggagggtagaggaacgggagaggtggatcccaggggaacaatgagactacaaagagtacaaagctactgggctggatggaggggagggacctggaacggggagtcttcgggatcagaagacctgggagagggcactgcctaaaggtcacagggtctcaaagggcgaggcgagaacttctaacgaacgctacaccgcggcggactgcagattggaggaccgagggtagatgaggactggtgaggagggggcacgcaaggaggcagagaggacgggagaggggagaggccaaagcgccaggaagcaccgtcaagactgaggcaatataggcaggaccgataaaaaatggggtgggctaggagtctcagaggtcgggttctggggaagaatggagtgaggggcggggccagaaaaaggggaccgcctcggagcgggccgtccccgccccctgggcggtcgtaggctccgagaggcagagcgcaggctcagggggctggggcggggccagcggctgcggctggggctgcggagggaggaggcggcgcctgcgggagcgaagggggcgggtcagggggctgcgggcgccctcgggcagcacagtttctggcccgccgcttcctgctgcaggtgcggcggctgattcgtatcgcctcccaaccccatcccacccccgctcccgtttctgggtttcttggcgtctctttttctcccttcttgagtatttgtgccgccgtctctgttcccacccctctgagtctccgacccctcgtttgtaaatctgccctcctgggtctctgattctgtccccctccttctgagtctttgctcctcttctctctaggcctcagtctctcctccctggtgtctcagtccccgcccccccaccccagctcccccgagtctctttctcttggtttctgtaccattttatcaggggtgtgcctctctgtctggggctctgtaccgcactccctgggtcttgtgtccctgtcctctactccctccccgcaacccgctttgtcctgcctcctctctgggtctctgccctttcatctgagtctgtctcctccttgctctctgacaacctctttcccctcccccttcttcttccccttctccccatctctggtgtatttccccctccttcttccccttctccccatctctggtgtatttccccctccttcttccccttctccccatctctggtgtatttccccctccttcttccccttctccccatctctggtgtatttccccctcttccgtctctttccctcctctgtctctgctctttctcttgctggctctctgttcttctctctctccctctaagtttctgcctcttcactttctctatgtcccctccctgagtctctattcctcctatgtttcaccttcttctgggtctctctctttctaggtctctgtctccacttcctggggaccctgtccccctctctctgggtctccgttcctttttctcagaccccccatcaccctctctaacccccgtcctagctgggactgcgtcactgcagagagagttgcagaagtggggcctgtcctgcagcccaggaaggtcgttgccctcactccccagacccagggctctccattgcacccaatccatcatgtccttcagcttctgatggaatccaagagggcacagaaaagacataggtacttcctaccccttccccgaattctggtgcacccccaggcagaagcagagaatcctgaggtgagggactgggctggggctggatgaggctcctgggcaattgggggtggggtggtggaggcaggagcaagggctgggtaggcactatgggctaggtaaggacctcggtcgccatcctcctccacactcccccctcaaccctgcttttcccttctgcttttcacagcagccaggcacggtatcaagtggctaaatcagcgtttttttgcagaggtcagaagtgtgggagaaggtgggggctgtggggaaaaggggctggaataaggaggaatgtgcgatgcgactcaggattagaggccatgggaggggaagaggcagcgggccgggagtagcaggctggtccgtccacattccatcaggccctgggaaacttggatgccagcactccctcatggccctccacagaccccaccagggtctatgggaggatttgtgagcctggagtctccacccacccattagagaggagggggcttctggaagcttcatgagggctccaaatactggacactcagctatgttcacagaccaggaggaagtagactcgactcttgactagggacaccaggaggggagaggccaacgtctgtctcgttttcagttcctttccccacccctgctcctcccaatccatccgttcccaggccctcaagacacaaaattcctgaaagctccaactcccatctacgtcatcttcggcgtcccctgataaccctccctcccccattaccccaggccctggaattggggaagggtcttccctccctgacttctacgaccccttccttgttcctctgcccccattcccacccggttccattcggagccttggtctctggacaccaaaggtgaaaatgtgaggactctctgcctacgatccttcgtcccctaaaaccctccaagtaccttggccccgaaagctcagagtcgaggggaatctccccgctataatctttgggtccctggatcccaagtcccccgtctccaaaactaggattcgggctgtcttaccgcccccggaccctgagccttcgccccctcccccgtactcaccccaagtcgaggcgaggtggggatgggggaatccggggctcgagatggggggaggggtgacccagccccggcagctctgggcagcaagaggctgcagaggggggagtgacatcaccgccggaggaggggcagcaccgctcccccaacccaggggcttcaagctccgcctttatggcggaccccggggtcctggaatgccaaggcagagaggagaaacaggagacgaggtccgagggaacggtatccccgccccttagaacaggaactggtaaacccttaccaattacagccacccccgactgccacctgtggctgccgtcgcgacctgtcgcctcccacgcatgttgtggctgcgcccgcccccgtcagggcgtgaccacggcgtggactacaacgaccgtgatgctccacggagccaggagcctttgacgaaaggcagcgtaggcgagggccttcatgggactcgtagtacaaggcccatcacaagggtgcgccgtggagaaaaggggtgatacccttcgcctccctctcttcctcaactccgtgggtccatgcacaaagctttctcttcaaaaagtacgctctgaaaagaagcaacctaggcaggttcgttcaatggaaatattggatttttactgagtagcgctagctctgctacccggtgcgcatgcgcatcacctgggcggcacccgcggtactgcgcctgcgcggtctcgcgccttcccaggtccgctccgcgagggcgagcgcgcgccagtcccactcgtgcgccgctcttcatgtccccgcggtcgaagacggtcacatacgcccccaagaaaacgtcgccgaggatccacacaggtactggaggcgaagcgatgtccaaggcccggaagccggacaagcagaggcggacgtcaccctgagcaaactgcaaggcgacaaggcggcaactgggtgtccaggccgcaggaaccaccatttccctgggagtccgtgctctctccgcccccaaccccggggacaagaaatgtttctgtggccccttccggccctagtgatgtccaactaccagctccaccctctcaactccagtcatattacatcactgtggcgtcattatgacggacacctacctggatgacgtaatcctgggccgtgagattaaaccagacccccccaatgaggagtgagactgcggggagctttgggatttctgagcaccggatgatgtactggtggaggagaggaacaagtgaagatgggagattcctgctctgctcaaatcccgtccgtggctccccagtgccatggagtaatgttcatattgagcacctgggtattcagcaccgtgtgtggacagccctgttgcctaggctcctctcatctagtcccaaacaaaactgcattatcatctcccccaacaaccccccccccactcccacccctacttcaccatccactgagccacttagcatagacacttgggaagtatctttgcttcctcccaccactctctggcatgtcacttaagaagcccagtcccctctgtcctggatacgctctagctacctgcttcccatcctcaggccgcagtgttcgccatggaattgccatcatcttccccaggacacacccaccagagactgggacctcacctccccagccagcaaggggattcccccaatggctgcatgcagggcccggatctcctcagtgggtcctacgatgacaggtgtgcctgtatccaggatggcagcac

SEQ ID NO: 8314 - DNA, 6000 bp, Homo sapiens
ccccataccccatgggtcatgtcaaagtccagagggttgtggctggttgtaaagtcacccaggaggctaggatggaacccgggtctcctgcctcttgccctgacacacccccaagtcacctggagggactgggtgggcaaaggtgggcgaatgggactgtgtgcgagatggaggtgccaggcagttaaggctcaaaaggtcctattacggtcaggcgtggtggctcacgcctgtaatcccagcactttgggaagccaaggagggcggatcacctgaagtcaggagtttgagaccagccggaccaacatggtgaaaccgcatctcaactaataaaaatacaaaaattagccgggtgtggtggtgcatacctgtaatcccagctactcgggaggctgaggcaggagaatcgcttgaacccgacaggggaagtgatgtttgtgggccggaaacagggccccagagccaagatcgtgccactgaaccaacctgagcaacaagagcaaaactccgtctcaaaaaaaaaaaaaaaagaaaaagaaaagaaaagagggaggcccaggtgggcggatcacgaggtcaggagatcgagaccatcctggctaacacggtgaaaccccgtctctactaaaaatacaaaaaattagccaggcgtggtggcgggcgcccgtagtcccagctacttgggaggctgaggcaggagaatggtgtgaacccgggaggtggagcttgcagtgagctgagatcgcgccactgccctccagcctgggcgacagagcgagactccatctcaaaaaaaaaaaaaaagtcggggttgctgatgacgggagtgaagggatccacgcgcagcactcagcacagcacagcgggcactcaatgcatgctggccctgaggcagggcctgggctgtggggtcgcagcagctaacgcattccagggcggtcaaatgggtgactgtggccctcactccccatctcacttgtgacgctttggcctggcttctggccttggctacgctgtatccagcctcataaattatccagctcctgacagcggcactgaactcccttcctgggaagacagctaaggccactgccaccgtggtgggaggcagggcttccagaggagaaactgaggcctggagagcagatgcggtggggggttcctcgcggcctctggcgatcgttgccctccactccgggctgctttggcgcctggggtttggattcctgcactgggatttcccctgggacaaggcgttcctccctcgagagctggtatgtgctgtttctggacattccttgggactcggctgtccctgcggccactgacccgacctctgcctggagcaacttccagtccctcctgggtctcagggtctcctcgaccacactccactccactcaccgggggtcacacacccggaactccctcacacctccggtggctgggagcaaatgcatggcccagagcccttggcccaggggagcctggaaactggcactgagtccttctggccacagctggctgtttccaatccccccacctccactccccaccctggcttcaggcgatggcagccatctcaagttctccaggcaaggatgccaatggggggaccgggcagggcctcccttccctcctgcattggccaggaggggtagcaggggcccccacgcggtggggcagtagagcagcactgcggctcttgggaaaattactgtccctccctgtgtctggggagaggtgtggacccaagatcgcttttcgatgttgaataactccagaattttgcagtctgagagcagacgtttgccctcagcgggttcagggttgtggaattctaacacgcttccagtcctgggacgcagaaggcctcacaattctagaatcccaagaggctgaggtcctgcaactcccaagaggctgaggtcctgcaactttgatgggaatctgcctgggtcccgggttccagaaatctctgtcttaattcctggcttctttctggaaggcggacagtgagttctccctcatccgatgccacccctgacagggtatccggcttgcaggtcgtgtgactcggagggctctgtccggcgctgtttccagaggcccgggcgctgggctgggcgtgggcaccaggcctggctgccccaagcctggttgccagtggaatgtgatccttggttcccaaacagcaggcctctcctccgccccatgttccatcctcgtgccccctcccccactccctggagcacgtcacctcatcatccatccatttctcaacaagtcccctctcctcagcaccccaccctgcccgccccgcctgcctgtcacggcctgagcccaccccacctcccccagacaggcttggaggctctagtccctgatctgccgtggccaggctggggctccaccttgccgagcctcagtttccccgctctgtgcaatgggggtgagcttctgatctccatgcctgcgggtgctaagctcaggcctccctggctctcacctctgcagggctcctggctgtactcacagctcaactccctacaaggtgcccgggcagccagcagggagccctgaggctccgtgtcacccctgtcggccttggaccttggacccacagggcccttttgggactgaaacttcagggaccggccagaccctcccatgcctgctgtagatctgaacgctcatgggcgtggacccccacatggtagcggaggcagacacactccacaccctgatgggcccacctcccctcatcgcaaagctccatttccgagaacatttcctgtttgtgacaccaacagggtccccagcccacacagtgcagggcggggactcccccagccagccagactccggccagccttgttggggccctaagtcacatggccccctgtgagcctcgctttccccatctctctagtgggggctccccagggagcatgtacggagctccgtcacacaggggccagcagggaccagggggcgggacccgggaggtgcagctggtggttaatggtggaccacaagttacagtgattccaccaacatgcacctcaggccaccaccgtgtgtgcacactcgagacacacagacacagccagacacacacaggcagaaacacagcagacacacaggcagaaatgtgacagacagaaacacagcaggcagacgcacagacgtgcacagacacacacacagaaacatggcagacacacagacacacacacagatagaaacatgacagacacacaggcagaaatgtgacagaaacacagcagacagatgcacagacatgcacagacacacatacagaaacatggcagatacacagacacacacagatagacacacacagaaacaccacagacacacccagacagaaacatgacagacacacaggcagaaatgtgacagacagaaacacagtagacagacgcacaggcatgcacagacacacatacagaaacatggcaaatacatagacacatacagatagacacacacagatggaaacatgacagacacagacacacacaagcagaaacacaacagacacacagacacacgcagatagacacacacaagcagaaacacaacagacacacagccacacacagacacatacaggcagaaacacgacagacatagacacacacagatacacacataggcacacaggcagaaatgtgacagacacagacagaaaaacacagacacacaggcagaaacacaacaggtacatagatacagacagacacagaaagacacacagaagaacacacagtatttaacagtcacagactctcggcagaaacaaacacacggtcacacacacaaaaccaccacacacgcacagacacagacacacaaccagggccatgcatggttcactcccagagacaagatcacacacacagccgcacaaccacactcgatccctgccacacccagggcctgggccccctccccggctgcagccccctgagtctgggacccccattcacagccatgtggccccacagagaccagagagccccccggacagaatcagcctgggccgcacccagacccagccgcctgggcgcccagggcaggcctcagggcaccatgccacccgccgggccacacaggggacacctggcacctggccgctgtcaccgcgggctttgcgacacacccacagcagggcagggccagcgccggatgcgcccagcagcccgggctcacaccagagcagtgcatcccgccctaagccagcggggcgacctcaccttcagagacctcatctgcggggctcccacctggctggatcccgcgcccgggggtccgggcgccgtctggagctgagcaggcagatgtgcgggcgccgagggtggggcgagggctgggggcgggcagagggaggggaaggacgggctcgagcgggacctcccagggaaactgagtcagtctggctgtgaccaggggcgggcccagcagaggacccacacagatggagggcgtggcggcacaggacgccctggggtcgcggcctggaggggtccgcgggggctaagccgagctgggacgggtgggggccgctggcagcccgcggctcgctctctccgtccagtctctgtctcccgctgtctctcatcagccccgcccaccctgcgctggccacgcccctcgggcccgggcctggctgacttggagtcagtgggtgccccccgcacgccgggacaccctacagccttctggggaaggcggcgcccttgggacccccaggccaccggtggcagggatgcaatggcccgcgtaggggtggcaggggcgcttcctcgggagcctcagcccctccagccgcccagcgccctgccaggcctcttcccggcgctcccgccgccaggcccgcattattcaccatctgggcagcacccaaggcctggagggggcggggcaggtccaggcggatcggctcccgggggtcgcccagactccagggctccaaattcactgggtgcgctggaacgcggcacacagtagtagtatgccctgcttaatacatacaggacatatttgaggccccttccaggggtggggtgggaggacagagggatggggggtgcaccagacgacacagccagactgagaaaggtggtcccagagcaggtgagccgggagggctggggtgatggcatcgcatgggagggtctcttgaggaggctcggaggtggctttggagccagaggaggaacagtctggagccgggaggctgcagtgggggatgggcactctttcctggccaccccccagctcgggctggggaaggagggatggagcccaacaggaatggctgagaaggtgccggacgcagggactgggaccgtctctttgcagaggggggaccttgggcttccttggccttgtttgtacacccgagccggacagaaccttgagttagggacctggagtgggaccggacaagctgaccttgccctgactgcaccccaccccgtcccctgggcccgggagggctgctagtccaggctgtgagtgaggggtattcccagcctggcccggccctctcgtcagcccagtccggaagccccttccccggctaccccgcccactatccttcctcctcctggccttcggccacacccaacctccctcccaaagctctatcccattaagtcaccagccatttaacacaacttctctctttcctggcaaggaggctatccaactcctatggatgtggcaaaaccctggctccaaggctgctttcccgtgaagccgacctaatctccaagtcttactctccccaacccctctctgtgttcagcttatacagtgggacaattatgagctccaagtgagacctgaaaccaggcctgcccttcaggatgccctaggctggagaatgaactggacacaggctgttccagccccctggggtcagggctgggccaaaggaagagacagggcctagggaagcccagaggt

SEQ ID NO: 8315 - DNA, 6000 bp, Homo sapiens
ttttttttttttttgagacagagtttcctcagtcgcccaggctggagtgcagtggcgcaatcttggctcactgcaagctccgcctcccgggttcatgccattctcctgcctcagcctcccgagtagctggaactacagtcgccccccaccacgcccagctaatttttttgtatttttagtagagacgaggtttcaccgtgttagccaggatggtctcgatctcctgaccttgtgatccacccgcctcagcctcccaaagtgctgggattacaggcgtgagccaccgcgcccgacccatctcatccctctttatctcactactccgcctcattgttcatggcacttatcaccaccaggcatcatattttatatttatttgattccttgtctccccacttggaatgttggctccatgagggcgtcacttcacctgtcatgttcactattgaatccccagcacttaaaataagggccaggctccaagaaggtgtcagggaatgtttgctaaatgagcggatgctcgaacaagcaccacagggctggaagggccccgtcctcacctgcagccgggccaggatttggtggtagtggaacagggtgcagaagtccacgtgggccgagaacgcctccaaagccgccttctctgccggactcgagtggaattcctgttacctcaggaagcaaaacttctctgtaggccttttccccttccccgagggaaagaattctttccctggctgcctaactacacaatcagagctctggactttgaagttttgttctggggctgggcgcagtgtctcgcacctgtaatcccagcactttgggaggccgaggcagtggatcacttgaagtcaggagttcaagaccagcgtggccaacatggtgaaatcctgtctctactaaaaatacaaaaattagccgggcgtgatggcatgcacctgtagtcccagctactcaggaggctgaagctggagaattgcttgaaccagggaggcggaggctgcagtgagtcgagatcgtgccactgccctccagactagacaacatcaagactctgtctcaaaaaaaaaaaaaaaaaaagttttgttttggttgggtgggggctgaccaattttactgaaactgaggcagccaaatatagtgaaaaactatactgggcttaaaaagctggaggttcaagtttttgctttgacatttcctagccaatacacacacacacaattccaggaacggtttgacagtgtaatatcatcctccagaagtagatggaattattattattattatgttgagacagagtctcgttctgtcacccaggctggagctcagttgtgcaatctcagctcactgcatcttcaacctcctgggatgaagcgatcctcccacctcagcctcctgagtagctaagactacaggtgcccaccaccatgcctggcgaatttttttcaattttttgtaaaggtggagtctcactatattgcccaggctggtctgaactcctgtgctccagcaatcctcccacctcagcctcccaaagtgctgggaggctgagccaccatacccccaaggttgatggaattataactcccatttgtcagtgggagaaactgaggctctggaaaagtcatttggtaagggctgcagtgtctgtgggaaatgactgctatctaggcctgtctgactccagggtacacattgaaccatttcctttttttttttttttgagaaggagtctcactctgttgccaaggctggagtgcagcggccatgatctcagctcactgcgacctcttcctccacggttcaagcaattctgcctcagccttctaagtaactgggattataggcgcctgccaccacgcctagctaatttttgtacttttaatagagacggggtttcaccatgttggccaggctggtctcaaactcatgacctcaggtgatccacctgcatcgacttcccaaagtgctgggattactggcgtgagccaccatgcctggccttgaaccacttcttcttctttttttttttttgagatggagtcttgctctgttgcccagactggagtgcagtggcacgatctcggctcactgcaagctccgcttcccgggttcacaccattctcctgcctcacctcccaagtagctgggactacaggagcctgccacctcgcccggctaattttttgtatttttagtagagacggtttcatcgtgttagccaggatggtctcaatctcctgacctcgtgatctgcccgcctcggcctcccaaagtgctgggattacaggcgtgagccaccgcgcccggccttgaaccacttctttatgtttcctatgtcaatgtcctgggtaattgtcttcacttctctgagcctcagtttcctcactggcaacagaggattacacgctctttcttggagggctacggtgagaatttgatgagattacacatgtcctatatacacatgtgtttacatatatgtgcatatatttgtatatttatgtgtgtatatttgtgtacttttgtgtgcatatatttgtgtgtgcgtgtatttgtgtgtgtgcatttgtatgtgtatatttgtgtatttgtgtacacatatttgtgtatttgtgtgtgtacttgtatgcatatacttgtgtgtatttgtgtgtgtgtatttgtgtgtgtatcaagtccagcacagaattgagtacatacagtaggtgttcagtaaataaatgttaaattaatgaatgatggtgaggtgtggtggctcatacctgtaatctcagcactttgggaagccaagatgggcagatcacttgaggccaggagttcgagaccagcctggccaacatggcaataccctgtctctactaaaaatacaaaaattagccaggcaagagtcccagcctctcgggggctgaggaaggaggatcacttgagtctaggaggcagaggttgcagtgagctgagattgtgccactgcactccagtctgggcaacagagtgagaccctgtctcacaaaaataaataaagaaaaataaatgaataataatcctcaaaatcctcaataatgacaatgatgatgatggtggcaataagacctcaggttctagagtgagaccaagactaggatgaggtgaatatggcacccaagggtgcaaaatttaacggggcactcactcttagggtcaagcgagtgccctacttgcctaaccctagtcctgggccagctctggagtcagaccactttggttcaaatctaagccactatgttgtggccttgggtaagtcactttccttccctatgcttccattatctcatctgtaaaatggggatgatggtggtatctctcttactgatgattcaacaatacatgaaaaatgtctggcacagtgccatggagtcagagctcaaattgtgtgataataattatgattacagcgttgtgactttataggtacaattattatcaggtagtagaaatagtaatgatgaggatgattactatacccatcttaaagagggaaaaaccatgccccagagagtgcctgttcaagccctcagaacaagccagagttgggaatggatgctgcgtctgcatctcggagacctggctcctgcattccagctcatctcccgcccactagggaaacacgaagggacccgggaactacaactcccaggaggcgccagggcagctctctgcagcaactagggccctgccgccgcgaagcctgctgggagccgtagtccccaggctcttgggcctgggacaggcggtacctgtattaggaggcggagcagctgctccttggagaagggaatgaagcgctcgcggtactgctgggcccagtcgcggggctccctggggttccacatcttgcgatactcccccattttggctgccagcgatgagagggcccgggggggcccgaggagcgcgggcaacagtggccatactcggaccctggacccccagaccccccgggtcacatgcagcatggctagaccctttccccggagcctaaacagaggaaaatgggcaggggtcaaaggccatctagaggaaaagcgccctctccacctccacgtcccaccctccagaagccgtctctaccccaggcagggcgcagagcccatccgctcgcctcaaagcccctgttgcctgtccccttcccacactgctcagttggcctgggtcccagacaggggtcagaggtcttaggttctggggcgtttttcaggcccagagaccctgtagtggtacaacgtttctttggggtctagacagcgaggtagatcttaggagagcaggaaatgctcgtaaaggttacctagggggtgcagggccgccctccctggccatgcaatcccccgatttctccctcaccttagccaaagctcgactgtcattgagcctcctgcgcatgtgcaggagggcgtcctgggctcccgaggttcggcttcacccagcagtaaaacgcatgcgcaaagcttcggtcaatgcgggctgtccatttctcaccgccgactccctacatcaactacgcatgcgttgcctgcctttctccaccgccggcctcgtttgggcgcgacgcatgcgccgcaggagtgtctccttgtcagcttgctacaaagggaaggggcggtgtggacgcgagactccctagagggatggggcggggtagggctcccgcgcgcagtccgccaacggcgcgcagtccaacgttcgccgaggccacgccccggctcgtgtcagctcctgagtaggcggaaagagggagggggcgggacttgggcgcagccaatcagctgtggaggagcgaaaaggcgggaaaaagcggaaccaaaagaaggctgaggtggcgctagggaccaggaggggtgggggtggcgaaaggaagggcgggccctcaggtgacgcagattggccctccagagaaggggcggccccttctcaggtgccgtcacccccaaacctcagcactgccattccaggtccttaaaggggagaccgcgattctaagaaggtagcccagtgccggggcgtggcctcattctgaggttccccacaaatccgaggtcccgactcccagcttgaggaggtgcacttccgtgaaaatggagctgaattcgaaagggaggcccttattctgggaaatggccccaagtgacaaggacagcctgaaatatgccctgagatacctgggttctccacgaagggtgctgtcacccccaaacctgaaagggattattcggtttcagacctcccaggggctctgatctcaatggccgcaccccctagtccccagaaagtcccacctgtgtcctctcacagaaggacccagtccctctgcaggcccttcagctcctgggtcacaagacgtggtccccaaatatcccagccctcccctgcactccacctctgggatccctgacagccctctcgcccaacaaccccctcagcccacattcctgacttctggaacctgaagcagccccttcacttatgtcccccactcctgggacccccagaatcaccctcaccccaggccctcacctctctggaatcctccatagacccccttaacccacacctcaacccaggggacccttagcgactctctcatcctgcacctccacctctgtgacccctggcagccctccccacacgacaccttgcctgggacccctagtatccccatcctatgcccccctctcctgggacccccagaaagctccctcaccacacacaaccccattcctgggaacccccagcacccgcatcctatgtcccccacttcagggacccctagcagccctctccacacaacacctttcctgggaccccccagaacccccatcctatgcctcccacttctgggacccctagtagccccctcaccacacaaccccattcctgggacccccagcacccccatcctatgccccccactcctggggcccacagaagccccctcagcacacacaacctcattccctg

SEQ ID NO: 8316 - DNA, 6000 bp, Homo sapiens
tgggcatgccactcaacctctgtgagcctcagtttccccttgggttaaacagggatcataatgcctgtgtcacagggttgtggtgaggagtagagaaactaacaccagcgaaagatctggtgctgggatgcggttttcaagattcccctctttccctgggggaggacaacggacacaaatctcaatcatcctaggccctctcctcacacacggtaatgatttgttttgataataatcactatttaagcctgggtgcggtggctcacgcctgtaatcccaacactttggaaggccgaggcgggtggatcatttgaggtcaggagtttaagaccagtctggccaacatggtgaaaccccatctctactaaaaatacaaaaattagccaggcatggtggtgcacgctggtaatcccagctactccggaggcacaagaattgcttgaacccaggaggcgaaagttgcagtgagctgagactgcaccaactgtactccagcctgggtgacagagcaagggtctgtctcaaaaaaaagaaagaaaaagaaaaaaaaatcactaaggaaagatcactacttgcctggcccatgctaatcagtttataggcattaatttgttacattttcacaatgattcttcctaggagtagattattaggatcctctttttacagacgagagtaaggagatgttcagagaaatcacatagcttgctcagggtcacacggacacagggtgaccaggcaagccatcaaaccaaaggggcacttttgagaaagaaagttgctgctgctggtaaggacatcaggcctggcccaggtaaactgggcagtatgccactttgcatggacagcacgtgcctgagccaggattccaggcctgtttgttccttctccaagctcaggctctagaaggggcagagaggagatactctggattagcactctgggggtggagaccctgggtctgagccggggaactccacctactcctaagacctcgatcaagtctcaacatctccctgggccttagtttccaattctgttaaagcggagtggtggaagcagcacaggttaaaggtcagagccacagccctaacccttcatgtactgagatccagagatgaacagtgattggttcaagatcacacagcaaagtctgggctgaatgaggatttgactccaggtgtccagattcttcaggagtgtggggatgatgaaatgaacggtggcatggtgcctggcacacggttaccacccaacatctggcacttcagggctgcactccttattctcttcctagaagccccagcccctgttcctctccttctcctcctccctcaactgggaggtggaaaataaatgggctctggcatctcacagatctgagtttgaatcctgcccctgcctgttactgcgtgaccttagccaatgctgtctaatagaactctctggcatgatgaaaatgtcccatatctgcactaatttttttttttttttaaatggagtctcgctctgtcgcccaggctgcagtgcagtggtgtgatctcggctcactgcaagctccacctcccgggttcacgccattctcctgcctcagcctccagagtagctgggaccacaggcgcctgccaccacacccagctaatttttttgtatttttagtagagatggggtttcaccgtgttagccaggatggtctcgatctcctcacctcacgatccgcccgcctcggcctcccaaagtgctgggattacaggtgtgagccaccgtgcccagccacaatttttttttttttttttgagacagagtctcactctgtcaccgaggctgcagtgcaacctccgccacatgggctcaagccatccttgagcctcagccccctaagtaactgggactacaggcttgcgccaccatgcctggataatttttgtatttttagtagagatgggttttcgccatgttggccaggctggtctcgaactcctgacctcaaatgatctgcctgccttggcctaccaaggtgctggttttacaggcatgaaccaccacacccagcctgtactgtctaatatgagagtccccagccacatgtggctgttgagcacctaaaatgtggccactgtgagtgaagaatggacttttattttaattagtgcaaagtgaggtagccacatgtggctgtggctaccccactggacatcccagatttaaaaaatttacttaggctgggcgcggtggctgacacctataatcccagcactttgggaggctgaggtgggcagaacacttgacgtcaggagtttgaggccagcctggccaacatggcgaaaccccatctctactaaaaatacaaaaattagccaggcgcagtggcgcacacctgtaatcccagctacttgggaagctgaggcaggagaatcgcttgaacccaggaggtggagttccagtgagcggagatcacgccactgctttttgcactccagcctgggcaacagagcgaaactgtttctttcttttcttttttcttttttttttttttgagatggagtctggctctgttgcctgggctggagtgcagtggtatgatctccactcactgcaaactccaccacccgggttcgagtgattctcctgcctcagcctcctcagtagctaggattacaggtgtgtgccactatgcctggctaattaagattgtttcaaagaaaaaaaatttacttaacttttctaagccctagttttgttatctcagagatgggacttgcagcacctactgtgagggctgttccttactatgagagtccatcagtgcctcaatagcatagggcctatagtggggtgctcaggaaaaggtggtgtcagcatttgctccgttgtcttgtttccccgtctgaccccttccttgtcctcccatctcccgcactgtgtctgggagttgagagctcctggctcctgtcacccaggggcacagtcgggccatgggagggcctcaccccttcgaagacccgcgtgatggtcttgggccttctcagaaactgcacggcttcgctgttggccagctcctggaggcttttggggatgtgcatggcagctgttttcctttggggccactgggaggtgggagccagggtgctgggcgctgcctgctgggcactgccgtccgggggcttcaggccagccctgggcttggctgctgtgggatgacacagatgggggatgccagtcaggggcacggggtggaagggctgttgggggccccaggattgggggacatggggtggggatggggggggtccccggaatggagttgtgtggggtgaggggactgctgagcctcttaggagtcagggtgtggggtgaatgggctgtcaggggccccagaagtcggggacgtaggatgggggtgcaggtgggtcccagggaatgaggttgtgtgtgctgagggggcttctgtgggccccaggagtggggggcataggatgggggtgctgggggtcccaggaatggggttgtgtggtgagggggctactaggggtcccagaagtgggaggcataggatgggggttctggggggtcccaggaaaggtgttgtgtggagagggctgctaggggtccctgaagtgggggacataggatgcgggtgctgggggttcccaggaatggggttgtgtgtggtgagggagctttctgggggtcccaggagaggggggcataggatggggatactaggggtcccaggcaaggtgtcgtgtggggagggctgccaggggtcacagaggtggaggtgcaggatgagagagtcgctaagggtcccctgggttgaggtgtgggttaagggggtctatggaggattccagagaggtgagggcctggggtgagggtgattctgggggtcccaggagtgggggacataagtgaaggggctgcttcaggttccagaagtcaggaatgtgggctgagggggttgttgggcgagagggctgtcagggatcccagaggtggagtgcaggggagggctgggatatttggggaccacgtcttgtgacccaggagctgaagggcctgcagagggactgggtccttctgtgagaggacacaggtgggactttctggggactagggggtgcggccattgagatcagagcccctgggaggtctgaaaccgaataatccctttcaggtttgggggtgacagcacccttcgtggagaacccaggtatctcagggcatatttcaggctgtccttgtcacttggggccatttcccagaataagggcctccctttcgaattcagctccattttcacggaagtgcacctcctcaagctgggagtcgggacctcggatttgtggggaacctcagaatgaggccacgccccggcactgggctaccttcttagaatcgcggtctcccctttaaggacctggaatggcagtgctgaggtttgggggtgacggcacctgagaaggggccgccccttctctggagggccaatctgcgtcacctgagggcccgcccttcctttcgccacccccacccctcctggtccctagcgccacctcagccttcttttggttccgctttttcccgccttttcgctcctccacagctgattggctgcgcccaagtcccgccccctccctctttccgcctactcaggagctgacacgagccggggcgtggcctcggcgaacgttggactgcgcgccgttggcggactgcgcgcgggagccctaccccgccccatccctctagggagtctcgcgtccacaccgccccttccctttgtagcaagctgacaaggagacactcctgcggcgcatgcgtcgcgcccaaacgaggccggcggtggagaaaggcaggcaacgcatgcgtagttgatgtagggagtcggcggtgagaaatggacagcccgcattgaccgaagctttgcgcatgcgttttactgctgggtgaagccgaacctcgggagcccaggacgccctcctgcacatgcgcaggaggctcaatgacagtcgagctttggctaaggtgagggagaaatcgggggattgcatggccagggagggcggccctgcaccccctaggtaacctttacgagcatttcctgctctcctaagatctacctcgctgtctagaccccaaagaaacgttgtaccactacagggtctctgggcctgaaaaacgccccagaacctaagacctctgacccctgtctgggacccaggccaactgagcagtgtgggaaggggacaggcaacaggggctttgaggcgagcggatgggctctgcgccctgcctggggtagagacggcttctggagggtgggacgtggaggtggagagggcgcttttcctctagatggcctttgacccctgcccattttcctctgtttaggctccggggaaagggtctagccatgctgcatgtgacccggggggtctgggggtccagggtccgagtatggccactgttgcccgcgctcctcgggcccccccgggccctctcatcgctggcagccaaaatgggggagtatcgcaagatgtggaaccccagggagccccgcgactgggcccagcagtaccgcgagcgcttcattcccttctccaaggagcagctgctccgcctcctaatacaggtaccgcctgtcccaggcccaagagcctggggactacggctcccagcaggcttcgcggcggcagggccctagttgctgcagagagctgccctggcgcctcctgggagttgtagttcccgggtcccttcgtgtttccctagtgggcgggagatgagctggaatgcaggagccaggtctccgagatgcagacgcagcatccattcccaactctggcttgttctgagggcttgaacaggcactctctggggcatggtttttccctctttaagatgggtatagtaatcatcctcatcattactatttctactacctgataataattgtacctataaagtcacaacgctgtaatcataattattatcaca

SEQ ID NO: 8317 - DNA, 6000 bp, Homo sapiens
tggcgttgttcagatgacttgatctctctaaacttgtttctcagtgaaatgggaaagattaatccctatttcaaaggggaaagaactgtaaagactgaataaagtaatgatcttaaatgcttgacaacacgggcacccaagaaataccaggaagtgttacctctgatcctgtacttagacaaaagtgaaggatgaatttaagcatggagccacataccccttgaacgtcctgtatcagattaaacacttttcctgtcctcactgtgcgagaactagaagtgacaagaaagaccatctgtcaatttttattgaatattcagcatgaatcctcctactcagccaactcagggttaaccctaaagtatctgttcttttttgggggggacggagtctcactctgtcgcccaggctggagtgcagtggcaagatcttggctcactgcaacctccgcctcccagattcaagtgtttctcctgcctcagccgccagagtagctgggattacaggcgcgcgccacaacacctagctaattttttatatttttagtagagatagggtttcaccacattggccaggctggtcctgaactcctgacctcgtgatctgcctgccttggcctcccgaagtgttgggattacaggcgtgagccactgcgcccagccaagtatctgttcctgatgcttttcgggttataggaggccctagaaaattggatgaggctgggcgtggtggcttatgtctttaatcccagcactttgggaggccgaggcaggtggatcacttgaggtcagcagttcaagaccaacctggccaacttggtgaaaccccatctctactgaaaatacgaaaattagagccaggtgcggtggctcacacctgtaatcccagcgctttgggaggtcaaggtgggtggatcagctgaggtcaggagttcgagatcagcctggccaacatcgtgaaatctcgtctctactaaaaatacaaaaaagttaggcacggtggctcacacctgtaatcccagcactttgggaggccaaagcgggtggatcacctgaggttgggacttcgagaccagcctgagcaacacggagaaaccctgtctctactaaatatacaaaattagcctgtaatatacaaaattagcgtgtggtggcgcatgcctgtaatcccagctactcaggaggctgaggcaggagaatcgcttgaacccgggaggcggaggttatggtgagctgagattgcaccattgcactccagcccgggcaacaagagtgaaactccatctcaaaaaaaaaaacaaaaacaaaacaaaacaggctaggtgtggtggctcacgcctgttaatcccagcactttaggaggccgaggcgggtggatcacgaagtcaggagatcgagaccatcctggctaacacggtgaaaccccgtctctactaaaaacacaaaaaaattagccgggcgtggttgcggcacctgtagtcccagctactcgggaggctgaggcaggagaatggtgtgaacccagaaggcagagcttgcagtgagccgagatggcgccattgcactccagcctgggcaacagagcgagactccgtctcaaaaaaaaaaaaaaaaaaaaaaaattagctgggcagggtggcgggcgcctgttatcccagatactcaggaggctgagggctgaggcactagaatcgcttgaaccttggaggcagaggttgcagtgagttgagctcttgccacactgcactccagcctgggcgacagagcaagcctccgtcaaaaaataaaatttgtatgaaactcctctcccagaaacagacataagtacacacaaaatgtagaaatgatttctgaaaatttcttttttctttttctttttcttttttttttttttgagacagaatctcgctccgtcgcccaggctggagtgcagtggcgcgatctcagctcactgcaagctccacctcccgggttcacgccattctcctgcctcagcctcccgagtagctgggactacaagcgcccgccaccacaccgactaattttttgtatttttggtagagacgaggtttcaccgtgttagccaggatggtctcgatctcctgacctcgtgatccgcccgcctccacctcccaaagtgctgggattacaggcgtgagcccccgcgcccggccaagaatttctaaaggctccttcacagaccccagctgaggaaaattatgaagtcctgcaacaaggtattcggggctccttaagggagtgtgtggtgactggaaggatggtatagtttacagcagaggtgctcaatcttgaatatgcatcagaatcaccggggttgcgggggggggggtcttgataaaccaccgtttgctgggtcccactgccaagtccccgactcagtaggtccagggaactgcatttctaaccaattataataaattccaggtgatcttgatgctgctggtccagggaccattctttgagagcctgtgtggggaaatgagagaactggatataacccacattttcagaactcgagacaaatcctattagtaaatttcactggaaaatgtttctcccacttactaggtatgtgttgttaggcaagtgtgtctttaactttcctaagtatgctttcgtatctataaaataagggtgttggccgggcgcggtggcacacgcctgtaagcccagcacgttgggaggccgaggcaagtgaatcacgaggtcaggagttcgagaccaacctgggcaacatggtggaaccctgtctctactaaaaacacaaaaaattagctgcacgtggtggcaggcgcccataatcccaactactctggaggctgaggcaggagaattgcttgaacttgggaggcggaggttgcagtgagccgagaccgtgacattgtactccagcctgggcgacgagaacaagactccatctcaaaaaaataaaataagggtatggctgggcatgggtggctcatgcctgtaatcccaacactttgggaggctgaggcaggaggatcactggagcctaggagttcaagaccagcctgggcaaaacagtgagaccccatctctttttttttttttttcctttgagacagagtctccctttgtcacccaggctggagtgcgatctcagctcactgcaacctccacctcctgaattcaagcgatttttctgcctcagcctcccaagtagctgggattacaggcacctgccaccaagcctggctaatttttgtatttttagtagagacgaggtttcatcatgttggccaggctggtctggaactcttgacctcaagtgagtgatctgcccacctctacctctcaaagtgttgggattacaggcgtgagccactgcacccagccagtgagaccccatctgtacaaaaaataataataaataaaataaaataaggttaaggaatcattatgaatcttcctgtaaacatcaaatgaggccatacaccctaagaatacagctcacaggtccctactgaatgtgacagtttagtccagatgggagttccctgagggcaggaacggagtttcagcaactggtccccatggcaggttggagtatgcactaacctaacatttactgaaatttcaaaatgtgctgggtaaggctgggcgcggtggctcacgcctgcaatcccagcactttgggaggcgggggttgcagtgagcagagatcgcgccactgcactccaccctgggaaacagagcaaaaactccggctccaaaaagaaaaagaagtgggagggctaggcccggcgtggtggctcacgcctgtaatcccagcactttgggaggccgaggcaggcgggtcacgaggtcaggagatcgggaccatcctggctaatacggtgaaacccccgtctttactaaaaatacaaaaaaaaattagccgggcgtggtggcaggcgcctgtagtcccagctactcaggaggctgaggcaggagaatggcgtgaatccgggaggcggagcttgcagtgagccgagatcgcgccactgcactgcagcctgggcgacagagcgagactccgtctcaaaaaaaaaaaaaaaaagaggtaggagagcttaatatcgggctgggaggatggggtggagtagggtgagcgaggcgtcaagttcgattcctaaaaagagtaaaaggggagcctcagtgaggttggggagcaggcctcggctccaagatgaaccagcaccctcccgacccccggcagcaccccagccccaggagtcctggcagccccaccgacagagctgagctgtgaccagcggtcggagccacatggtcacagccgccaccagcatcaacatcagcatcgacttgggcttccgccgccaccactgcccctcaaccgccacggggagtcgctgcacaatccgagtacgtgcaggctgaagccctgcgcatgcgcatcaatgagtcccgggagcgggcctccgcgcactgcagcccggcgctccgcctgaatcttgagcatgcgcagacgaatcccgggaagcccgaatccgcgcaccccaaagtgcgctcagagcctgagtatgcgcacccggccacccgtggccagtctagagtctgagcatgcgcatgttgtccgcgcgcctaagcatgtgcacaggctgctcatgagttcctaaacgttgcgtttgcaacactaccagtgttttgtacgggcgctggcgcctgctcacagccttccacgtgaccggaaaaggccttcagcgcataaagtgggagaccggaagaggcggagacgatccgatgctcgaactccgccccctcttctccgcgtaggcccagctccctgaagcggctgtttcgagccacgcgcccatcgggtaccgaggcacgcgccgggcgtcacgtgcgtttcgcggcgagcggaaatgacgcgagttgtgtgagccgccagtatggccgggctatggcggcgagcactggctacgtgcgactgtggggagcggcgcggtgctgggtgctgcggcggccgatgctggccgccgccggggggcgggttcccactgcagcaggagcgtggttgctccgaggccagcggacctgcgacgcctctcctccttgggcactgtggggccgaggcccggcaattgggggccaatggcgggggttttgggaagcgagcagccgcggcggaggcgcattctcggggggcgaggacgcctccgagggcggcgcggaggaaggagccggcggcgcggggggcagcgcgggcgccggggaaggcccggtcataacggcgctcacgcccatgacgatccccgatgtgtttccgcacctgccgctcatcgccatcacccgcaacccggtgttcccgcgctttatcaagattatcgaggtaatgggagtccccgcctcggcctcaggtttcccacctgtgcaagcagcgggctgaaccgtgggatcacttgagcgcccttgtgtttcgcaactttttcagacatgaagtttctcgaagggtgcagttcgaatccttgtctgctcaccactagcttgggaaccttgagccaaagtcctctccctttcggatttcttaggatccgttagatgagaggagttgaacccgatgagcctaggattatccactttagaacgccggtcatagaaatccggggccgggagggacctgagtagtgttacggcgctgttagttttctccttacttggcacgagttttgtaatacctcctcgccccaggcgctctgccgtctggttacgagcctcactgggatcagaattcattcctttcttagacaaatacttcttgattgcttattatttgccagagagtgttctaggttctggggatatggcagtgaacaaaacagacaaaaatttctgcctttgaagctgggcatggtggcgcgcgctgtactcccagctactctggcggctgaggtggaaggattgttggaaacctggagtccagcctggtcaacatggcgagaccctgtctcttaaa

SEQ ID NO: 8318 - DNA, 6000 bp, Homo sapiens
ttcaccatgggggacagagggtcactctccacccaccaagcaggatggcacaatggcaagtattcctagcaggaagaaacaaaagatgaaaaagatgcagagaggcaggcagtcattcacaggaacacttaaaggcattttgtagatggtcatctccatgactttgacctctgggctccggaggtcagtcacacaggcatgaaccctggtggagggaggggcagggtctgcagaaggactgagaaggatcagcagatgcgaaggaatggggaccaacagaatcaatcccatcaacaggaatgtgctgggaacactcaacccacagtgaacttggcctttgttgtgggaaaagaaccctgcaatgcccccactgacctctatgatacccttgctagccctcaaagtatcctgttggctgctttttttttttttttttttgagatggagtctcactctgtcacccaggctggagtgcagcggtgtgatctcagctcacaacaacctccacctcctaggttgggatcctcccacctcagcttcttgagtagctgggattacaagcatgcaccaccatgcccagctaatttttgtatttttaatagaggcagggtttcaccatgttggctaggctggtctcaaactcctgacctcaagtaaatcacccaccttggtctcccaaagtactgggattacaggcatgagccaccgtgcccaacccctgttgtcttcttctgtctccctaaacccatccctgttctccaggaagcactacctcttggtttgccagtgcttccagttaggtctggtcctagcaagttattctgaactcccctttcagtctaaaaaatgctcagtttgaattttaaatccagtcactcattgctttaatccagtcactcaatggggataagttctgagaaatccagtcactcaatggggataagttctgagaaatgcattgttaggtgatgtcatcattgtttgaacatcatagcttgtactcacacaaacctaaatggagagcctactgcacacctaggctatatgggatagccttttgctcctaggctacaaacctgcacagcaccttactgtattgaatactgtaggcaacttataacacaatggtaagtatttgtgtatctaaacatatctgaacatagaaaagatacagtaaaagtacagtataaaagataaaagtggtatacatctgatatgatttgctgtgtccccacccaaatctcatcttgaattgtacctcatctgcctgaatcagtgctgaaccactgaggcttaaaacagtgcctggcactgttacccaataaatgttcattgaatatatgagagtcccatggtatctggcaacgtggacacacaggagatgtgaacatgtgggcacacatacgtgcatgcaacagatgaatcagaaagtggaaacctcctcataaactttactgctcttaaaaatgctgatggatgaaggggtgggttacagattaatagcatctcaaggcagaagaatttttcttagtacagaacaaaatggagtctcctgtgtctacttctttctacacagacacagtaacaatctgatctctctttcttttccccatatttcccccttttcttttcaacaaaaccgccatcgtcatcatggctctttctcgatggtcgctgtctcttcggagctgttgggtacccctgcagactaacaacagacagaacaggcacacaaggattaatatgaaatttataattatagtacttccgatggtcttaacccaagtgacagggttaagatttacgaggccatcagcaactcctgcaattgcctcagttcctggcaccaaatttaaatgggcttttgatgttttggaaatttgttcttttaatttggaaatgtctaaagtgagattatcttctcttccctgtagatggcgtctaaccatgtcccagtgatgctcagactcattataaacttggggtgtaatacaaaaatctgacgtattccagtcacactgtaactggaaacgatgttctaagctcatgagcctgtctcccatccaaatgacagtttgtctaagatcattaatttggtttgccaatttttgatcaatactagattgtgaattccacaatcttgtagaacttttttgccaatcattaacaaagtttactgactgaacagaagagtgcaatgcaactcctgccacagcagccatagctgtgactgcaattaatcccataatcactgtaattaaagtaaaaatgaatcttttggatctatttaaaacgccttttaatacttcagtcaaaatatgaacggatggtgaggcctcccacagtcggtccatggacacaaggatccacacgccttcccttgctctcaccagcagaatacggtgttgccaattaaaagttgaatcaatgcaagtaaacaatctgcagttttcacaggttatagtttgagagtctggtttaataactatatttcctataactagcatataaagggactttacacagctttgtaaaggaactgttagactggaatttaggtcgatagtataaaatggcttatgatctcgtttctaaagtttgatttccagaccaaattctaatgtagtatgaggctacactaagcctccaccattctggatgttcaggaccagaaacaggacttattatttttggtcatggggtagagattcctttttctccccatttccaagggtagaaagactgtaattttttatgcttatgttcgtctaaactttctatgaagtcgctatcaacagttggactcacttgtgcactgggacacgactgagtttgtcctgtgcaattgtggtagaattgacctcgaggtgcccaatctataatagttcggaattcactgttttgtaatatcactgcactattggccacacattcttcccaaactaaagcttctacattttttgatcctttggaaatttcctcggggcaaggtttccctttaggtctaaattttaatgatctttgataagaaaagtcttgtaaataatttacctgtggcctgagcgacatcccgcttaccatgtgataagtgaatcttctgatgggactgacagtaggtacttctaccaaccaattttggactgcaggcattaaacatcctggtgctctccccaggcaaataggaggataatgatacccaatgaaaatatttatcatcatcccttcttcctcaggtttggcagggcaacgatcatctgttggaccaggtacccatacactatcattaacatatacttccataggattatccatccatgtgactgcctgaattaagggcgggaaaggcacataggcccagtaattataattagctgcagctgctcctgcaggcatagggagacttaccaccattgatacaatcatcaaagctgcaagcagcatactctctggagtttgtgtcacctttgtgttctctagatattttgtagctaactgtgtcagcttctttaattgtgcccaagtcagcagctctgccttcttggtggatggcaacttcatctgttcttctgacatcaccattctgttcatcttctgagtcgatggttctcgatgacggtgctcgattgcggtgtctccgtctccgtggaggtgcttttctttgcatctctgatgggttcattgtagaacttcaaatgtctagtgggtatccaaacaggacgctgattttctcctggtgaaacgcaagcaaaacctctcccccacgttaccaccttccatatttcccatgtcttatttttattatctttccaccaaatcagttttccttcatgtgggctgttctttttaccagtaagatgttctgcagaagtagtagtctgatttctataaatgtttaaaaaatttaaagtatagagtgctagactaagttgcatctgaggagtggtacactccttactgtctcccccttctttttgtttaactaattgagttttgagtgttctattagttctttcaactatggcctgtccttgggaattatagggaattcctgttgtatgtgtaattttcttggaaagctttactacagtatcctggtccattgttagttttgattttttctggaactcccattacagcaaaacaagataataaatgttttttaacataagaagtactttctcctgtctggcaagttgcccatatgaaatgtgaataagtatcaactgttacatgaacatatgataatcttccgaatgaaggtacatgtgtgacatccatttgccataacacattaggacacagacctctgggattaactcctgcctcttgagtgggcaggtgtaggacttgacactgggtgcaatgtggtacagtatcttttgcctgtttccatgtgacatcaaatttgttttttaatcctgctgcatttacatgagttaaagcatgaagttcttgtgcttttatgaatgcagatgataccagtaagtcagcttgttaatttgctttagtcaaaggccctagtaaattagtgtgtgctcgaatatgagtaacataaaatgggaaatttctttttcttacagtttgttgtaataaattgaatagctggtttaactgatcatccatgctatatttgattagagctgtctcaacatcccttgtagcctgtactacatatgcagaatctgatacaatattgataggttgatcaaaatcttgtaacactgtaatgactgcaaccaactctgctctttgagtcaattgatattgagttttgattactcgctcatcagaccccagaaaaggtgttggttgatatagacagcaggacggtggccatggaagtcagaatccactaaggagtgtgtaacaactcacctgccgaatcaactagccctgaaaatggatggcactggagcatcaggcccatacccggccatcgccagcagtcaatggaatgtgagtgccttagaggtcttggggccgaaacgatctcaacctattctcaaactttaaatgggcaagaagcccagctagctcagtcggtagagcataagactcttaatctcagggttgtggattcgtgccccatgctgggtgccagatgaagaggtgagttgcccctaaaaaggataccctattccttctctttcttaatttcttttagtctcaattgggactttaatgccattttcattttttcctagtccctttcctggtatatatcccatctcagtcatgattttttgatttgcggggctgtataatggagcaggcatagtgatttccgcaccccgttgttgtaataaatctcgaccccacagattaagaggaatcgaagtagtcattggctgaacagtactttcttgattatctgaccctaaacaatgtaaaatcttagtactttgatacacttctgaggctgtgcctacgccgataagtcctataacagcctttgtttaggccaattttttggccactgattgaaagcaatgatagagacatctgctccagtgtctactaacccttcaaactgttttccttgaataatggccttacacacaggtctgttttctgagacctgacttgcccaatatgcagcctttcctgtcggatcagtgcttccaaactctcctattctttttattttactatttccaatcttaatataaggcaggagtaataactgagcaatcctgtctcctggacaggaggggggacttcctccaacacaggcagtcactgatgtcctagttcaaatgctccagggggaacagtccattactcactgagggaggcaggctttcctattttctgtttcaagcttttgatcacaatggagcaaatgatcacaatgcagcccaccaggatgctggtgatgctgaatccaaaaagtagtctggaattgatctgtgcttttctctgattcccaaggaagttggcttcctgggtctgtgggggtaaaggcaagctggtgtgaatgtttccaagatggggaggggg

SEQ ID NO: 8319 - DNA, 6000 bp, Homo sapiens
cttccaaactcatccggaatggaacctcctctgacaccaccatggccaccgccctgccctgagccaccgtggtctcttgcccggggagacccaggtagcctcctgaccggccttcctcctcccacttcttcccccactgcctcttctccatagtgggccctgtaagccccatcccatcatccctctgctcaaagcccagggctcctgcttcacagagagcaaaaggcaatgcccttaacatagcttgcaatgccttgctcacactgaaccccaccccagatctcagctcatttccaagctgcaatccccgaccctggctctctccatcctccttcctggctggactgtctggtcttagcacttaacaatacacacattcagcttgttcatcttgttgcgggactcccacaccagaagatggattttgtctgtcttgacccccccatggtgtctctggcatgtaagccagtgcctgacaccgttcagtatgtagtggttgaataaatggatgagtgtgcccaggactgacaggtccccgaaattatagttggggcttcccttggggtcctggagcacaccgagggcatctgaccccagggcaggttgcctcagtttcctcacctgtaaatggaactgtagtggggaacagctaagcccctgcacagttgtatggctcctcagggccccggtgaggaggggctggggttctgcagaggtccacccctctgggaagcccagccacctgcagccctggagaccagggagggtcctggctgaggctgggtgagcagggattggttcctgaggagttgaggttcatgatgtcaactcctgagtcactgaacacacatctggcccacaaacccctgcaggagccggactctcaagtcaaagagagagcagaggaagggcctggtcagcagacccaggggggactcccactttggaggatctgggtgtgttccttgggttgtggatccggcaagggagctggccgaggttcctgggtcagtatgagaggccctgtgagtccagccgccgatggggaggcagacttccctggccgtctgtctgtttgtccacccatagtggagcaggagctcagtgaagcctagttggacaagctcccagcttggtccccaaccctcccccgtcagggctctgactctggccccaatttgcccagcatcagaacagtataaagggcactgggaccgggcatgatggctcccgcctgtaaccctaacactctgggaggctgaggtgggaggatcacttgagcctaggaatttgagatcagcctgggcaacatggcaaaacccagtctctacaaaaaatacaaaaattagccaggtgtggtggcgggcacctgtggttccaggtgtttggaaggctgaggtgggaggattgcttgagcctgggaggtcgaggctgcagtgagctatgatcatgccactgcactatagtttgtgctatggagcaagagtttgttttaataaaataaaatataaaataaaatataaaataaaataaaataaaataaataaaataaaataaaataaataaaataaaataaaataaaataaaataaaataggcactggactgggaacagagcccaaatctggttccaaatcctgagcctaccccttggagcagtatcatttcacttccaaccttagtttccactctgtaaaatgggtataaaaattcctaccttgcaaggtgggcatgagattcaaatgagataaaggaagaacatgttttcataaggcagtaagaggtgtttttctgaacagatattggatgtgatgatgtcctgcagagcccctgccccagccagttctatttcctccagcctggccgattcccttccatctgtgcttgcagtggccggcgggcactgccctaaacacactatacatgagtctcacgccagcccatagcccacccttccaggtcttcccattctcaaaagcctcaattcccagtctgagctggagcagagggtatacacgagggagagagtgacaggatctcctaggagggtcgctgtggaagttttggaaataacatgttcaataacaataacaaaccaaggtagattatgaagcaggacgttggctgggcagggtggctcacacctgtaatcccagcactttgggaggccaaggcaggcagatcacttgaggttaggagttcgagaccagcctggccaacatggtgaaactctgtctctactgaaaatacaaaaattagctggacatggtggtgtgtgcctgtaatcctagctacttgggaggctgacgcaggagaattacttgaaccccggaggtggaggttgcaatgagctgagattgtgccactgcactccagcctaggggacacagccagactctgtctcagaaaaaaaaaaaaaaaaaaagaaagaaaaagaaaggaaaggaaaggaagcaggacgtcaagttcttgacttttagagctaaaatatgacactttgcagacatttttgattctgaccaggctccccagggtattggtggagagagagtgagcccacctggggcagaaaggtggggtgggctggggaggggagacccttagtacatcaggtggggaaggcagtgcagaccccagctcagtcctcacctgcccagtccccacctcctatcaccttctggttgaggttgatctccttgttttttcctgcctcgtccagcctcctgcctgctgtaatcctcaaaggctccccgggccaggccaagatcaaggctccccaagaccaccactgagtgccccgggcttgggttctgtagctgaatccagcatccttggttagctaagtggcccttcaccctggctcagtgttcaaggtttggaggccaaggtagtggacctggcacagcaggaaggaactgaagggtaggggagctgtcagggcagacctgggctgcatgggaaacttacagagtctgtcctggaaaaggagggtgatagtggagttggccttctccactcccaccaccaccacctctaccatcaccaccaccaccaccaccaccaccaccaccaccaccaccaccaccagggcccctttctggggagaaaggagccaggcagcctccctgtggcctggggaggatgggatgtggggaggggatagagtaggaagacaggtcaaggatgctgggcttagctgaggagcccaggcagagctgtgtctttctgcacctgcctggcactgtagctggttctaggcatggtctcaatcctatgacccactcatggtgtgagcttccccttccctggaggacagttcctggagagggtgtgggccaagaaaaagctctaaccagcaccctggccaaatccctggaaccagcccttccttccagcagaccgtccatcaggcaggggcatcctaggccaagaagctcccagggccaggtcaggaccaggctctgggagacagcattctaaggggagggggtgagatggcggagtgacctggccaggggctgtgttcaggggcaactctggatgtgaagagctgctaatgtgggggtgggagaggacgaggtgaagaccctgggtctgccctactgagcccccaaactttctccatctccaggggtctgagggtgggaaggcagtgaagacacaagtggctctcactggcaggggaccgggaagactggctggcggtaaggtgagaacagtcgaggccccagtcactcaccccccaaaccacttctcctgtccctccctggaggggctcagaggcactctgtgtagacaaagaaacaagtcagtatccatgacttgggacagagagtggaaaaataccactgccattcccatgacctctgagctctctgcctgcccagaaacccctatgtgggggcaggacatggacccattctcaggtggggactttggagtccagggcctccagaccaggcgagtgtccagtgcccaccaggatcccagctcagggagcagctggccttctgcaggctgggtctgcccactgctgcccccaattgctggctaacccgccccctctcctgggtcctgctgccaaaccctgcagtcattgcctgctctgaacctccgtcccttctgcgcaggctgcgcttgctcactctgctcataggccctcctgctttccaagaataaagtcactgcactgcgtggcacctggaccctgcacacagtaggtactcagactgacccacagtacagaacttggggagctcagcctgccgcagcctgaccagcccctacactggtcaagttcctgcgctaatcgcaggactgcagtcatggccatttcacagatgaggaaactgagggtaactgccttgcaaaagccccgcagcaaaatcgagtcaggaggaagagtccagcggtggaggggacccaaaactcccccaggtgcaggcggccgggaggtgggaacacggagctttggcaccctgggccagcagcccctgacctccccgcggtcatagcgctctctgaggccagactgcaggttccccaggcagacccgtccgagcgcccggagaggggacgcccctcgttcggagcggctgcgcccctcattcggcctccgcccggcgcccgcccgcctgggtcccgctcaccgatgatgatggtgcaggcgctcagcagcccgatctccttcttgagcgccacccgctccgaggcgccggggacggtccctgggactggggagggcgagggcgcaggcctggggttcccgcgcccgctcggctgctgcgtgtggccggccatgtcgctgtcccgccgcgtccccgctccctgcgctgccccgtctgtccggccggccgcccgtcggtccgtcggtccgtgagctcacggccctcgcagccgggacagcgcccacaggcgggcgcatgcgctggctccgggcccgggactgggggccccgggcggcgggggcccgggaggggcggaaggagggccggcccacagccccctcccccacctcccttaaagggaacgccccctcccccagtcccggcctgggaaggaaggagaggacttggggcagatctaggaaggacttcccagttgggcgaaggaagggaccctccagttgcctgagttacatccattcttggggccgggttggggagcagagctccgagacaagacaatccctgctctcagggaggccgagggggacggcaagaataacagctggccgcgtgtggggatgcagtgtgtgctccctttagtactctatgcctgcacgatgtgtgtgtgtgtgtgtgtgtgtgtgtgtgtgtgtgtgtgtgtgtaggagacagctcccagggtgagtccattctacaggtggaagttgaagcccagagatcagtagcgatcgccgagcaagtgcagggctgagaccaaaccctttctcgtgcctcctgaggctcccaggcggacaacctcaggaggggtgggggttgaggtctggaactcctctgaggggtctgggtgtcctatgcaccctggatcaaaggcctgagggtcgaggtgaagatcccgggggctctcatcctcatcacggggacccaagacctgtgacgagtcctggacacggctcgcccaccctaccaggctctgggccacctctggcctgagatcttcactacaggctcctcgtcccaggtcagagtgagggctcagcggactagaactcgggtctctggtgcaggtcccgcgcgatccagcccggctcaagaaggccaggcgacctggaatgcccgggagacacggagaaggaggctgtggtcgcgggagagggtcgggagtgcggggatccgagggaggctgcctcctcccggaagccgtccggactgtgcagccgaggccggcggaaaagatccaggggggccgcgtcggggccaccggggcggcgggcggggcgagcctggcactgtgcggccggcggcggaacagcctttgtttcttcctggcggccgcc

SEQ ID NO: 8320 - DNA, 6000 bp, Homo sapiens
tgttcagtcttttgtgatatcactggggagtgaatgagtgaaaaaagcaggaaatattttggtggtattatgcaaattttgtattatgatgagggtgccttggaagaggccacagtttgagaaggtgctgctttatggtacagcctttggtaatgttaatgcaagtccagtggttagcctcattaccaatatgctgctgaaccacccgttagcttttattgttttttgaaacaggatctcactctgttccccaggctggagtacagtggctcaatcacttcatggcttacttcagcctcgatctcccagacgcaagtgatcctcctgcctcagcttcccaagtagctggaactataggagtgtgccaccatgcccggctaatttatttttttgtagatatggggcctcactgtgttactcaggctggtcttgaactcctgacctcaggtgatccgtccgcctcggcctcccaaagtgctgggattataggcataagccactgcacctggcgttgagcctcttattagcggctttctgcttggtgtcttagcctctgatgccctgcctcgctcaaagctcaggagttggccaatttcacaagcgcactgagtgtgcaccgcccaccttgccctcctgcacttatttccctttgctttgacatcacagccccttgaatccgagctgccttggtaaccctgagctcccattttgctttccccacccaaggaagctgctgaaaggtcgaggtggccgttttctgccctccccatggggaaaaggtagaggccagaaagggctccctccagaaagggcatttccctcctttccaggagcttgatccccaaaatcctggccgctctggttggtcaccagtgcttccaacaactggtttattcttttctttggattttattcggtttacatagttcatggcaggtgtgttagtcggatataaacattgctgggagtggacagcagcactagtgttgttgttgtttttaagagacagggtctccctgtgtttcccaggcttgattcacactctcgggcttaagcgatcctcctgcctcagcctcctgagtagctggagttacaggcatacaattccacacccagctagcacctagttctttaacttgcttttttggttaacttgcttaatgatttagcttggagatctttcctcatctgttcataaagagcctcttcattctttctcacgtccgcatggtctttgatgggagagccatcactggtttaattagatggtttccagtgtgtcgctaccacggacaatctaattatacatgtaagtttgttgatgtgttcatgtatctggaggttaaactcctgtagtgccaaatcttttatgtggataaacacttgtcatttggagagctgtcacctgattgccctcggtggcgttgtgccggtcccctcctcacggcgtgtctgggaagagcaagctcgttttagctgcacagcctagaagccgtgggcagacctgggggaaggggcagggctctcccctcccatgctggccctggcgtcagatgccacgtcacacctgtggtctctcccaggacacatttgacatccggatcctgatggccaagtctgtcaagtacacggtgaacttcttagaagccaaagaaggagatttgcacaggtactggcacccacactccatcctcccaggcctggctcaggccgaaggtcagggccacccctggctcccgccggcatcctgccgtcccagggcagatggtgggcgggggccccaggcctctgcacctggcaccccctcttctctctcggcagcgcctgtctggcttccccagcagccactgccctttgccttccaggatagaaatcccattcaaattccacatgctgcattcagggctggtccacggcctggctttctggtttgacgttgctttcatcggctccatgtgagtgccgcagagcagcccatgctgcctcctccccactcccagggcttcctgcagctgcaacctggctgggggggtggaacatggctccaggttccaccatcccttccaatgggagtgagagcctgtctcggagcaagagactgttgtgggtggggtgtgtgtgtgtgtgtgtgtatgtgtgtgtgtgtcctgtgttcccagtgtctgtccctcatgggtctgtgtctgtctcttggcacatgtcagggtgagtagggatctcgtggttgcgggcccctcgtgtgtacatgtatgcctgctcatgtttgtgtctgggactgcctgggggccagcctgtctctgctccagggtcccaggggtccctggcagagggggcaggtgcttggggaggactcaaggcatacaaggtggtggctccagtggtggcgccggcccagtcaagtatgtgcctgtccctgctccacagaatgaccgtgtggctgtccacagccccgacagagcccctgacccactggtaccaggtgcggtgcctgttccagtcaccactgttcgccaaggcaggggacacgctctcagggacatgtctgcttattgccaacaaaaggtgcgactgctccctggggctggtggtggtgggcaggggtccatctgcccagcagctcatgccacggcctgcaccctgtccgcagacagagctacgacatcagtattgtggcccaggtggaccagaccggctccaagtccagtaacctcctggatctgaaaaaccccttctttaggtaggaggggccccttgcctgcacaggggggcgccccggccctgcaacccccttgcccctgcccatggctctgtctctgccatagatacacgggcacaacgccctcacccccacccggctcccactacacatctccctcggaaaacatgtggaacacgggcagcacctacaacctcagcagcgggatggccgtggcaggtgagcagggcccaccccaatgcccagccaacccgggaggccgccctcgccgcaggcctggcccctctgcctccagccctgacgtctccctctctggacacagggatgccgaccgcctatgacttgagcagtgttattgccagtggctccagcgtgggccacaacaacctgattcctttaggtgagtgtcccccagggccaggggcagcagggagccatgcccaggactgcccaggggccgggaagggcctgtggtgaccagggtcggcctctgcttggtcctttcaccttttcctcttcctgggggctctcggccgaggctctccgtcctctctgcctcgctctgcagcctgctgctgtgcatgggctgggtggctgggggcggtgacgccgtctcccttccttctttcctccctctcgctgcgcagccaacacggggattgtcaatcacacccactcccggatgggctccataatgagcacggggattgtccaaggtaacgagggtggcgggggcagggcccgtgggggccgagctagcgtgtgagtcgccatcctctgtccggccgcccgcctgccctcttgcctgccctttctctctctctgtgactctgcctgggggctgggcgggccagggcagcccctcactgccattgcctgctccacagggtcctccggcgcccagggcagtggtggtggcagcacgagtgcccactatgcagtcaacagccagttcaccatgggcggccccgccatctccatggcgtcgcccatgtccatcccgaccaacaccatgcactacgggagctaggggcccgccccgcggactgacagcaccaggaaaccaaatgatgtccctgcccgccgcccccgccgggcggctttcccccttgtactggagaagctcgaacacccggtcacagctctctttgctatgggaactgggacacttttttacacgatgttgccgccgtccccaccctaacccccacctcccggccctgagcgtgtgtcgctgccatattttacacaaaatcatgttgtgggagccctcgtcccccctcctgcccgctctaccctgacctgggcttgtcatctgctggaacaggcgccatggggcctgccagccctgcctgccaggtcccttagcacctgtccccctgcctgtctccagtgggaaggtagcctggccaggcggggcctccccttcgacgaccaggcctcggtcacaacggacgtgacatgctgctttttttaattttatttttttatgaaaagaaccagtgtcaatccgcagaccctctgtgaagccaggccggccgggccgagccagcagcccctctccctagactcagaggcgccgcggggaggggtggccccgccgaggcttcaggggccccctccccaccaaagggttcacctcacacttgaatgtacaacccaccccactgtcgggaaggcctccgtcctcggcccctgcctcttgctgctgtcctgtccccgagcccctgcaggtccccccccgcccccccactcaagagttagagcaggtggctgcaggccttgggcccggagggaaggccactgccggccacttggggcagacacagacacctcaaggatctgtcacggaaggcgtcctttttccttgtagctaacgttaggcctgagtagctcccctccatccttgtagacgctccagtccctactactgtgacggcatttccatccctcccctgcccgggaagggaccttgcagggacctctccctccaaaaaaagaaaaaaagaaaaagaaagaaaaaataaatgaggaaacgtgttgcagcacaggcagttttcttctccttctgctcccctgtttctcatacccccaaactcagatgctggagctcaggcccgccgtgtgtgcacccaggcaggagcgggcgctgtccaggctgggccgcccccttggctctccctcctgttccaggggagccataggagggaaagcaggtggcccgggggggatatgggggccccagccctgtcccaaagctccctgctcggctgcccctcgcccgcctttatataaattctctgaatcacctttgcatagaaaataaaagtgtttgctttgtaagaaaagtctggaaagtagcagaatcatctcaaggtgtcaaaggagccttcagtcatcgtctggggggcaggacaggcagaggggttggtccacttaggtgttgcctgaaagaaagaattgtctgggagtggccccagaacctctcgccttgactgggagtgggagggcagcccccttagcccagctgggaatagtccttacctgtgggacccgggccttcctaggagggggccagggactgcggcaaggtaggggacagcgcgatgtttgagggcagagatgtgatttggggtggaggagccacgttctccggaggcagcgactggaagaagtacaactgcacaagacccctggggtcagaggcagggccagcccatgcccccctagcccctcggccccacctgtggccaccccagacccgtaccttacagcccatggccaggagggcgtggagcagcacgaccacggacagcagcactgtggccaccagcctggtgtcctcacggaccacgggccagagggtgaataccagcccggcggctgacaggcccagggccagcgccccaaagagccactgcagccaaggcacagggatgagccacaggacctgggagcaacacggcggcaggtgaccatgccagtccccccagccaccacccactctgcaccaggccaccctcaccaccatgggaatgaggcggcaggtgaccatgccagtgtccccacacagccaccacccactccgcgccaggccacactcaccaccatggggatgaagacaaagagggagtagccgtagatgcacacagtctccaggaaggtgtagggccccatgcgctcctggacacccttgcgccaccgcaggaagccccacagggccaggggcaccagccacgcatagcagtagatgctgatgcctgccacggtcactggggggggca

SEQ ID NO: 8321 - DNA, 6000 bp, Homo sapiens
gatgagcgtacgaaggacttggctccaaacacagtgcttggagcagtgcctggaacacagtaagaagacctgagctgttgttagggtatgcaggcagcagttagttggggggcaaggtcaaggcctcacccagagaggacagggcagtggtggtgccacagaggggaggtgggggtccgggcccttaagggaggaggggttgaagggttaagcctgcaaaaatggaagaggagataaaagaggagagtcaggcagggtttagggccctgaagaggaaggagagtcactggcctggacattgtgggaaaaggcagagccagggccaaagagaagttagggcatttgccaaaggggcagagaatgaggggtgaagggtcctgagccatttcaagatgggggataaccagagtcctgccacacagtgatgtgggttttgatgaaggcctagaagaggagggagtggggtcagggtcttggagaaggaaagcaatgggccaggcccctagagatgtcatgggctttatcagatatgcagaggggtgggaggggagaggagtgcattggagagggaaggaagacaggtgttatagtaaagagagggttttaatcctgcgggtagtggaggagggagggcatggggagttttgctattaatcaggggcacagagcacggggaggccactgctggaccacagagaggaccttggactttggggtgggccaagggccagcactgtccctctgtgcaccccccttcctccacaggggttgggctctgggcttgacttcactgaggtgcagagctgggaagtagtgggtggagagtttcggggccacagagaggaccctggacgttggggtgggctgggggccggcgcaggtcctctctgaactccccccccacccccaccttcgcttctctgcagtggtttaagaggccagaggccttcgcagagcgcatgcctagttccccgccccctccgagccgggcgcgcggcgctagctgcggcaccgcagtgggggcgggccagccgggccggggggcggggcgcacggcggccagtaccgcggacagctcccccgccgcagtgcgcagccgcagcggctaggggccgtcttaaccccttccgggccggagcctattcaacgcgcagccgcagtgttgctgctttccggcgggaggccaagggccaagagtctaattaactccttccctcccagggcacagggaaaggtgggcacccgccgcagtgcgcagctgcagaggctggacggcgtcgggctggtttaaccccttactccagagtgtgtcaaaagcagaaggggtaggagggcatggagtctctgtaagaaggaaaggagtgattacgaggaagggggcgggggcagggggctgtagggtcggaccctccactttgctttggcctcagctcccaactctctcaagccatatcactgggaggctggaaagggctcggcacaccttggacacccaaaacacattggcggagtaaatgagtatctcccgtagctgtcccgaacacctagcctgaccatcacagaagaactctaacttcatcccgctcctcatctcagcacccttcaatggggtcacaggagagaagggcgccccggccatgggggaaggagccgctcagtgtcttgagggggcatccagggccatgtcccttccgcacctcctcttccccacctccccccatccaaccccaaatctcgccaactcagcgctttctggggaccaaactttatgcggtggctccaggcgtccccccgctccctcccccggcgcgaatgcggcactgcggctccgcgtccttcccggctcaggacgcggcacggtggggggagggggccaagacctgctcctctgtgtttgggtacccaggagcccaggagggggtcttgggatcgctcttatttcccccatttccaattgcccccattttgcactgccccccttttccaccacattctccctccggggtccccgggacagggaggaagttagtaggaggaaatggttcaggagagaacccagggggagggtagtcatttagcctaggaagttatggatgcttgaggaaagttttctgggagcgatggagagagctttggggaaaatctagaatttggagagagagagaaggctctttggttcactttgatggagggggacagactgaggggctaggttctgggttttgcacggcggggggggaggttcgagaaaggaagagggcaggtggaaggaatcccagggcaaggtagaaagaattgtaagttattttgagatgaaagttttagggctgatgacttgaggggcctcccagggtttgaggttagaaaaagttctagagcaggagggaaagtcacttagactaggaaacgggctgtgggggctttggatggggggagtcccagggatagagagtgcactgtgcagttaaaatgatggagaggagaagctgcgaggatctatggaggaggaagaacaattctggaggacatgtgagggttctggagaggaaaggcatatgatgggggcatgggatgcttctggaggcactgaggaggagtgtgaaaggcttgggggaagtctggagctttatggggaaagtccttgagatgggagttggcgtggaggttgaagagtgttaaacacagagtgaacacagagggggcctggaggttccaacggagaagatgccccaagactcagtattgcagtgagggggaggtgaaaatgtccaggcaagaacaagtggaggtttagaggggtccagaaggctgtgaggttggggtgggggagttttctgagactctgagagcagaagatactgcaggaagggagtggaaaaaataatcagaagattcaaacttggagagagaggtcttctgggagacgggccacggggtgaatcggggaggtgctgggagagactgagagttgaatagggggccccagagagtctggagaaggcagggaaagtgggggtcagggctcacagggcctaggagaatttgagggctgagaagggatgtcttctgaggggctggggaaggtccaagaaaccaagggctggacggtgaccaagagtagtgagaagagatttgatggggcccaggagacatgagggttggggagggtctcagaggagcccaggaaaggtggggaccgggttgttcagagaagcacgggagattcacggtctggaggaagtgtctaagcgtctagggtggccttggcgggggagggggaactttggaggggtctggaagagcccgaaggttggagatccgtctttggaggatctgggggatggctgcgagaggggggtgtgttcggaggagcccaggagactcaggattggggaagaggcttctaggagactgagaagcctagagggacccggagggttggagctggggcgctcctgggagactgggggcgcctggagaggcgggggtggggtggatgggggccccgagagcgcgctcaccctggcagcccgcgacgagtaggggtcctcgaagagcgcccacacgcggggctgccagcggcgccaccatgtgccgcccgcgccgcccgcgccccctggcggccccccggcgccgccgcccgcgtcctggaagcagaggcgcttgagctcgccgcccgctccgtccaggccgccgccgcccgcgcccgcctcgtcgtccaggcctccgtcgtgggcgcctgcggcgttggcggcgttggcggcgcccgcggggtcgggcgcctcgaaggagtcgagcgcctcctcagcgtcgcgatgctgccggtaggtcatccagcagcaggcctccacgtcggtctcgtcgatgccccagaagccgagctcctcctcaaacaggggcccgcacacgtcggctgggcagtgcagcttgccggtgcggtagtagttgagcacgtacgcgaagactcccgggtgccggtcaaagaagaactcgtcggcgcccgggtcgtagtcgaagcgtgccgccgcctcgggctccgtcaggccggccagccgcgtccccggcagggtgcgcagcgtcgagcggtacgtctcatggcgcacgccgcccacgttgatcacgatcttgccgctgtcgccaccgccgccgccgtgccgccccatggccgccgccggcagcccggggcatggctcggcgcgccggtccccgggcccgcggggtgccggggggcccgccggggacgcggcggggccgggctgcgcaggctgctgctgctgcggcggcagcggtggcggcggcggggactcgggcggctgcggcggtggcgccggctgctgcttgctggccccctggcgcccgcggaaggacgagacgcagactgagctcagcattggacggggggcggggcgggaggggcggggacgcaggggcggggacacggggggagagaccgacgggattgggtgggaggaggagcgaggtagcgggggcgtggcttaggggagaggaaccaaactgattggcctgggggaggtggggcggggctgtggctgggaggagtggggcgggcactctaacgcgacccagctggacgagtcggggccgccaatgagacggagcgattggctctttctaagagagcagggaggaggggcggggcggggcgtcaagggaggcgggaccggttactactaattgtgttcggcagcactggtagccaggggaaggcggggctagatacgatagagagagaccttactgaactgaaaaaagtgcgggcggggtagagggaggaggggacacatccaagctatttaaagacgcccgactggcctggaggggcggggccaccatgagagaggccgtcctgattgggctgagaaaggggcggagagaaacaaaacagatcgcacgccctcacctaaaacaccgctaggcaggacctggtggggaggagcattgcttggaagagacagggccgcagaaagtagaaacggtccagatgagactgcatggggcgggaactagagatggaggactttcccgcgcaagggggacaggctggactgaaagaggacacgggaagaacaaagacttagactcggtgagaaggtgttgaaacttgagagagtcctggaaacccgagagggtctggataggcctaagggagggagcggggctgaggctccaaggcgggcctggttagtcggggctgggcccggagaatgagtgtccggatggatgagtggtactgaggaaggtgagtggggtcgacaaatagaaaacgtcttgaggcagggcgcagtggctcacgcctgtaacgccagcactttgcgaggctgaggtgggtggatcatttgaggtcaggagttcgagaccagcccggccaaaatggtgaagccccgcctctactaaaaatacaaaaattagtcgggcgtggttgtgggtgcctgtagtcccagctagtcgggaggttgaggcaggagaatcgcttgaacctgggaagtagaggttgcaatgagtcgagatcgcaccactccactccagcctgggcgacagagcgagactctgtgtcaaaaaataaataaataaaagaaaaagaaaacgtcttgaatgggcggtaggaaagagagactaaggaaggagcggggcttgagggtcttgaaagcaaccagggtaggcgagggcagggcagggctaagggagggtagaggaacgggagaggtggatcccaggggaacaatgagactacaaagagtacaaagctactgggctggatggaggggagggacctggaacggggagtcttcgggatcagaagacctgggagagggcactgcctaaaggtcacagggtctcaaagggcgaggcgagaacttctaacgaacgctacaccgcggcggactgcagattggaggaccgagggtagatgaggactggtgaggagggggcacgcaaggaggcagagaggacgggagaggggagaggccaaagcgccag

SEQ ID NO: 8322 - DNA, 6000 bp, Homo sapiens
tgtgtggatcctcggcgacgttttcttgggggcgtatgtgaccgtcttcgaccgcggggacatgaagagcggcgcacgagtgggactggcgcgcgctcgccctcgcggagcggacctgggaaggcgcgagaccgcgcaggcgcagtaccgcgggtgccgcccaggtgatgcgcatgcgcaccgggtagcagagctagcgctactcagtaaaaatccaatatttccattgaacgaacctgcctaggttgcttcttttcagagcgtactttttgaagagaaagctttgtgcatggacccacggagttgaggaagagagggaggcgaagggtatcaccccttttctccacggcgcacccttgtgatgggccttgtactacgagtcccatgaaggccctcgcctacgctgcctttcgtcaaaggctcctggctccgtggagcatcacggtcgttgtagtccacgccgtggtcacgccctgacgggggcgggcgcagccacaacatgcgtgggaggcgacaggtcgcgacggcagccacaggtggcagtcgggggtggctgtaattggtaagggtttaccagttcctgttctaaggggcggggataccgttccctcggacctcgtctcctgtttctcctctctgccttggcattccaggaccccggggtccgccataaaggcggagcttgaagcccctgggttgggggagcggtgctgcccctcctccggcggtgatgtcactcccccctctgcagcctcttgctgcccagagctgccggggctgggtcacccctccccccatctcgagccccggattcccccatccccacctcgcctcgacttggggtgagtacgggggagggggcgaaggctcagggtccgggggcggtaagacagcccgaatcctagttttggagacgggggacttgggatccagggacccaaagattatagcggggagattcccctcgactctgagctttcggggccaaggtacttggagggttttaggggacgaaggatcgtaggcagagagtcctcacattttcacctttggtgtccagagaccaaggctccgaatggaaccgggtgggaatgggggcagaggaacaaggaaggggtcgtagaagtcagggagggaagacccttccccaattccagggcctggggtaatgggggagggagggttatcaggggacgccgaagatgacgtagatgggagttggagctttcaggaattttgtgtcttgagggcctgggaacggatggattgggaggagcaggggtggggaaaggaactgaaaacgagacagacgttggcctctcccctcctggtgtccctagtcaagagtcgagtctacttcctcctggtctgtgaacatagctgagtgtccagtatttggagccctcatgaagcttccagaagccccctcctctctaatgggtgggtggagactccaggctcacaaatcctcccatagaccctggtggggtctgtggagggccatgagggagtgctggcatccaagtttcccagggcctgatggaatgtggacggaccagcctgctactcccggcccgctgcctcttcccctcccatggcctctaatcctgagtcgcatcgcacattcctccttattccagccccttttccccacagcccccaccttctcccacacttctgacctctgcaaaaaaacgctgatttagccacttgataccgtgcctggctgctgtgaaaagcagaagggaaaagcagggttgaggggggagtgtggaggaggatggcgaccgaggtccttacctagcccatagtgcctacccagcccttgctcctgcctccaccaccccacccccaattgcccaggagcctcatccagccccagcccagtccctcacctcaggattctctgcttctgcctgggggtgcaccagaattcggggaaggggtaggaagtacctatgtcttttctgtgccctcttggattccatcagaagctgaaggacatgatggattgggtgcaatggagagccctgggtctggggagtgagggcaacgaccttcctgggctgcaggacaggccccacttctgcaactctctctgcagtgacgcagtcccagctaggacgggggttagagagggtgatggggggtctgagaaaaaggaacggagacccagagagagggggacagggtccccaggaagtggagacagagacctagaaagagagagacccagaagaaggtgaaacataggaggaatagagactcagggaggggacatagagaaagtgaagaggcagaaacttagagggagagagagaagaacagagagccagcaagagaaagagcagagacagaggagggaaagagacggaagagggggaaatacaccagagatggggagaaggggaagaaggagggggaaatacaccagagatggggagaaggggaagaaggagggggaaatacaccagagatggggagaaggggaagaaggagggggaaatacaccagagatggggagaaggggaagaagaagggggaggggaaagaggttgtcagagagcaaggaggagacagactcagatgaaagggcagagacccagagaggaggcaggacaaagcgggttgcggggagggagtagaggacagggacacaagacccagggagtgcggtacagagccccagacagagaggcacacccctgataaaatggtacagaaaccaagagaaagagactcgggggagctggggtgggggggcggggactgagacaccagggaggagagactgaggcctagagagaagaggagcaaagactcagaaggagggggacagaatcagagacccaggagggcagatttacaaacgaggggtcggagactcagaggggtgggaacagagacggcggcacaaatactcaagaagggagaaaaagagacgccaagaaacccagaaacgggagcgggggtgggatggggttgggaggcgatacgaatcagccgccgcacctgcagcaggaagcggcgggccagaaactgtgctgcccgagggcgcccgcagccccctgacccgcccccttcgctcccgcaggcgccgcctcctccctccgcagccccagccgcagccgctggccccgccccagccccctgagcctgcgctctgcctctcggagcctacgaccgcccagggggcggggacggcccgctccgaggcggtcccctttttctggccccgcccctcactccattcttccccagaacccgacctctgagactcctagcccaccccattttttatcggtcctgcctatattgcctcagtcttgacggtgcttcctggcgctttggcctctcccctctcccgtcctctctgcctccttgcgtgccccctcctcaccagtcctcatctaccctcggtcctccaatctgcagtccgccgcggtgtagcgttcgttagaagttctcgcctcgccctttgagaccctgtgacctttaggcagtgccctctcccaggtcttctgatcccgaagactccccgttccaggtccctcccctccatccagcccagtagctttgtactctttgtagtctcattgttcccctgggatccacctctcccgttcctctaccctcccttagccctgccctgccctcgcctaccctggttgctttcaagaccctcaagccccgctccttccttagtctctctttcctaccgcccattcaagacgttttctttttcttttatttatttattttttgacacagagtctcgctctgtcgcccaggctggagtggagtggtgcgatctcgactcattgcaacctctacttcccaggttcaagcgattctcctgcctcaacctcccgactagctgggactacaggcacccacaaccacgcccgactaatttttgtatttttagtagaggcggggcttcaccattttggccgggctggtctcgaactcctgacctcaaatgatccacccacctcagcctcgcaaagtgctggcgttacaggcgtgagccactgcgccctgcctcaagacgttttctatttgtcgaccccactcaccttcctcagtaccactcatccatccggacactcattctccgggcccagccccgactaaccaggcccgccttggagcctcagccccgctccctcccttaggcctatccagaccctctcgggtttccaggactctctcaagtttcaacaccttctcaccgagtctaagtctttgttcttcccgtgtcctctttcagtccagcctgtcccccttgcgcgggaaagtcctccatctctagttcccgccccatgcagtctcatctggaccgtttctactttctgcggccctgtctcttccaagcaatgctcctccccaccaggtcctgcctagcggtgttttaggtgagggcgtgcgatctgttttgtttctctccgcccctttctcagcccaatcaggacggcctctctcatggtggccccgcccctccaggccagtcgggcgtctttaaatagcttggatgtgtcccctcctccctctaccccgcccgcacttttttcagttcagtaaggtctctctctatcgtatctagccccgccttcccctggctaccagtgctgccgaacacaattagtagtaaccggtcccgcctcccttgacgccccgccccgcccctcctccctgctctcttagaaagagccaatcgctccgtctcattggcggccccgactcgtccagctgggtcgcgttagagtgcccgccccactcctcccagccacagccccgccccacctcccccaggccaatcagtttggttcctctcccctaagccacgcccccgctacctcgctcctcctcccacccaatcccgtcggtctctccccccgtgtccccgcccctgcgtccccgcccctcccgccccgccccccgtccaatgctgagctcagtctgcgtctcgtccttccgcgggcgccagggggccagcaagcagcagccggcgccaccgccgcagccgcccgagtccccgccgccgccaccgctgccgccgcagcagcagcagcctgcgcagcccggccccgccgcgtccccggcgggccccccggcaccccgcgggcccggggaccggcgcgccgagccatgccccgggctgccggcggcggccatggggcggcacggcggcggcggtggcgacagcggcaagatcgtgatcaacgtgggcggcgtgcgccatgagacgtaccgctcgacgctgcgcaccctgccggggacgcggctggccggcctgacggagcccgaggcggcggcacgcttcgactacgacccgggcgccgacgagttcttctttgaccggcacccgggagtcttcgcgtacgtgctcaactactaccgcaccggcaagctgcactgcccagccgacgtgtgcgggcccctgtttgaggaggagctcggcttctggggcatcgacgagaccgacgtggaggcctgctgctggatgacctaccggcagcatcgcgacgctgaggaggcgctcgactccttcgaggcgcccgaccccgcgggcgccgccaacgccgccaacgccgcaggcgcccacgacggaggcctggacgacgaggcgggcgcgggcggcggcggcctggacggagcgggcggcgagctcaagcgcctctgcttccaggacgcgggcggcggcgccggggggccgccagggggcgcgggcggcgcgggcggcacatggtggcgccgctggcagccccgcgtgtgggcgctcttcgaggacccctactcgtcgcgggctgccagggtgagcgcgctctcggggcccccatccaccccacccccgcctctccaggcgcccccagtctcccaggagcgccccagctccaaccctccgggtccctctaggcttctcagtctcctagaagcctcttccccaatcctgagtctcctgggctcctccgaacacacccccctctcgcagccatc

SEQ ID NO: 8323 - DNA, 6000 bp, Homo sapiens; identical to SEQ ID NO: 811

SEQ ID NO: 8324 - DNA, 6000 bp, Homo sapiens
aagctgtcttgatggatatggaggaagaagattacagagaggacacagactagcaggaaggccaggcagagctgacgatggctccggagccacatggctgcaggggaggaaaggcgaattagcaaatgctctgaggctgaggaggggaggctgaggagggatgtggggtaagggaggcgcctggggtgcagcactccttagtcccagggaaagaggaagttaaaggtttagactcctggggctgaggtagggagagcctgagtcctaggtttcagggatgagagccttggaatttcggggcatggggactggaagacaagtggttttcaagatagccatggtttggctgggcactgtggctcacacctgtaatcccagcatattgggaggctgagatgggaggatcccttgagcccaggagttcaagatcagcctgggcaacagagcactcttacaaaaaaattttaaaattagcttggcatgggccaggcgcggtggctcacacctgtaaccccagcactttgggaggccaaggtgggtggatcacctgaggttgggagttcgagaccagcctgaccaacgtggagaaaccctgtctctacttaaaatacaaaattagccgggcatggtggcgcatgcctgtaatcccagccactcgggaggctgaggcaggagaatcgcctgaacccggggggcgggagttgcggtgagctgagatcatgccattacactccagcctgggcaacaagagtgaaactccgtctccaaaaaaaaataaataaaattagcttggcatggtggcacatgtctgtggtctcagctacaccggatgctaaggcgggaggatccccggagctcacaatgagccgcgatagcaccgctgactgcactccagcttgcgcgacagagagggaccctgtcttaaaaaaaaaaaaaaaaaaaaaaaaagaaagtggtccaggttcctacacctttcctgaaggaatctcgagtctcccctcctgtaagttccgctgatactggactcttccaccagcctgtttctcaggagtacctgtctgtgaggcgcaaaatccaccacagaggtggtgatgggaaacgatagttcaagtaaaacaagagaggctggagggtcaggagcggaaggagcatcttggttcctggaggagtaatggctggggaggtggcggagattcctagggccttaggaagacctggagaagaggttgggggtgcacctcctggttctgaaggagttgttcctgggtcccaggaacaactgagtggggcagtccccacttacccgagctgcttgcaggtggcagatccacagtccgcttttcgtggccggagcgcaccctccgcaaaggcaggccacatccggccgcccctggaacgccaggcgtccggctatccggcccggcagccctcccctccgcgcagcctgtccggactggcagcgagggcttggggaggagaggaaggagagggcgcggccgggagtctcgcagcgtccgccctcccgggccgggcggatggctggaaggtggagccccgcccgtcacttggcgccgagccccagcgccaggggctaaggcgatggcccctgggcccaccgctccccagatcggggatgcaggggaccgcgccctgcccctccgccccgtcattgacctgcgcgaaggcttcacccagggcaggctacctggcttctgagcagccgcagcatcattgcgtggaccaggagacggagcgcccagttgcaatgctggagccgggaggtccaatccgccgccctctctcttccggtgccagggcttagagtcggcccccgacacctgggtgcttcgagcctggccacgccccagcggctgggcagggcccccgcacctggtcccggcgagtggagcgatcgtccgccctctgccgcgtcctcctgggggatggagaacctgtttgccaggctgccgccggagcgcgcgagggcctccagcctgcaggtgctcccgcgcccaccagggtctccgatctcccacaccccccgcctcaccgtccacactcaaattccagaatcccagcccctagtcactccttttggggaattctagggtcccgtgccaaactgctactttccagacctgcactgcacgaaggcaaccattccaaggctggagaccggagtggaacagggtctgtttcccacgccgtcagcgggggccgtggctgccggcgccagagacaaaggcctctgcccgcttgtcacctaattaaagcattttctctggtccaaggcccacctccagcatcgccaaccccgagcagggcaggctaacgtagggtccagccctacggggctttgcgggtgggtgttcttcccctgtgaggagaggagagattgtaagaaataaagacacaagacaaagagataaagagaaaacagctgggcccgggggaccactaccatcaagacgcagagaccggtagtggccccgaatggctgggcgcgctgatatttattgtatacaagacaagggggggcaggataaggagggtgagtcgtccaaatgactgataaggtcaagcaagtcacgtgatcatgggacagggggcccttcccttttaggcagccgaagcagaaagagaaggcagcatatgtcagcgttttcttctctgcacttataagaaagatcaaagactttaagactttcactatttcgggcgggcgcggtggctcacgcctgtaatcccagcactttgggaggctgaggcgggcggatcacaaggtcaggaggtggaggccatcctggctaacacggtgaaaccctgtctctactaaaaatacaaaaaattatccgggcgcgtggtggagggcgcctgtagtcctagctatttgggagggtgaggcaggagaatggtgtgaacccaggaggcggagattgcagtgagccgagatcacgccactgcactccagcctgggggacagagcgagactccgcctcaaaaaaaaaaaaaaaaaggctttcactatttcttctaccgctatctactacgaacttcaaagaggaaccaggagtacgggaggaaaatgcaagaggacaaggagcgtgaccattgaagcacagcacagcaggatgactgcgggcaggcctagataatacccagcctcccacaagaagctggtggagcagagtgttccctgactcctccaagaaaaggagattccctttcgtggtctgctgagtaacgggtgccttcccagacactggcgttcccgcttgaccaaggagccctcaagaggcccttatgccggtgtgacagaaggctcacctcttgccttctaggtcacttctcacaatgtcccttcagtacctgaccctatacccaccggttgtttcctggttatattagttatacaacaaagaataaaagtaatagctaatgattaataatgtttacactaatgattgatactgtccatgatcatctctatatctaatttgtatgataactattcttattctaactattttctttattatactgaaacagtttgtgccttcagtctcttgcctcggcacctgggtaatccttccccacagactgaccctcccattcaagatacatcaatgtcaaagactcaggagtttgacttgattcccagaagtttaaccatcatctccccaggctcgggactcccagcacccagacccttctgctcacacccagcagtccaggcccccagaccctcctccctcagacttaggagtccaggctcccggcccctccttcctcagacccaggagtccaagccccctgcccctccttcctcagacccaggagtccaggaccccagcccctccttcctcacacccacgagtccagatccctagcccctactccctcagacccaggagtccagaccaaagctccctcctccctcagacccaggagcccaagttccccagcccctcctccctcagatccaggagtacaggcccagaccctcctccctcagacccaggagtccaggccccccacccctcctccctcagacccaggagtccagagccccagccctcctccctcagacacagaaggcctacccttgcacccttaggggctccaggaaattagccaacctgtcttccctctgggtgcccactccagggcctggcttggctgccaactccagtcagggactttcagccacccctccccccaggttatttcaggagcacctgcctgggcctgggatggcttctctggtgaaagaaacaccaggattgcatcagggaggaggaggctgggatgtccagggtctgagcatctgagcagggacagatgaggttgaggttggcccacggccaggtgagaggcttccaaggcaggatacttgtgtctcagatgcggtcgcttctttcatacagcaattgccgccttgctgaggatcaaggaacctcagtgtcagatcacgccctccccccaaacttagaaattcagatggggcgcagaaatttctcttgttctgcgtgatctgcatagatggtccaagaggtggtttttccaggagcccagcacccctcctccctccgactcaggtgcttgagaccccagatccttctctctgagactcaggaatgtgggcccccagcccctttcacctgggtcccagctaacccgatcctcccctccctcatcccctagacccaggagtctggccctccattgaaaggaccccaggttacatcatccattcaggctgcccttgccacgatggaattctgtagctcctgccaaatgggtcaaatatcatggttcaggcgcagggagggtgattgggcgggcctgtctgggtataaattctggagcttctgcatctatcccaaaaaacaagggtgttctgtcagctgaggatccagccgaaagaggagccaggcactcaggccacctgagtctactcacctggacaactggaatctggcaccaattctaaaccactcagcttctccgagctcacaccccggagatcacctgaggacccgagccattgatggactcggacgagaccgggttcgagcactcaggactgtgggtttctgtgctggctggtcttctgctgggagcctgccaggcacaccccatccctgactccagtcctctcctgcaattcgggggccaagtccggcagcggtacctctacacagatgatgcccagcagacagaagcccacctggagatcagggaggatgggacggtggggggcgctgctgaccagagccccgaaagtgagtgtgggccagagcctgggtctgagggaggaggggctgtgggtctggattcctgggtctgagggaggaggggctgggggccttggcccctgggtctgagggaggaggggctggggatctggactcctgggtctgagggaggaggggctggggatctgggcccctgggtctgagggaggaggggctgggtctggacccctgggtctgagggaggaggggctgggggtctggactcttgggtttgaagaaggaagggctggggtcctggactcttgggtctgagttgggagggggctttggcttgggcttctcctgggtctgagggaggaggtaggctgtgggcttggactcccagggctgggacagagccggatggtgggacagagtcgggtggtgggacagtcccgggtgggagaggtcctcgaaccaccttatcgctttcaccccttaggtctcctgcagctgaaagccttgaagccgggagttattcaaatcttgggagtcaagacatccaggttcctgtgccagcggccagatggggccctgtatggatcggtgagtttccaggaccctcctcaccacccaccatgctcctcctatatgtcgccctcacagcctggggtgccttgtcttgctcatcccccccggagccagacttgattctatttgctctgcacgcccccagctgcaacatttggaggttgaagttgtc

SEQ ID NO: 8325 - DNA, 6000 bp, Homo sapiens; identical to SEQ ID NO: 813

SEQ ID NO: 8326 - DNA, 6000 bp, Homo sapiens
tgggattatacaagtatgagccactgcaccaggcctacacaaccctttttccatccaggtaccacaacctgacccatttcccctgggcctagggttgggaacggctccttctgcggggctggggttcaggcaccatcccttcttgctcttctacatcctgcccaattggtggccactccttcagtcatcctaaatgcgcgtttcctgctgcaactcagacctacccacagccagccaacggcctgtatcaagccaccacagtttgtcacctggactcggacaaaggaggatccctttatctgagtccatcccatcttgccctgttccacttcaattctccttcagcatccagaacgagttttctttcttttcttttcttttttttttgagatggaatcttgcccgggaaggcccaggctggagtgcaatggcgggatcttggctcactgcaacctccaccttccaggttcaagcaattatcctgcctcagcctcctgagtagctgggattacaggtgtgagccaccacacccggctcatttttgtatttttagtagagacggagttttaccatgttggccaggatggtctcaaactcctaacctcaggtgatctacccgcgtcagcctcccaaagtgctgggattacaggcgtgagccaccgcagctggcctagaatgagtatttctatttgtttatttatttttgagatggagttttgctcttgttgcccaggctggagtgcaatggtacgatctcagctcaccacaacctccgcctcctgggttcaagcaattctcctgcctcagcctcccgagtagctgggattacaggtatgtgccaccacgcccagctaatcttttgtatttttagtagagacagggtttctccattttggtcaggctggtcttgaactcccgacctcaggtgatccgcctgcctcagcctcccaaagtgctggcattacaggcgtgagctactgtgcccagccagaacgagtatttttaaacatttaaaactggtcacattgcctcttctggcagcaaaccaaaaatcccctcttccagcagatctcaatcctccacgggaagaagtccaatgtcctcacggtctccagccaggcctagcacggtgtcagccctgctgcctgttcccttttgctcgtcccagaaagtggatgtggctggtgtagcctgtggaacccagcctgctcccctccacacatcctgcggcctgaaatgctcctccacgaacccctctctcatccaacctactcctgccaccactgagctcccacagggcacactgaatgctgggaaggccactccctacctagcatgactgctgtgttcacggataagccgccagtaggaaaccatgactctgtgggtctggggtgggccctaggattctgtttttacccctcttcccaggtgattaggagccagacctggatgccctagttttgttcccttcaccaagtaccttctccccagagctggtttttctcctttgcaaaatagctggctacagagattcaaggacagcatgttggtaaaccacccagctgggcctctggcacaccgcaagcacccaatggcacctactgttacctatgtgggttatttcctcaccccaggaggagctgggaggtgaagacctgcccaagggcatgtgaatggggaatgctgtgcccagggcagcaagtgaggtgacgtcccacccccagggtgtgttggaggtaaaatcccggggagccactgaagggggaggtaaagtgggaggtgaaggggcccacagggaggctggaggggagtggcaagccccgagtctgaccttcagcgtcagcagcagctggacggcattggtgaagggcgtgggagtgggcaggcccaggaggctgagggctcggaagaacaggagataggagaaagtccaggccagagccagggcgtggcaggagctgggcaaaagcaggaggcgcactgtgttgggcacagaagtctcggccttggccattcactccacgagtccagccaccaatcctcccccagctctccccattcgtttagagacagaaacacagaagggcagagaggacaggagggtggatgtagggaccgaatgagtatgattgaaacagtgggagaagaggctcagccacatagaaacacacaccaacagagaatgaggttaagagaagcttcaggtgaagaccctgcaatcctccactttttctttatttccgaggtccagggctcaagaagagagaggtggatatgaatgaatatgaacggtggccaggccagcagacacactgtccacctctctccatgacatggatgtagcggactgggacaaacacacagggaccagacgcagaaggcaggggagaaagaaaagcagatgaaggccggatacggtggctcacgcctgtaatcccagcactttggaaggctgaggtgggcagatcacaaggtcaggagttcgagatcagcctgaccaacatggagaaaccccggctctattaaaaattcaagattagccaggcgtggtggagcatgcctgtagtcccagctacttgggaggctgaggcaagagaatcgcttgaacccgggaggtggaggttgcagtgagccaagatcgtgccactgaactgcagcctgggcaacaggagcgaaactccatctcaaaaagaaagaaagaaagaaaaacaaacaaacaaacaaacatgaaacagagaaatgagctgatcaacaagagacagctagagatgaggcagaagctgaaaaagactcaaagaggaaacaggttgcttccccctctcccctcctctccctctcctccctccaccaaattctcaccagggctgggcctgaatgagggcccaggtcccgaggatggtgaccagagaatgcaaagtgtgggggccacaggtgaacagggtgagccccaggcccacagcggctgctccccatctcttcagcccaggacctgcagggggaagggacagcataagcctggaaccttccagagggtcccccccctttattttccactggggagggagcctgactcaccggctttcttaaagaggaagccgatggggatggagataagaagaaccactagatacgtccattcttcaggcgacatggtctgggggaggggcagagattcacagtgagaacccaggaatccaggccccctgcctcctccctcttcgaggatccaggaacccagccttctagaccccagtttttgaggatgatggagtatgagcctcagctcctctcctttgagaacctagcaacccggactccagccccttcctccttggaggagacaggaatccacccccagcccctcctttgagcgcacaggcctccagctctcctgtccttggagaacccaggaaagtgtggggatctcccagcacccaagcccctcctttgcgaacgcagaaatcaaagctactccccgcacccatactggggacccagatttgaagacgcccctcttttaaaaacccagaaacggcacccctcccggacccttcctcttcgacagcccaggaatctagacctccgagccccctcttccagcgaggatccaggaacccagaccccctctttggatcccccatcccccggcccttgtgaaaccagatatccggaccccccagcccttcttcgagaccacccagaggagcccgggtctccaacctgcacctccttcggagctccacacccctctcctactgagaacccggggatcgaacaccctcccctccccaggcccaggcccaggcccagccccaacccgtcccgcgcaccccagcgcatccccggcagagccacaggcggttgcgccagccccgagttccaacgcgcctccggggccgccccgcacccgccagcccgcagagaccctgccgccgtgtaacctcgcctcgccactgggcgccgccaccctggcccacctgagctgctcgccgggcaggaggcggccgagcagtcccagcccgcttgccgccgcagctccggccacgcctcccccgcccagcgcgcccccgcgccgcctgctccttctgggcgcccgccgggctgcgcagatcaggccggggaagaagccacggtcagggccccgggcgggcagggaagaagccccggagcagaagccgagagcgcgagtcggcaacgggattcgagtccaggtccacactgggatccgagctccgagtacgtgaaggggcgggccttcgggctcggaacaaggaggagccaaaagctttggacccgaaggggaacagacgggctccggaaaggaggcggggtctggagctcgccgtgaggaatgaggcggggtctcccttcgggttccttcgggcacaatcgggagcttgagttctccggaagcggggccacaaacttcggctcacttcggcaatagtcgagaacggagagctgaggccagtgtgggcggagccacatgtttcggctttcttcggaggtagtcgagtccttagggtcactgttccgatgtgggcggggccacagactcggccggatgtgggtggggccacaagcttcggtttacttcgtagatagttgggtacaagtgacgctaggatgataggcggagtcaacaggttcgccagatacccatgagtatttacaagggggcggggcgaaagcgacttgccctcaaaggggcggaaccccgagggccggcgtgcgcctacgggaccgggccagggtgacgatcctcaagttcccaagtagaggagaggaagcggcagagggaggtgcgctcagtggggcggagccaaggtggcccccgcgggaggagggcggggcttcggtcctgcgaggggcgggacctgacttcccgcggcgctgatggggcgggatgacgaagttgacgagggtgtcggcatgagggggtggagcaaggagcgcgtggcgcggtgcgcagtgggtggctccacctcgactgcgaattactgtttatgaggtgactcgctggttctatcggtggacagtgggacattctgaagggaggcaaggaggcggactgagcgctcccaattggggtgagcccgcccgagcggagagtggacggcgggtgtccagggggcggggctttcggctgtggggttcggtcgtagggcgggaactccccaactggggtgcgctggcgctcggagggggcggggccacaggccgcgaggctgccgggagccgatgacgcccgaacgccgaacctattgcgtccgggaggaggcggggctacggattcggccgagccgagaacacccgaacgtcaaattgctggcgttcgggaagggggcggggctgcggattcggtggagccgaggacgcccgaacgccgaacttcctgtgctcgggagggggcagggttttgtactgtgggagtctgagagcgaggaggtccgaaagccgaatcacagtcgttcggaaagaggaggagcgaaggctcgagcgtccggaagagggtgtggcctcggcggtgccttagcctccagagcttctgaccgctgacgggaacacccgaagggggacgcccactttgcaagagggtggtgccaaaatggacctttgtaagggggcgtgtcgccgcgcttgcggaggtttgtttttcacgctccaaggcgcaatggtaggtacggcagtgcgggcacagagcgggtgccgaccgcagggtcacaagggtagagcgggaccctgggggcttggcgaggggcgagggtcgggggcttgtctccggcgtctcgtctccggcggccgcgaggcctggtgggatcgcccgggggcggggcctggcgctcgggcccagcaggtggtgaacggcggctgagcgaggccccgccccctgaggcctaggggcggggcttcgccgagaccccggaggctttgggtgcgctgcagcggtctgcggcgcgcagctgtttcggtaactgctttgcctcccggctcccg

SEQ ID NO: 8327 - DNA, 6000 bp, Homo sapiens
ccttcccattcaacaagttcatcctgatggttctcgaatgcctctgacagttcttattatatttggccttccctagagcagaatttggcagcagactgtctgccacatggggagagggtgaggggtgccaggtgatgcctgatgtcgttggtgttctccttcccccttccaggctcagatggatggctccctggaggttgggtagggccatgtgactaattctggccaaggaacggtgagtagaagtgcattgtcacttccaggctggggcatttaaacattcaggaacattcaggcctccaggccaaagctctgtttcacttctagcctggtggcctgaatgttcacagtggtgactgctctagttttctttggtgactggtcaacctgtgatggacgtatacgtgaacctggttgtcataagcccctgagacttttggtactatttgttaccacagcatactctagctgaaactgattgatagaggtggccccaaagcaacacctgtttgttaccacagcatgctgtagccgaaactgactgatagaggtggccccaaagcaagaccacggttcacacaatgtgtaagtttacccttcccaggtctctgtctagtcttcaaagaggatggcttaggttggtgctgaggtatctttaccaccttccaacccttgttaatctcccccctttacctaagagaaaacaggccttgggctccaagtcttcagcaggcaataaaatctaggcagaattttgtggcattatttggttttctcctttatttattgatgtaaccagcagtgggtagccctgactccattccagcctccctgctaagcatctgacagatatcagcgcatttactcttaatcttcatagcaactctttcatatgggtgcgatcttcatccccatttcctggaagggggacaccagacccagaaaagcgaaatcacctgcttcagattgctcttatgctgccttcaacttaaggcaaaaagaagatgaattttccagctgggcacagtgattcatgcctgtaatcccagcactttgggaatacaaggtgggcggatcacgaggtcaggagtttgagaccagcctggccaatatggtgaaaccccatctgtactaacaatacaaaaattagctgggtgtggtggtgtgccgctgctagtcccagctacttgggaggctgaggcagaagaattgcttgaacccgggaggcagaggttgcagtaagccaagatcgtgccactgcactccagcctggatgacagagcgagactctgtctcaaaaaaaaaaagaagattaattttccagttgtgatggtgctataaaataaagctcgttgttttcaaaagctaatcctgggttgggcatggtggcccacgcctgtcatcctaagcactttgggaagccaaagtgggtgaattgcttgagcccagaagtttgagaccaggctgggaaacatagcaaaagcagtctctatgaaaaatacaaaaattagctgggtgtagcagaagtgccttgtagtcccagctacttgggaggctgaggcaggaggatagattgagcccaggatgttgaggctgcagtgagctgtgatcgtgccattgcactccagcctaggcgacagagtgagaccttgtctcaaaaaataaaaataaaaaagctaatccttttaaggaaaaaaattaaataaatagcagtgtgaggaatatttgaataaagcaaaaattgtgacggtagtactcaaaagcgccaagatggtgagacgctgcttcagggtcccttgtgctctgtgtaagtttccccaccagagagtaaatttgtttgactcatcactgctgttcatcctgacatttatgaaaggctcttcaagttttctgggatgaatgaatgaaggaatgattatgaggcagtcctaggctgcaggaggctgtaaaaggtggattgtctcacttgtctgttttccacacacccgtccttccccaaagttatcgggagcccactgggtgagcccctgtcccagaatctggtgttccatgtggaagatcctcctccatgcggaagatcctcctctggtccctgctgccccggcaacctgggccctcaggcgtggctgggctaagggtggggccaggagtcaggcaaaggaatgtgcactactcctggccagctgccaaagagatatcaggaaggaggtggttgctatggcaactggggcatcttgggaggtgaagagaggtgataggtcccgccaccccaggctgggtggggtcccctgtgaggtcctgtgtgagatgcaggtttcaatcttgaccctctcccctccttttgcacctcctgccgttgcccctgcaggactggcttctggccaagctaagggtccatttcagggatagggacccggacccagctgtgctcatgcatccctcttctgttcactcctaactctccctcctgttctctggcagggtggagggagactctcccctcttcccccctcgctccccaacaattcattaattagtttccttaagcagcttgcaatgcacaacatgcttttcctcccccggggtttcccgagacctgcggtcccctgtcatgctgtgactgggaaagggggaggcagaggaggttgggttgaggagtctgtcctcccacctctgcccgtctgctgccatcgatcctgctaaccaccacctctgcaaaaagaagccctgggctcccgccaggcctgctgcctcagccctgcccccctccctagggtagcttccagcctctgcagccccccccaccccccgccctgcttcggattctgcagatatggctcagtgcagcagcccccgcctgctgggaagcgcggaagggagggagccatccaagtggaattcgggttcccttcactgccaggggcttctcagcacccctggtcccctgccctcagtgctggagacccttgctgggcactggctccctcttgaagcagtctgtgccttgctcatctgcagaagcaggattagcagtgggggctattagggggcgacggtagaagtgggtgtttaagtgggtgcataactgggttaattggtgtggaatggaaatcagtgtgtggctggatgggggcagtaggggcagctaggtgtatacccaacagcacctctgggattggaaaacacccctgctgtgggctggaaggagggtcccatcgccccattcccacacatagggtctcactgcagtggtttgggccccaccccacatggctcccttcttctctttctactcccctctctccccatgggtccgtctctctccctccgtctctctgcttctctctccatagcggtctcaatcccactatctcccaggctctcatttttttttctctctctctctgcatctctgtctactgctctcagcctctcccctccactgggaatctctctgagtccatctatttgtcttcctgggtctttgtatctgtgactctggatctcctgcctctcttggtctctgtctcttccaggttctccctgtctgtctcttgctatatcccttctctctgtctcttccttcagctctcactcctttcctctgaacctggctgtcaagggtttcaggaaacagacaccctaggagacagcactggaaagaagagggacatgaacctcctccccttcccttgcccaccccagggaccctgaaatcttccagaacgtctctggtcgcagacccacccgctcccaccctgcaagctcatctcttccccgtctgctaccaccacggtgcgggaccagccacccggttgccatagcgacctgtccgagcatcccttctcccgggactgccactctccaaccgcaggtctggcacaggacgcctgccggggagggggtgtcccagagacccggaggggcgatcgggggggcgcattacaggggcttccgcccacaggaggagcggacctccctcccccaactcccttgccttaccattgcttgaatctcccgacaccctctctcctaggctctcagatcccggagcccccctgcaaccccctccccaaacgacgctcaccctttgtgggggtctgggtcggggtcgccatgctgggccggagcagggggctgctggatgctttggcggcgaaggcgcgctgcagcagctggaagcaggacggaccgatgtgggggggagctggggggagccctggcgtgggggggcctgcagccaatgggggcccggggagcccgcccccgtgcaggccacccccgcccccgcccccgcccaccaccgtcgtccccgccccttcctctagggtggggcgccccctgctggggcccagtggcgctggcgtttcgcgctgagggaccgagaccgacaaagtgctgtcgagaggaacgcacgttttattggaagtcttggcggcagggggagtctgcgggggcagggctggggaaggggcggcggagggggcggtgggcgcgcaggtggagcgtgggagatgtcaggtgccaggggagtcctgtgagggtgaaaagggtgagaggcgaggggggacgtccagccccacccctcgccgcccttcaactctggcacttggccccctccctctcccgcctttccttcctccctccttccctcccaccgccgtgtcagagctgcagcacctggccggattccatcgctccaggtgtttctaccgcctgcgggtggacagacctggggggaacacggagatcgggggtcattctggagaggcatccccagctcctgggcaggtggggcccgcggcggggcaactccccgccctccgctttcagatccagcccttccctctacgcagccagggagggccgggaaaagcggtccttggaaccagccctctccccagaatacccgcagtctccccagactcacggcggatggagctgcggaaagttccctcctcttcatcgggttccccagtcctgggaagacagaggcagagggatttcgggatggaaagggggagaggctgcccttctaggaaccccccagtacaagcctcctttcccagattggtgtaactaggcccagatatggacgaagagcaggctcggggtccgccagaaatgaggagcacccaggagcagcttatgtgctggcagggggcttctaagctggttaacagtgagtacctccgcggatttgggggcagggatgtgaagttggtgggggagggatagtcatggggacttggcagactgccatgagatggcctgggttggaaacccagaaccccccatcttccacttgagtgatcttgaacaaagtgactttacctccctgtgccttagtttcctcatctgtcaaatggggttaataacagcacctccctcccagaggaagtgaaaccgtatctaacacgtggtacacacccagtaaatattagctactacttatgataatatctataattgttctaacatattcatacattgtccatgctttaacattttattcgaagaggaatcaaagagctaggaacaagactctaagctaaactgggccgcgtgtgagatgatctcatttcaccgccgtttcttctttcctgcactttgtgttatcacgctttgtgatttttctatctgtggggctgttggaacccacggccaccgcctccactaggctgggagctcggccaggaagggcgggaggttttttcctcgcttggtcccagggccaggcttgggccatggcacatagtaggtgcttaatacatagtcgctgacggggatcgggctgcgggtcaggggtactccccgcctcacccgcggcgccctccagagcaggagcgggcgaaggagggcggggaggggcgtcttacctctgctgctggttgaacttgcaccggcatcttctgcctgtgggcgtggagaggtaggagaagctgaggctccctcccggcgggcgccaagcggcgctgtagctccagctcgccctcgcga

SEQ ID NO: 8328 - DNA, 6000 bp, Homo sapiens
gaaaccccatctctactaaaaatacaaaaattagccaggcatggtggtgcacgctggtaatcccagctactccggaggcacaagaattgcttgaacccaggaggcgaaagttgcagtgagctgagactgcaccaactgtactccagcctgggtgacagagcaagggtctgtctcaaaaaaaagaaagaaaaagaaaaaaaaatcactaaggaaagatcactacttgcctggcccatgctaatcagtttataggcattaatttgttacattttcacaatgattcttcctaggagtagattattaggatcctctttttacagacgagagtaaggagatgttcagagaaatcacatagcttgctcagggtcacacggacacagggtgaccaggcaagccatcaaaccaaaggggcacttttgagaaagaaagttgctgctgctggtaaggacatcaggcctggcccaggtaaactgggcagtatgccactttgcatggacagcacgtgcctgagccaggattccaggcctgtttgttccttctccaagctcaggctctagaaggggcagagaggagatactctggattagcactctgggggtggagaccctgggtctgagccggggaactccacctactcctaagacctcgatcaagtctcaacatctccctgggccttagtttccaattctgttaaagcggagtggtggaagcagcacaggttaaaggtcagagccacagccctaacccttcatgtactgagatccagagatgaacagtgattggttcaagatcacacagcaaagtctgggctgaatgaggatttgactccaggtgtccagattcttcaggagtgtggggatgatgaaatgaacggtggcatggtgcctggcacacggttaccacccaacatctggcacttcagggctgcactccttattctcttcctagaagccccagcccctgttcctctccttctcctcctccctcaactgggaggtggaaaataaatgggctctggcatctcacagatctgagtttgaatcctgcccctgcctgttactgcgtgaccttagccaatgctgtctaatagaactctctggcatgatgaaaatgtcccatatctgcactaatttttttttttttttaaatggagtctcgctctgtcgcccaggctgcagtgcagtggtgtgatctcggctcactgcaagctccacctcccgggttcacgccattctcctgcctcagcctccagagtagctgggaccacaggcgcctgccaccacacccagctaatttttttgtatttttagtagagatggggtttcaccgtgttagccaggatggtctcgatctcctcacctcacgatccgcccgcctcggcctcccaaagtgctgggattacaggtgtgagccaccgtgcccagccacaatttttttttttttttttgagacagagtctcactctgtcaccgaggctgcagtgcaacctccgccacatgggctcaagccatccttgagcctcagccccctaagtaactgggactacaggcttgcgccaccatgcctggataatttttgtatttttagtagagatgggttttcgccatgttggccaggctggtctcgaactcctgacctcaaatgatctgcctgccttggcctaccaaggtgctggttttacaggcatgaaccaccacacccagcctgtactgtctaatatgagagtccccagccacatgtggctgttgagcacctaaaatgtggccactgtgagtgaagaatggacttttattttaattagtgcaaagtgaggtagccacatgtggctgtggctaccccactggacatcccagatttaaaaaatttacttaggctgggcgcggtggctgacacctataatcccagcactttgggaggctgaggtgggcagaacacttgacgtcaggagtttgaggccagcctggccaacatggcgaaaccccatctctactaaaaatacaaaaattagccaggcgcagtggcgcacacctgtaatcccagctacttgggaagctgaggcaggagaatcgcttgaacccaggaggtggagttccagtgagcggagatcacgccactgctttttgcactccagcctgggcaacagagcgaaactgtttctttcttttcttttttcttttttttttttttgagatggagtctggctctgttgcctgggctggagtgcagtggtatgatctccactcactgcaaactccaccacccgggttcgagtgattctcctgcctcagcctcctcagtagctaggattacaggtgtgtgccactatgcctggctaattaagattgtttcaaagaaaaaaaatttacttaacttttctaagccctagttttgttatctcagagatgggacttgcagcacctactgtgagggctgttccttactatgagagtccatcagtgcctcaatagcatagggcctatagtggggtgctcaggaaaaggtggtgtcagcatttgctccgttgtcttgtttccccgtctgaccccttccttgtcctcccatctcccgcactgtgtctgggagttgagagctcctggctcctgtcacccaggggcacagtcgggccatgggagggcctcaccccttcgaagacccgcgtgatggtcttgggccttctcagaaactgcacggcttcgctgttggccagctcctggaggcttttggggatgtgcatggcagctgttttcctttggggccactgggaggtgggagccagggtgctgggcgctgcctgctgggcactgccgtccgggggcttcaggccagccctgggcttggctgctgtgggatgacacagatgggggatgccagtcaggggcacggggtggaagggctgttgggggccccaggattgggggacatggggtggggatggggggggtccccggaatggagttgtgtggggtgaggggactgctgagcctcttaggagtcagggtgtggggtgaatgggctgtcaggggccccagaagtcggggacgtaggatgggggtgcaggtgggtcccagggaatgaggttgtgtgtgctgagggggcttctgtgggccccaggagtggggggcataggatgggggtgctgggggtcccaggaatggggttgtgtggtgagggggctactaggggtcccagaagtgggaggcataggatgggggttctggggggtcccaggaaaggtgttgtgtggagagggctgctaggggtccctgaagtgggggacataggatgcgggtgctgggggttcccaggaatggggttgtgtgtggtgagggagctttctgggggtcccaggagaggggggcataggatggggatactaggggtcccaggcaaggtgtcgtgtggggagggctgccaggggtcacagaggtggaggtgcaggatgagagagtcgctaagggtcccctgggttgaggtgtgggttaagggggtctatggaggattccagagaggtgagggcctggggtgagggtgattctgggggtcccaggagtgggggacataagtgaaggggctgcttcaggttccagaagtcaggaatgtgggctgagggggttgttgggcgagagggctgtcagggatcccagaggtggagtgcaggggagggctgggatatttggggaccacgtcttgtgacccaggagctgaagggcctgcagagggactgggtccttctgtgagaggacacaggtgggactttctggggactagggggtgcggccattgagatcagagcccctgggaggtctgaaaccgaataatccctttcaggtttgggggtgacagcacccttcgtggagaacccaggtatctcagggcatatttcaggctgtccttgtcacttggggccatttcccagaataagggcctccctttcgaattcagctccattttcacggaagtgcacctcctcaagctgggagtcgggacctcggatttgtggggaacctcagaatgaggccacgccccggcactgggctaccttcttagaatcgcggtctcccctttaaggacctggaatggcagtgctgaggtttgggggtgacggcacctgagaaggggccgccccttctctggagggccaatctgcgtcacctgagggcccgcccttcctttcgccacccccacccctcctggtccctagcgccacctcagccttcttttggttccgctttttcccgccttttcgctcctccacagctgattggctgcgcccaagtcccgccccctccctctttccgcctactcaggagctgacacgagccggggcgtggcctcggcgaacgttggactgcgcgccgttggcggactgcgcgcgggagccctaccccgccccatccctctagggagtctcgcgtccacaccgccccttccctttgtagcaagctgacaaggagacactcctgcggcgcatgcgtcgcgcccaaacgaggccggcggtggagaaaggcaggcaacgcatgcgtagttgatgtagggagtcggcggtgagaaatggacagcccgcattgaccgaagctttgcgcatgcgttttactgctgggtgaagccgaacctcgggagcccaggacgccctcctgcacatgcgcaggaggctcaatgacagtcgagctttggctaaggtgagggagaaatcgggggattgcatggccagggagggcggccctgcaccccctaggtaacctttacgagcatttcctgctctcctaagatctacctcgctgtctagaccccaaagaaacgttgtaccactacagggtctctgggcctgaaaaacgccccagaacctaagacctctgacccctgtctgggacccaggccaactgagcagtgtgggaaggggacaggcaacaggggctttgaggcgagcggatgggctctgcgccctgcctggggtagagacggcttctggagggtgggacgtggaggtggagagggcgcttttcctctagatggcctttgacccctgcccattttcctctgtttaggctccggggaaagggtctagccatgctgcatgtgacccggggggtctgggggtccagggtccgagtatggccactgttgcccgcgctcctcgggcccccccgggccctctcatcgctggcagccaaaatgggggagtatcgcaagatgtggaaccccagggagccccgcgactgggcccagcagtaccgcgagcgcttcattcccttctccaaggagcagctgctccgcctcctaatacaggtaccgcctgtcccaggcccaagagcctggggactacggctcccagcaggcttcgcggcggcagggccctagttgctgcagagagctgccctggcgcctcctgggagttgtagttcccgggtcccttcgtgtttccctagtgggcgggagatgagctggaatgcaggagccaggtctccgagatgcagacgcagcatccattcccaactctggcttgttctgagggcttgaacaggcactctctggggcatggtttttccctctttaagatgggtatagtaatcatcctcatcattactatttctactacctgataataattgtacctataaagtcacaacgctgtaatcataattattatcacacaatttgagctctgactccatggcactgtgccagacatttttcatgtattgttgaatcatcagtaagagagataccaccatcatccccattttacagatgagataatggaagcatagggaaggaaagtgacttacccaaggccacaacatagtggcttagatttgaaccaaagtggtctgactccagagctggcccaggactagggttaggcaagtagggcactcgcttgaccctaagagtgagtgccccgttaaattttgcacccttgggtgccatattcacctcatcctagtcttggtctcactctagaacctgaggtcttattgccaccatcatcatcattgtcat

SEQ ID NO: 8329 - DNA, 6000 bp, Homo sapiens
tagggttaggggcggggacggtgctggggatgctgagggtcgccctggaaacctctgggaagattttccagagggtaagtcccctgaacctggcccacgaaagggtagtagtaatgaagaaattggaggtggggcccgctatgaggaccgaatgacagagcagcacctgttggctgcatatgataatcaggctactgttacacctaagactcacacagtaggcacttcctaggccacttaccgctccctgcgcttcaggtatcttagcccattcaatcctcccagccaccattcgagatattatcagccctcctttctaggagtgaagctgaagcccagaaacgcgaatcacttgctcaaagttattcaacatgtcagtggcagagctgggatttgaactaggctgtcgggctaccaagtctgggctcttcttcataggaatatctcatcaccctattcagttatcctaaaattgtaattagcacatgaatcaagtcaagatggtcattaacatgtgaatctctttgagtcgctgattaccagcgcttgttcctgcccaaatttgtgacttagacctgcttcaggacaaagttgacaatcaacatagatttatagttagcacatgaatcagcacaggtttctgttcacagggatcagatttctgattagcacttgaatcagcagtggtttgtgtcaacagctggagtctttaggttcctgatttgcacagggatctccatccagggattattttcttgcctaaataggcctgttcctttatgtccaggtgaccttctcttcaaatgttgtcccagctgggtgcagtggctcacgcctgtaatcccaacactttgggaggctgaggcgggaagattgcttgggtctgggagtttgagaccaacctgggcaacatagcgagaccccgtgtctccatgaaaaataaaacaattagcctggcatggtggcatgctcctgtagtcccagctacttgagaggctgaggtgggaggatcccttcagcccaggagtttgaggctgcagggagctatgatcatgccactgcatggcagcctcagcgacaaagcaagaccatttctcttaaagaaaaaaaaaaaagggcgggcacagtggttcatgcctgtaatcccagcactgtaatcccaggttgaggtgggcggatcaactgaggtcaggagttcgagaccagtctggccaacatggtgaaaacccatctgtactaaaaatttttttaaaaatggccaggcacagtggctcacgcctgtaatcccagcactttgggaggctggggtgggtggatcatctgaggtcaggagtttgagaccagcctggcctacatggtgaaaccccatctctactaaaaatacaaaaattagcagggcatggtggcacgtgcctgtaatcccagctactcgggaggctgaggcagaagaatcgcttgaatccgggtggcggaggttgtagtgagccaagatcatgccactgcactccagcctgggtgacagagcgagactccgtctcaaaataaaaatcagccaagcgtggtggtgcatgcctgtaatcccagctactcaggaggctgaggcaggagaatagcttgaacccaagaggtggaggttgcagtgagccgagatcatgccactgcactccagcctgggcgacagagcaggactctgtctttaaaaaaaaaagagatgggggctgggcgcagtggctcacacctgtaatcccagcactttgggaggccgaggtgggggtatcacctgaggtcaggagttcaagaccagccttgccaacatggtgaaaccccatctctactaaaaatacaaaaattagccgggcatggtggcacatgcctgtaatcccagctactcgggaggctgaggcagaagaatcgcttgaatccgggcggcggaggttgtagtgagcaaagatcacgccactgcactccagcctgggtgacagagtgagactccgtctcaaaataaaaatcagccaagcgtggtggtgcatgcctgtaatcccagctactcgggaggctgaggcaggagaatagcttgaacccaggaggtggagattgcagtgagccgagatcatgccactgcactccagcctgggcgacagagcaggactctgtcttaaaaaaaaagagatgggggctgggcgcagtggctcacacctgtaatcccagcactttgggaggccgaggtggggggtatcacctgaggtcaggagttcaagaccagccttgccaacatggcgaaaccccatctctactaaaaatacaaaaattagctaggcatggtggtaggtgcctgttatcccagctacttgggaggctgaggcaggagaatcacttgaaccaaggaggcagaggttgcagtgagccaagattatgccactgcactacaacctgggcaacaaagtaagactctgtctaaaaaaataaataaataaataggccggacactgtggctcacgcctgtaatcccagcactttaggaggccgaggcgggcagatcacgaggtcaggagatcaagaccatcctggctaacatggtgaaaccctgtctctaataaaaataccaaaaaaattagctgggcatggtggcagacgcctctagtcccagctactcgggaggctgaggcaggagaatggcgtgaacccgggaggtggagcttgcggtgagccaagatcacaccactgcactccagcctgggcaacagagctagactctgtctcaaaaataaataaataaataaaataataataaaatggggttatttgttttttgcttgttgcattgtttaagtcccttatagactgaattcctctttatgtctctaaatacatttgtctctttggtacacatctgcggtgctacatgccctcaacccaccaggttttagcatagctgttgtggtagacagttccgtgtgcagtgcagatagccctggttcagcccagctgttctcaaaatgtggtccctgaccaggtgtagtggctcacacctgtaatcacaacactttgggaggcctgggagggaggattgcctgaggccaagagttcaagaccagcctgggcagcatattgagaccctgtctctacaagaaattttaaaaattagctggatatggcgatgcatgcctgtagtctcagttactctggagcctgaggtgggaggattgcttgagcccaggaatttgaggttgcagtcaattatgattgcaccaatgtactgggtgacaaagcaagaccctgtctcaaaaaaaaaagtatggtctttgaaaagtcacattagcatcacctgggtactcgttaaaaatgcaaatgtttgggtcccacctcagacccactgaaccagaaactctgaggttgggacctggagatctatggtgcccccgggtgatcctggtgggctgcactgcaaggacacctggcctggctcctgcaaggcaaggcatccctctctgcttttctttctttctttctttcttttaaagacagagtctcactctgtcacccaggctggagtgcaatggctggatctcagatcactacaatctccacctcccgggttcaagcaattctcttgcctcagcctcccgagtagctgggattacgggcgtccgccaccacacccggctaatttttgtatttttagtagagacggggtttctccatgttggccaggctggtctccaacgcctgatctcaaaagatccgcccgccttggcctcccaacgagccgggattacaggcgtgagccaccgcccccggctgtcagtgtgtcttgaggtctttccctaatcccagatggcacaagttttccctcttgcaggcagagaaaggagccttgggaaggagcccctctggcctgaaagatcaagcctattgctgggcatggccaggtaaggaaactccaaccgtggaaaggacattccagggaggtggtgctgagataaggggggcagaaagagacaggtttggggggccagtggctctggaatgaagcgctacactcaaggctaggaatagttactgaatgcacatacacacataccattctcacagcccaggtgctgcgtcttagagcgtgtgagtgtgtatgtgtgtgtctgtgtgtgcgcgcgcacgcacgtctctatctctgtttctgtctttctctgacttgtccttatctcttgtctctccatcactctctgtgtctcgctgtctctgtgcatttccatgtctcgaatatgtgtgtgtttcaatctgtctctctgcctctttccattttctcctctctatccatcaatctaagcctgcccatctttttgtctgcctttctgtatctccgttcttctctgtctctctgtctcagtctctctgtatccagggattctctttcccagcagcgccagtgcgactccatgggaggtggggccggggcgcgtctttgagagaaggggcgggtgcctacgcctttaagcgcgggtgcgcgcggagcctgcgcctttaagcgccggtgcgcgcgctgccctgggttgccggcgaggaggccgcgggagcgcctggacccggcccgcccagcccggcccccgcccggcccccgcctcggccccggcgggggaggggtctctgagcgcggcccctcccccctgcgcccccgcctgcgctgcggtgcccccatcccgcgtgtcccagtctgtctgaccgtccctccgctcccaggcctcgccccacccggccctggggctgcccggtcgcccccctccccaccgcagccggtcccctccctcccagtcagcctccgccgcagcccaggaagccagccgggacgccgccgccccggaccccgcgccctaacctccacctcgggggcctgcacccccagattgaatcgggaattccggaaacccgagcctggaaccctgatctgggaccagcaccccgagatccggccgtggaaccccaagatctggagcctgaaccccagtatatggggctggaatctcaacatcggtcactgggacctcaatatttggagccggaaccccacaatttggaacacagaccccaatatttggagcagaaccccaagatttgacatctaaaacctcaagcctggagctgaactctgaattctgggcctgggaccttgaaatctgggactggatttccagtactgtaccctggaacccactcttggggacctgaaccctgggattcaggcctcaaattccaagatctggactgtgggattccaaggggcctgaacccgagtttgggcctgaagtccttgctgcagacctgagtgcttaaatctggggcttgagacctcccaatcttgactcagcaccccaatatctgaatgcagaaccccgggatcggatctcagactctaaaccccaccgtttggctgcttagcatcccaagactggacctgggagaccctgaccctgaacaacccaaactggacccgtaaaactggaccctagaggcccaatatttaggggtctggaaccccgagtattaaggtctggagactccgttgccacagatttgagccgagtcaggacacagtccctctacagaagccttggggacaggaaaagcatgaccagatgctccctccagagccctgacctctgactcccctggagctaggactctgctccctggggctgcttctagctcaggtaaggctgctgaaacctcaaggtggggacgggctgggaggagcattgtggctgcgggttacggtaccaggtaccctttgacactcttggggtttctccagaaaaaaagacattcccccatgggtctgccttcagctcctgctctgctccaaacactctctggacactggccatccttgcccctctctgaccttccctgcctcagttgatgggacctccaggtctctgacccctgcaacccttacagcctttcgctgtctatccggtccgaccgtctccgccacctctcttgtccacc

SEQ ID NO: 8330 - DNA, 6000 bp, Homo sapiens
gctcctgccggagagaggcggtggtgtgccagggctggggacccgctgagcccccacgacggtacccaggccgcctttcagtcgacgaagactgcaaccgtcacctcctcccaggagccgcctccaggatatgtccactgcccctgatgtgcctgtacatcccccatcgtgcctctaggccctgagccttgtgcctgtaactggtcaacgtgtccatgtcccccaccggggttgagagctccccaagggcaggcaggagctcgacgctgggcagtgggggtgggtgcggaatagctgcccagtgaagtgtttgcagccgggcgcggtggctcacacctgtaaccccagcactttgggaggccgaggcaggtggatcacgaggtcaggagatggagaccatcctggctaacacggtgaaaccccatctctactaaaaatacaaaagattagccaggcatggcggtgtgtgcctgtagtcccagctgctggggaggctgaggcaggagaatggcgtaaacccaggaggcggagcttgcagtgagccaagatcgcgccgttgcactccagcctgggtgaggctccgtctcaaaaaaaaaaaagtgtaatctgcaacgatagccatctcattccaggccctttgggaggcactgggaaaacaggccagtgtttcaatataagggatggcagaaacctgcaagggaggccaggctgtcatgaagacttgattctagagctgagaaaggcaactgtttcatctgttatcttagcgcagggtttctctgccttggcactgctgatgttcagggccgggtcattcttggttgttttcggtggagagggggaagtggctgtcctggacactgcagggtgctgagcagtgtccctggcctctgcccactccatgccatcagcccccaagtcatgacgactacaggtatctccagacatcacccagtgtcccctggggcggggtggggggcagggctaccccctttgagaacctcctgtcttggaggcagcaaaccccagcatctcgatcccctgggtggaggagagccctttggtcgggtgtgcactcaccagccggcactgagtgaggctgtggctgcatggagcctcagtttcccccttggtaagtgggagtagtaatggcccctgcctcctatggttacaagttaacagagagaacgcctttctgcacgtttatttctatttattttcgagatggagtcttgctctgtcacccaggctggagtgcagtggcgcaatctcaggtcactacaagctcgcctcccaggctcaagtgattctcctgcctcaacctcctgagtagctgagcgtaccaccatgcccagctgatttttgtatttttagtagagacggggtttcaccatgttggccaggctggtctcaaactcctgacctcaggtgatccgcccgccttggcctcccaaactgctgggattacaggcgtgagccaccgccatcagcctttctgcacatttattaagtgccttcaggcaactataacacagtcccagcaaggagggtgttcagagaaaaacgtgtgtgtgtgtgtgtgtgtgtgtccagctcagccccaatcctgaacctggctctgaaaagaatgactacgacagctgcatttattaagcgcctattgtgtgccaggttttgtgcttttcctgaattattcaacagccaaaactgggggtgggtgggtgttgcccaaggtcacacagggaacctatgtgctccagagagcttggacagccttcttcctcctcccctggggctgctatctgcagagtgagatagaggccacttctggaccaaagggcagaggcccaagtccccccagcccctcccacctgctttagtctttatccaaaagcacccaaggtcaggggtaggaggagtcccccagctggtcccaggagtggcctcccagtcactgtcccctctgagtttcttcgtatgttacccaggggtgtgggatttgtcaatttaaaggaggtgggagatggggatgagggactgccatctctccccgggcctggctcgtggggaggaatgactctcccagggcgtccctcccctaaatcccttttcctgcagcttcagcgacgggaggatgaccttggacatcagaactgtggagggaggcccagcccccaagattagcagcagatgggactgggggtgggcagggtggaggactgtatgcttcagacagaacaggcacagaggcagcccctgcctccctgtgcctcagtttcgtctctggtgacacggtgccccaggcagcccctccctgctgcctgcctcctgggcgctctacgacctaaattcctgcccactagccccagggatgtggaaagggagggcagaggtcagggacctgctcccgggggcaggcacagccgggccatgcccatgccacctgctgcgctgcacatgggaccaggcacctggggacctccagggtgtgggcacagacttcagactgttctggcgctgcctggcatgggaacccccagatggtgggaaaattgggggggaactggactcctgggatccacctgcagaaggtgctcaaaaaagtggcactgtcctctacccagaataccccaggcccagagcaagtccttgtgagtcattctgcggagcttcctggaagagaaggcagagccagtggggctgggagcaccacacaaacggaagaaaggctgggtgcagtggcttccacctgtaatcccagagctttgggaggctgaggcaggaggatcgcttgagcccagaagtttaagactagtctgggtaacatagtgagaccctgtctcttaaaaaagttaattttaaaaagttttaggccaggcaaggtggctcatgcctgtaatcccagcagtttgggaggccgaggtgggcagatcacctgaggccaggagttcaagaccagcctggccaacatggtgaaaccccgtttcaccatgttgaacggctaaaaatacaaaagttagccgggcatggtggtgggtacctgtaatcccagctacttggtagactgaggcaggagaatcgcttgaacccaggaggtggaggttgcagtgagccaagatcacaccactgcactccagcctgggcagcagagcaagactcggtctcaaaaaaaagttttaaaggtggggagggaggcatttaaggagcgtttactacatgctcttgctagagatttggaaaggggaaggggcgcgcagcgtcaccaagggtgaaagtcacggaagaactgtaatggagtcacaatcggggtgcctggatctccggctctgtgggccccagtccagcctccccacatcacagccgtcagacaacccaactccgtcttaacaaacatttacgctcggtggcactaagccattgagctgggggaaggtgagctagggcaggagaggaggaggaaaggagaagggtcctgggcaggcccccaggacggtccgttccccttcccgccaggagcctcccctcagaaaaacgggaagatctctactgttgcagccaggccggggtccacgggggaagggggacggcgaaacgcgcaggacactggcatcccgacccctctggggccactgggcaactggaagaaccggacttcggcatggcaggcacccagcgcccggaaggaggcgtcggggggcggccaggggcggaagctagagaggggtggcccgggagcagggtcgcagggcgcgggcaagggaagggctgcgggcggacctcgaggtcccagtcacctcgcgcgctccaccggccggaccggaccccgtagccggggaaggagtccggtctgcgacccccaggcccatggcctcggtgtgcccgtcggcgaaacgggctagcgccgacggctcacctgcagccagataccgcttctccaccccggtcttggcctccagcgcccccagcacttcggtgaccaggttcctttgctccaggaagtgctccacgcgctgcctcaggccgtccatggccccgacgcgcccggggttggctgctcgagctcgcccgcggaccagggcacccaccccgctgcacgcgcaccgctttcccgcagcctgagccgcgatgctccggccccgcgccggtgtccgcccccggccccccgctaggaccaatgggagggcagggcggacaaaggaggaggggcctgccccgtctcccccgccgcatagccctccgccacggccgccgctgcccagaccccgccgggagagggcggggcgcggcggcccagggcaccgattggccgggccggagcgagacgtagctgattggaagggcggtgtcagaggatgggattattggctgaagggtggagccagggcgaggagaggcgtgggggggcggaaccggggggaggggctaaagaaacatccgagccgattggagaaacgggacgcgattcattggcgagaccagtggagggcggggctgatcacaaaggaggcagggcggaatggtaggggcgggaacggggcgaggcttatcggaggaggcgggattacgcaaaagaatgattctgattaggccggacaggaggccgggctgattctcgaaggaggggtgtgttggaaagtgggagaggtcaaacaaagggtaggacgcgttatcgcaacagtgaacccgcttctctgggttagtcttgtcgttgtacaaatgggaaaactgaggctcccgagggtgtgggtctgcggaagacgggcaggcgtgcgtccctctcccgcttctgttagatcttcgcgcccctcctggctgagtagccgcaaggccccctgggagtcgaagccttctgcgttgctatggcgccgggggcgggtcggacgcctgggcccactcggcggtttggcgggagggaggggatttgcgcaggccccgctcccgccccgcctccatgcggcccgccccgattgcgctgtggctgcgcctggtcttggccctggcccttgtccgcccccgggctgtggggtgggccccggtccgagcccccatctatgtcagcagctgggccgtccaggtgtcccagggtaaccgggaggtcgagcgcctggcacgcaaattcggcttcgtcaacctggggccggtgggtgggaccgggatagacgggaagtgggggcttggaggggactgaacaaccctagaccccgacaagggggagggagcccacaaggtcttctaaatatcaagagtcccagcccacccctgcctcagccaagctcagcttctgggactcccagagagcacctgctggggaaggacaaagaagggggctgttaccggccctcgggggcttcagcaggggagccgggtcccatcggtgcggccgcttccccacatccccagatcttccctgacgggcagtactttcacctgcggcaccggggcgtggtccagcagtccctgaccccgcactggggccaccgcctgcacctgaagaaaaaccccaaggtgagcctggcctggaggccaaccccctgcccggggtctcagctgcctcctggggccaccagccatcttctgtggttctcgtggttgttatgaacagctgtgtgctttctgtggctcagacccgcccgggccccaagtctatacagcaagaggaggcaggaagacccagatacggaaatcatggcgcctgccagggcctggtacacagtgggcacctcttgtcctccccctccctcctctgggccccaggggctctggtaaggagggacagacggcgtgacttccccaccgtctaggtcatgggatggagggaaggggattttacgacaccgtaatgggttccaaagagtaggaggcttggcccggcgcggtggctcacgcctgtaatcccagcactttgggaggcggaggcggtcggatcacaaggtcaggaaatcgagacgagatcctagcgaacacggtgaaaccctgtctctactgaaaatacaaaaaaat

SEQ ID NO: 8331 - DNA, 6000 bp, Homo sapiens
gaactagaagtgacaagaaagaccatctgtcaatttttattgaatattcagcatgaatcctcctactcagccaactcagggttaaccctaaagtatctgttcttttttgggggggacggagtctcactctgtcgcccaggctggagtgcagtggcaagatcttggctcactgcaacctccgcctcccagattcaagtgtttctcctgcctcagccgccagagtagctgggattacaggcgcgcgccacaacacctagctaattttttatatttttagtagagatagggtttcaccacattggccaggctggtcctgaactcctgacctcgtgatctgcctgccttggcctcccgaagtgttgggattacaggcgtgagccactgcgcccagccaagtatctgttcctgatgcttttcgggttataggaggccctagaaaattggatgaggctgggcgtggtggcttatgtctttaatcccagcactttgggaggccgaggcaggtggatcacttgaggtcagcagttcaagaccaacctggccaacttggtgaaaccccatctctactgaaaatacgaaaattagagccaggtgcggtggctcacacctgtaatcccagcgctttgggaggtcaaggtgggtggatcagctgaggtcaggagttcgagatcagcctggccaacatcgtgaaatctcgtctctactaaaaatacaaaaaagttaggcacggtggctcacacctgtaatcccagcactttgggaggccaaagcgggtggatcacctgaggttgggacttcgagaccagcctgagcaacacggagaaaccctgtctctactaaatatacaaaattagcctgtaatatacaaaattagcgtgtggtggcgcatgcctgtaatcccagctactcaggaggctgaggcaggagaatcgcttgaacccgggaggcggaggttatggtgagctgagattgcaccattgcactccagcccgggcaacaagagtgaaactccatctcaaaaaaaaaaacaaaaacaaaacaaaacaggctaggtgtggtggctcacgcctgttaatcccagcactttaggaggccgaggcgggtggatcacgaagtcaggagatcgagaccatcctggctaacacggtgaaaccccgtctctactaaaaacacaaaaaaattagccgggcgtggttgcggcacctgtagtcccagctactcgggaggctgaggcaggagaatggtgtgaacccagaaggcagagcttgcagtgagccgagatggcgccattgcactccagcctgggcaacagagcgagactccgtctcaaaaaaaaaaaaaaaaaaaaaaaattagctgggcagggtggcgggcgcctgttatcccagatactcaggaggctgagggctgaggcactagaatcgcttgaaccttggaggcagaggttgcagtgagttgagctcttgccacactgcactccagcctgggcgacagagcaagcctccgtcaaaaaataaaatttgtatgaaactcctctcccagaaacagacataagtacacacaaaatgtagaaatgatttctgaaaatttcttttttctttttctttttcttttttttttttttgagacagaatctcgctccgtcgcccaggctggagtgcagtggcgcgatctcagctcactgcaagctccacctcccgggttcacgccattctcctgcctcagcctcccgagtagctgggactacaagcgcccgccaccacaccgactaattttttgtatttttggtagagacgaggtttcaccgtgttagccaggatggtctcgatctcctgacctcgtgatccgcccgcctccacctcccaaagtgctgggattacaggcgtgagcccccgcgcccggccaagaatttctaaaggctccttcacagaccccagctgaggaaaattatgaagtcctgcaacaaggtattcggggctccttaagggagtgtgtggtgactggaaggatggtatagtttacagcagaggtgctcaatcttgaatatgcatcagaatcaccggggttgcgggggggggggtcttgataaaccaccgtttgctgggtcccactgccaagtccccgactcagtaggtccagggaactgcatttctaaccaattataataaattccaggtgatcttgatgctgctggtccagggaccattctttgagagcctgtgtggggaaatgagagaactggatataacccacattttcagaactcgagacaaatcctattagtaaatttcactggaaaatgtttctcccacttactaggtatgtgttgttaggcaagtgtgtctttaactttcctaagtatgctttcgtatctataaaataagggtgttggccgggcgcggtggcacacgcctgtaagcccagcacgttgggaggccgaggcaagtgaatcacgaggtcaggagttcgagaccaacctgggcaacatggtggaaccctgtctctactaaaaacacaaaaaattagctgcacgtggtggcaggcgcccataatcccaactactctggaggctgaggcaggagaattgcttgaacttgggaggcggaggttgcagtgagccgagaccgtgacattgtactccagcctgggcgacgagaacaagactccatctcaaaaaaataaaataagggtatggctgggcatgggtggctcatgcctgtaatcccaacactttgggaggctgaggcaggaggatcactggagcctaggagttcaagaccagcctgggcaaaacagtgagaccccatctctttttttttttttttcctttgagacagagtctccctttgtcacccaggctggagtgcgatctcagctcactgcaacctccacctcctgaattcaagcgatttttctgcctcagcctcccaagtagctgggattacaggcacctgccaccaagcctggctaatttttgtatttttagtagagacgaggtttcatcatgttggccaggctggtctggaactcttgacctcaagtgagtgatctgcccacctctacctctcaaagtgttgggattacaggcgtgagccactgcacccagccagtgagaccccatctgtacaaaaaataataataaataaaataaaataaggttaaggaatcattatgaatcttcctgtaaacatcaaatgaggccatacaccctaagaatacagctcacaggtccctactgaatgtgacagtttagtccagatgggagttccctgagggcaggaacggagtttcagcaactggtccccatggcaggttggagtatgcactaacctaacatttactgaaatttcaaaatgtgctgggtaaggctgggcgcggtggctcacgcctgcaatcccagcactttgggaggcgggggttgcagtgagcagagatcgcgccactgcactccaccctgggaaacagagcaaaaactccggctccaaaaagaaaaagaagtgggagggctaggcccggcgtggtggctcacgcctgtaatcccagcactttgggaggccgaggcaggcgggtcacgaggtcaggagatcgggaccatcctggctaatacggtgaaacccccgtctttactaaaaatacaaaaaaaaattagccgggcgtggtggcaggcgcctgtagtcccagctactcaggaggctgaggcaggagaatggcgtgaatccgggaggcggagcttgcagtgagccgagatcgcgccactgcactgcagcctgggcgacagagcgagactccgtctcaaaaaaaaaaaaaaaaagaggtaggagagcttaatatcgggctgggaggatggggtggagtagggtgagcgaggcgtcaagttcgattcctaaaaagagtaaaaggggagcctcagtgaggttggggagcaggcctcggctccaagatgaaccagcaccctcccgacccccggcagcaccccagccccaggagtcctggcagccccaccgacagagctgagctgtgaccagcggtcggagccacatggtcacagccgccaccagcatcaacatcagcatcgacttgggcttccgccgccaccactgcccctcaaccgccacggggagtcgctgcacaatccgagtacgtgcaggctgaagccctgcgcatgcgcatcaatgagtcccgggagcgggcctccgcgcactgcagcccggcgctccgcctgaatcttgagcatgcgcagacgaatcccgggaagcccgaatccgcgcaccccaaagtgcgctcagagcctgagtatgcgcacccggccacccgtggccagtctagagtctgagcatgcgcatgttgtccgcgcgcctaagcatgtgcacaggctgctcatgagttcctaaacgttgcgtttgcaacactaccagtgttttgtacgggcgctggcgcctgctcacagccttccacgtgaccggaaaaggccttcagcgcataaagtgggagaccggaagaggcggagacgatccgatgctcgaactccgccccctcttctccgcgtaggcccagctccctgaagcggctgtttcgagccacgcgcccatcgggtaccgaggcacgcgccgggcgtcacgtgcgtttcgcggcgagcggaaatgacgcgagttgtgtgagccgccagtatggccgggctatggcggcgagcactggctacgtgcgactgtggggagcggcgcggtgctgggtgctgcggcggccgatgctggccgccgccggggggcgggttcccactgcagcaggagcgtggttgctccgaggccagcggacctgcgacgcctctcctccttgggcactgtggggccgaggcccggcaattgggggccaatggcgggggttttgggaagcgagcagccgcggcggaggcgcattctcggggggcgaggacgcctccgagggcggcgcggaggaaggagccggcggcgcggggggcagcgcgggcgccggggaaggcccggtcataacggcgctcacgcccatgacgatccccgatgtgtttccgcacctgccgctcatcgccatcacccgcaacccggtgttcccgcgctttatcaagattatcgaggtaatgggagtccccgcctcggcctcaggtttcccacctgtgcaagcagcgggctgaaccgtgggatcacttgagcgcccttgtgtttcgcaactttttcagacatgaagtttctcgaagggtgcagttcgaatccttgtctgctcaccactagcttgggaaccttgagccaaagtcctctccctttcggatttcttaggatccgttagatgagaggagttgaacccgatgagcctaggattatccactttagaacgccggtcatagaaatccggggccgggagggacctgagtagtgttacggcgctgttagttttctccttacttggcacgagttttgtaatacctcctcgccccaggcgctctgccgtctggttacgagcctcactgggatcagaattcattcctttcttagacaaatacttcttgattgcttattatttgccagagagtgttctaggttctggggatatggcagtgaacaaaacagacaaaaatttctgcctttgaagctgggcatggtggcgcgcgctgtactcccagctactctggcggctgaggtggaaggattgttggaaacctggagtccagcctggtcaacatggcgagaccctgtctcttaaaaaataaatctgccttggagcttacattttggcaggatgagacaggcaataaagatgtttagtaacgatattgtattagaaggcaataattacgagaaatagtagagcatggatgggacaggaggcttaggagggtgggaagaggtgggttattcagtgtgttcttgacctcctaccacgtagcaagttctgagaatactgtagagaacaagtcattccggtggtagaaattagatcatttcagactaagagccttgggggtggggaggg

SEQ ID NO: 8332 - DNA, 6000 bp, Homo sapiens
ttgtatttttagtagagacggggtttcaccatgttggccaggctggtctccaactcctgacctcaggtgatctgcccgcctccacctcctaaagtgctgagattacaggcgtgacccattgcacctggcctattattattgttatttttgagatggagtctcactgtgtcgcccaaaccggagtgcagtggcgccatctcagctcactgcaagctccacctcctgggttcacgccatcctcctgcctcagcctctggagcagctgggaccacaggcacccgccatgacacctggctaattttttgtatttttagtagagacggggtttcaccgtgttagccaggatggtctcgatctcctgacctcgtgatccaccctcctcggcctcccaaagtgctgagattacaggcgtgagccaccgtgcctggccggcctattattttttatttagagacgtggtcttgctatattgaccaggctggtctttaactcttggcctcaatcaatcctcctacctcagcctcccaaagtgctgggattacaggcgtgagccacagcgcctgtccacccttggcattttgtagacagcagcaatttccctcaaccccagaatatttggaatgttccagaagtcctcatttacagtcgatcccacctgtaccctataagtggtggtcctgggcttgaacttggacctgtctgaactctgagctcttaacccctgaggtgagaacctggggtgagctcttaacccatgggaccaacccctctagagtgaggagacacgtcatcatttttccttgcagtattacatctggaaaccgtgccgtgatgatctctctgcacccctcacaggcggctaacaacatcacaaacaaatcagccagaaccatcactcccgggtggggccccaagtaagccagttccccagggcccagggccctccagggtgaggtccccagcaggtgagattcagtgtggcaaggtctctgggagcaggtcccagcaggtaaagtccccgaccgccgacatcctcagtaggtgcagcctccagcagccaaggtccccagcaggtgaggtccccagcaggtgaggtccccaacaggcgaggtccccagcaggcgaggtccctagcaggcaagtcttctggaggggagaggctcctggcagccgtgaagcccagcgtgtgaggtcccaggtaagagagagggttggccacaaaggactccagcaggtgaggccccaggcagatgaggttcccggcagcccaggcaccatgccggcctctcaggtgaaccaagccgctatgctgcgcaccgtctggtacctggattcctgctgcagtttccagcaggccttgcagaaatccagtgcccagctgaaggagcgaggccgcagcgtctcccgccagcgaaagtagctcaggtagcgggcgtggtccttgtccagctcctgcaggtaccgggccaggtccttggggctctggaagtcgtccacgtggatgaaggcgtcgggtggcaggaacctctcgtagttgcttctgctggggcccagcaccacgggcacggcccaggcctccagggcgttcctccacagcttctcggtgatgtagtcggggtgcaaggagttctcgaaggccaggtagaacttgtaccgggacagcgtctccatcatggtccccttgggcaggggcttgtgggagcgtccgtacacgtccaccttgagatgagcctgcaggctctggtagtagcgcaccctggctgagtccggcttccagttggacaccgcccaggccaccagctcggtcttggccgagaggttgagcggtgggtgggcaggctggccggaccacggctccagccagccgtagggcgtgaagatgtcggagtcgctgcggtaggacatggtgagattgaagtatctgtccagggcttccaggtgctggcagttagggggtggctccaagttgaaccagatccagcgctgcccctgcggcctcggggaaggtgggaggcgtgacttagggttggacatgatatcccagtggtgcacgatgaccatgtctgcctgtgggtacaccttgcggtcggcagtgatgtggcagtcggctgtgccgggcaccatctctgaacagcgggacagagccacagggatgtggaaaggccatgtccgtagcaggatcaggagggtggggcgggtgggagtggtgtcctgtcgggaggacccactgggagccctaggggatccagtggcatcgtctcgggacacacgcaggtaggagaagaaacacacagccaccagcagctgaaatagcagtgcggccagacagcggcgccatggccattgtggcttggctgcacccaggggatccatgggtcagagtatctgggaagagaggagagaggagtgagggtcattgatgacaatctcctgcttaccaaagctccgggccatgagtcctgagaggagctgctattattcctgtttcacagatgagaaaactgagaccaagtgactcacagcaaaaatcagcacagctggtgtttgaacaaagggaccttgtcccagagtccacttccttctacctattagacaagacctttcctggaatccccgaagtcttccccagtctactgaaatacaagtgccctggaggcaggggagaaggcatagccggtcatcattgcttcccatgtcactgaggcaaggcttgaatccatgactcagccagagaaaggtacaatgggactgggttttgcaggtaatatatgagctgaccggccgagcagagtggctcacacctgtagtcccagcactttgggaggccgaggtgagcagatcacctgaggtcaggaatttaagaccagcctggccaacatgatgaaaccccatttctactaaaaatacaaaaattagctgggtgtggtggtgcacacctgtagtcccagctacttgggaggctgaggcacgagaatcacttgaacccaggaggcggaggttgcagtgagccaagatgacaccactgcattccagcctgggtgacagagggagattgtgtctcaaaaataaataaataaataatagccgggtttggtggctcatgcctgtaatcccagcactttgggaggctgaggcaggtggatcacttgaggtcaggagtttgagaccagcctggccaacatggtgaaaccctgtttctaccaaaaatacaaaaataagccgagtgtggtggctcatgcctgtaatcccagctgctcgggaggctgaggcatgagaatcacttgaacctgggaggcagaggttgcagtaagctgagatcatgccactgcactccagcctgggtgacagagcaagattccatctcaaaaataaataaataaataatttttttaaaaaaagaccagcctgggcaacatggcaaaatcccaactctactaaaaatacaaaaatttgccgggcaaggtggcatgcgcctgtagtcccagctacttgggggaattgctttagtctggaagtttgaggctgcagcaagctgtgatcatgccacttaaccccagcctgggtgatggagcaagaccttgtcttaaaaaaataaaataaaaggctgggctcggtggctcacacctgtaatcccagcactttgggaggctgaggtgggcagatcccaaggtcaggagatcgagaccatcctggctaacatggtaaaaccccgtctctactaaaaatacaaaaaattagccaagcgtgatggcgggcgcctgttgtcccagctactactggggaggctgaggcaggagaatggcgtgaacccgggaggcggagcttgcagtgagccgagatagtgccactgcattccagactgggggacagagcgagactccatctcaaaataaataaataaataaataaataaataaataaacataaggtaatacacgaaaaacttttgacttacacaccttaaatggattcactgtatgggttgcgaattatatcccgatgaaactgttttcaaatgacatggtggttgcctgctttctctgttggaccgaactggtctaagccttgcagtgtcgagcggagctccctgtaggtcacctgagtgtgacgaaaagggatcccgacgccaagacctaagttcacaccaaggttctggaaagagactcaaaacacaggccctcaggggacagcctgagcccagagtgggagggaagttgaactttgaccaattactgctttgcacccttgggctctggggcctcaggcacgaggtaaatttttataatgtaactgatattaagatggaattacgtcagccctggatatatggcagcctctcctaggagacaatgaagtctttgtcagtgaccttcaggagggtagattgggggaaacaggtgattggtgggggcgattttcaggcctctgagcccaagctaagccatcatatcccctacgaccggctcatatacgttcaaatggcctgaagcaactgaagatctacaaaagaagtgaaaatagccttagctgatgacattccaccattgtgatctgtttctgccccaccctaactgatcaatatactttgtaatctcccccacccttaagaaggttctttgtaggccgggcacggtggcccaagcctgtaatcctagctctttgggaggccgaggcgggcagatcacgaggtcagaagatcaagaccatcctggctaacacggtgaaaccctgtctctactaaaaatacaaaaaaaaattagctgggcgtagtggcgggcgcctgtggtcccagctactccggaggctgaggcaggagaatggcttgaactcgggaggcggagcttgcagtgagccgagaaagagccactgcactccagcctgggcgacagagccagactccgtctcaaaaaaaaaaaaaaaaaggttctttgtaattctccccacccttgagaatgtactttgtgagatccacccctgcccacagaacattgctcctaactccaccgcctatcccaaaacctataagaaccaatgataatcccactaccctttgatgactctctttttggactcagcccgcctgcacccaggtgaaataaacagcctcgttgctcacacaaagcctgtttggtggtctcttcacacggacgcatgagacatttggtgccgaagacccgggtcagcgggactccttcgggacagcagtcccctgtcctcaccttcactccctgaagagatccacctacaacctcaggtccgcagaccaaccagcccaaggaacatctcactgattttaaattgggtaagtggcctcttttactccttctccaacctctctcactatccctcaacctctttctcctttcaatcttggcaccatccttcaatctctcccttctcttaatttaaattcctttcattttctggtatagacaaaggagacacattttatccgtggacccaaaactctggcgccggtcacggacttgggaaggcagccttcccttggtgtttaatcattgtggggacgactgcctgattattcacccacattccatttgtgtctgatctccgcggggacacctgccttggtcattcacccacatcccttggtggcaagtcaattgcagggacgcctgctttggctgctcaccttaccccttctctccgtgtctctaccccttctctactttcctgaggggcaagcaccccccaccccgtttccattttcctggggggcaagcacctcccatcccttctccactttcctgggggataagcatcccccaccccttctctccgtgtctctacccttctctttaaacttgcctacttcactatgggcaaccttccaccctccattcctccttcctctcccttagcctgtgttctcaagaacttaaaacctcttcaactctcgcctgacctaaaacctaaatgtcttattttcttctgcaatgccgcttgaccccaatacaaaccagacagtggttccaaata

SEQ ID NO: 8333 - DNA, 6000 bp, Homo sapiens
gctaattttttttttttttttgtattttttatagagacagcgtttcgctatgttgcccaggctggtctcaaactcctgacctcaagtgatctgccagcctcggcctcccaaagtgttgggattacaggtgtgagccaccgcacccagcctcccactttgttttaataacacttttgccatgggacatcctacatcattttactattatctttctgtctaaattctgcacccctcccactgcccttaccatgccaggcctgggatccggtcagctccgccccaacccaaaattctctcctctttctaagcttcacccattgaccacagttcctattttctaggattactggaatatagtgactgtgaggattaagagtgcctgtacttcaggctcacagcaagatgtgtgactctgatcactgctggaaatggggaaactgaggggaagccaagaaaagagaacttctcggctgggcgcggggactcacgcctgtaatctcagcactttgggaggctaaggcgggaggatcgcttgagaccaggagttcgagaccagcctgggcaatatagcgatactccgtctctatttaaatattttaaaaatttaaattaaaaaaaagaggaaagaaaagggcccttctcagagttaccggctcaggattccccatgtcctaccacgcacgtcattgcccgagccaccccattcaatctcaaagcgacttcaagcgcacaccgggagggtgtgaaggtggcaggcaacgctcgctgcctgatacagcgattgtcaggtgggcttcagggaaaagtcgtgcagtcccctttccgcgatactcccttccaccgggactccacaccctgtcaacccgatggtcccgacaggcccccgacgtcagggtcctcacctgatttctccactttcaccttcacagggaacatggtttgggtccgggatctggctagctgggtcagaggcgccccaaagggcctagggtcacaagtcaaggcgggagaaggcggggacagttcaaagatgagcttcgtgggccacgggtcctccgcctttggttgtgtccagcctggaccgtggccaccacccttctgtgggcgggccccttcggcagtagcttgttcctattagttattgcagccgtcaatctcgcatcctgaccaattgagagctgcctccgtagtctcccagctttaggtcccacccacctggggctttgcttccggaaacaaaccatctaccccctagcttcctgggaggtgtagttccagcttcccagactcaccctgagtaacagcgcctgcgccgcgcggggcacggtgggaaacaaaggattagggcatcgcgaggcttcccgggacttgtagtgtgagaagggttgagcaacaccaagttagctctttaccggatttaaccaaccgttggggtcccttcatccctaagaggaagactaatgtaaaataacgttgggttccctctcactgagcactcgctaggtgccaggtatctgttaatctctttgcaggtacaacttcattcattttgcaaatatttattagtgtgtcgggcactcttctaggcattggagacaccttgaggaacagaatagacaaaaatccctgcgctaatggagcttatcttttaaaggagggaagataaacagtaaacaagtaaattttaagtgaaatgtaataggagaaagaatatgatctgggcggggcatggtggctcacgcctgtaaatcccagctctttgggaggcctaggcaggcagatcacctgtgaccaggagttcgagaccagcctggccaacatggtgaaacccagtctttactaaaaatacaaaaattagccgggcatggtggcatgcgcctgtaatcccagctattcgagagtttgaggcaggagaatcgcttgaacccgggaggcggaggttgcagtgagccgagatcggacctctgcactccagcctgggtgacagagcaagactccatctagaaaaacaaacagacaacaacaacaaacccctctccccccccaaaaaaaaaacccacaaaaaaagtgtagcctgaaagggacataggaatatcaaggtggtgattgaattttaaataagatggatggtcaaggaaggattctctgagaaagctcttgactatttttatttttgcagacaacacttccttcagaaaacgggaaacttccatttgtcacacgtcttggtccagataaatcccaggaagtagcatcgtgatctacacttctgatgagaatactgcagcccacagtaggaaagttatatttttgaattcacgactaccagtacaggataacagcccctagaaatggaagcactaggccgatcctaccactgcactccagcctggctgacagagcaagactctgtctcaaaaaaaaaaaaaaaaaagaaaaaagaaaaagaaatggaagcactattcctttcttagtttctcatctaatagtttcctgagcaggaaagttcctagttcagaagattatgagtagtatgcactgtaaaaaatgtacatcatgtctaaatactaagcctcgtacaaagctctcaacagatgtttttaaatattaataatcatttatgcctcaacctctaaaagatcccaggaagtcagtatcgaaagttagggtcctttattgggggatgtcagcagagaacgtgggacatgaaaacaagtcttaggagtttgagaaggggctcccaggacaggctcctctgctttaaggagcctgtcctgggagaataagcagggccccagtatgtgcagaagttgtcagggggtgcccaggggtatggtgaaggagaggtagtccccaagggcaccccagcggggccggtagatctggaagatggtgatccaggaggtgagcactatcacccagaagaggaagcccacagctgagcgccagacatctgtcatgggaaacagaagctggaagggttggcctccggctgctctccagacttccctagaccagccttcccttctcacccagagccccaacattttggatcctccattgtcccttcccaccaagattccccgcttccccctctcccctgccactggcctccctcctctgtgctctagactcacagcctttgatttggctctgttctgtgtaggctgggacaaggaaggcctctcggaagaaccagaagatgttgaccaaccagagaaaaggcaggaaagcaaacccccctagggagaaagaaaaacaaacaaacaaaccccaaaacctcataaggcaatgaagatcttctccaactcccaccgagatctatttggaagaaactctcccacacccaagttcaaatggagatttctgttgtcagggactcaggaatctggctcctctttgggatccaggaatctgattcctcaaccatctctttcacaggacccaagagtccaggccctcaatccccctcctctcttgggatccagaaattgaggccccagcttcctcattcctcaggacccaggccctccccactcaaatccaggagtcggcgttcgcaggtccttcatctcttagacttaagaatccaggccccgaggccctcttccctcgggtgctctagtccagtcccctctcttctcctgggaccctagcgatctgccttacccaggtagtacttccggcacaggttcaatttctcctcattggacactcgctccaggttcatagctgcgctggggccgggtcgtcccaagggtctgcggggcaagacccaagccttgaccctaagtaacagatgcaaggatcacgaacaaccacgcccctattagaacaaatcagagataaatgtaaaggtcggtttgctgaaagcagggcatccccacccccactagtaagctggctggattaaagagctctttatatttactagggtgggcgaaacgacccccaactcaccaggagagctcacttcctccggctggggtgccttagctactttcagttatggacgtttgcgcgagacgccccaggtttccctggagattgtagtcttctttgggcgaggcaacactgcacgcatgcgctgttaaaagaactcctaccggggagtctatggggagggcgcgcgcctcccacgcgcaagcgccctggggcgtttccgagcgcttggtaagcgcctggagagggcaacgaactacacttcccagtgctcctaagcaacggaagtgacgtaagagcagccagacctggagggcttgggtaaaaatggctgaatatttagcttcgatattcgggactgagaaggacaagtgagaacgggcgctgggagtggactctcggggggtcggggccggggtactggggtcctgggtggtggggcggtgtttctggggtgcccagcttccccggccctcggttcacctttgtctttgcaccttttccagggttaactgctctttttactttaagatcggggtctgccggcacggggaccggtgctcccggcttcacaacaagccgacattcagccaggtgagacccggcacggagcctcgggggttaacggctccctggcccttccccttctggggccgtcgtcaccatgtcccgcctattccgggttcctgagtccctccccaccgcccggctttttttctcattggacctttctgcaggctcctcccaccggtcttcgtgccgttttcccgggaacttggtcgcgcccccatgcgtacaggctacacacggcggctgttcatctttgccagtcccttccatcccgctgttcatccttgccagtcccctccatcccttttctggtttcttaggggcaaaggatcgccgatgcactcatgatgcttaggctggggtgtaaggttccacccccaaccttcatgcctcactctctgttcatgcagccctgccctctgagctcaggccccgccccttttaaattctgtgcagaccatagtgctgctcaacctgtaccggaatccacagaacacagcccaaactgcagacggatcacactgtgagtaagggaccaggcctgggggcaaggtgaacagcccccagtaggctacactctgattccaccctgcccgcccccaccccaggtcatgtgagtgacgtggaggtgcaggagcactatgatagcttcttcgaggtgagggttggtaggggcagatggggtttcttgtgggagctcagctgagttcctccccgtcttccacaggaggtgttcacagaactgcaggagaagtatggggagattgaagagatgaatgtgtgcgacaaccttggggaccacctcgtgggcaacgtctatgtcaaggtgcttgctgccccccacttagggcccagaagtggaggcgtttcaatgcctgatggtggccactgtaggctctcagcttgaatttcatcactaaatccagtccagccccagagcgggtagtgagtcccctgaagatctctgagttctcctgctgaccctgactgacatttcctgcagttccggagggaggaggatggagagcgggccgtggctgaactcagtaaccgctggttcaacgggcaggctgtgcacggtgagctgtctcctgtcactgacttccgggagtcatgctgtcgccagtatgagatggggtatggtagttcaagggtgggatgggcacttggaatcccagactttgaatgcgtggtaggggctgtcagtgacaatggcttcctccatctctctaccctctatgcagggaatgtacccgaggtggcttctgcaacttcatgcatctgcggcccatttcccagaacctccagaggcagctctatgggcggggacccaggcgcaggtacctcaggaccagcctgctatgtctcctcatgtcctaaggcccctatatcctcagatgagcctaaccctaagccccagtaaccacgttcccaagaatcttttttttttttttttttttttgagatggagcctcactctgttgccca

SEQ ID NO: 8334 - DNA, 6000 bp, Homo sapiens
acaaaaattagccgggcgtggtggcacatgcctgtaatggaagctactcgggaggctggggcaggagaatcgcttgaacccgggaggcggaggttgcaatgagacaagatggcgccactgcactccagcctgggcaatgaacgagaccacatctcaaaaacaaaagacaggccgggtgcgggggctcatgcttataatcccagcactttgggaggtcgaggcaggtggatcaccagaggtcaggagttccagaccagcctggctaacatggtgaaactccgtctctactaaaaatacaaaaattagctgggtgtggtggtgggtgcctgtagtcccagctactcgggaggctgaggcaggagaatggcttgaacccaggaggcagaggttgcagtgagccgagatcgcaccactgtactccagcccgggcaacggaatgagaccatgtctcaaaaaaaaaaggacaggccgggcgcggtggctcacgcctgtaatcccaacactttgggaggccgaggtaggtggatcacctgaggtcaggagtttgagaccagcctgggcaatatggtgaaaccccgtctctactaaaaatataaaaattagccgggtgcagtggtgtacgcccataatcccagctactcgagaggatgaggcagaagaattgcttgagccctggaggcggaggttgcagtgagccaagattgcaccattgcactccagccttggtgacagagaaagactgtgtttcaaaaaagaaaaaaaaaagaaagaaaagaaaaaaagaaagcaccagctcccaagcctatagagaccaggcacgaccttcctgtaagaaaccatgaagcatcttcaaaaatacaaatgactctggatacgattttaaagaccatcgctgcttccagatggaactgaaaaaatccgaataacaccttgaatgaagaaaggagtgttttccactactatcggtgaacaagaaaaatgcctccattcagtaaacacgaagctgaattgtctacacgtgagggtaatttgtgtttagttctctttgccttcaaacagtggggccccagggtttacgaagcatgaaacaagaacagaaaataacggtatcggtcaaaggatgttttctaaataaagctcctctgtaagatcgagacgcacctgcagaatttgagcttcgttggaagcttcacgttccaggttaaaaccaagaaagcacattgcaaacattgtcatcttccaatgcttgcaactgacaacttcaggccatcttctaaatcagtactaagtgttcaaaagccacataaaaggcccacctagaaaggagtagcctttttttttttttttttttgagacagagtctcactctgtggcccaggctggagtgcagtggtgcaatctcagctcactgcaacctctgcctcctgggttcaggtgattctcctgcctcagccccccaagtagctgggattacaggcgtgtgctaccacgcccagttagtttttgtatttttagtacagatggggtttcaccatgttggccaggatggtcttgaattcctgacctcaagtgatccacccacttcggcctcccaaagtgctgagattacaggcgtgagccaccgcacccagccataagtaggcatttctaatgttttctaaaagcagtgagaccttacttctcccctctccgaatgacagcactaaatgacttaaaagcaatcctcaattctgaatgaccccacttcctgcacatcaaaggggagatgaggtcgttaaaggagaaaataaatcagttttgtctataacaagggttccacactggagtatctctgtccctacaggacgctgggtgatatccggagacatctgtggttgtcacaatgcggggagctcctggtgtggagtgggtggaggtcagggatgctgctcggcaccctgcagtgcccagaaggccccaccccagaggacaatcagatcccaaatgtccgcagcgctgggatagagagacccagacgcaccccatgaactgaagttgtaaactcaaaatttcaagcgtataatcacagctcgatgtggttccttacggggtgcccctaatcagaatgacccaggcagccttctcttgaacaggtgcatctgttacttaacgagctttgagactctcctgccaccaggtgtgggcaaagtcttctttcttttcagttttttactcacttttaataatatggaaacaggctccatatttgagactctgtctcaacataataataataataacaataataataagacatatttttgttgttgttgcagtcctttttttttttttcctttatttttttgaggcagagtctctctctgttgcccaggctggagtgcaatggcgtgatcttggctcactgcaacctccacctcctgggttcaagcgattctcctgcttcagcctcccaagtagctgggattacaggcaaacgccactatgcccagctaatttttgatatttttagtagagacaggttttcgctatattggccaggctggtctcaaactcctgacctcaggtgatccacccgcctcggcctcccaaagcgcggggattacaggcatgagccaccacaaccagccatgcaggttattttttaaagcttctgggggtgaccctgatgtgtgctcctaaggttgcaggactagagtcaagttccagtcacttcctttcctctcctctgtgacaacccagtcatcccactcctccatctccaaacccaccaaagaaaaaaactggattgagtccattattctccatgcttcaggtaccctcactatatgctaggaaatagtccatgcatacatcccgtaattcgaccctgagaggcacatgctactgtttttattattcccgctttgcaggggagtaaacaacacctccaaaagatgatacagccaaatccgcagcgagaggctgggtcggaacacacacaggcgcacctcccagaggcccccgacactccatcaaggcaagatcgcagcatcccacgacgggaacaagtttgtgaacttggcatttgcctcgctgacacctagcaaccgtgtgaagacgcttagctggggatccgctgcctctgttcatcaagcctgtcttccaccgcccacctcccaacccctagcaacccccgctccccaggaaaaataaagtgccacccacgtcgctcaatagcaccgtcccaaaaactcccactttagttcctgaaaaattcagtcaccgacaggagcctttctccttcctgaagcgttctccttggcaccctatatcctagaaataaacctcaaaaagtattccgaactcccgtctccttcaactcactgttccccagggggttctgccccgtgcccagttctagagcaaacaattaacatctcccccaaaagtagaggggtgagtcctctccaaattccttttaactggatcctacctgagacacctccccacaccccgttttcctcctgattagtcaatgtctagcaaaacacctgcccccaggtgtctccagcctgggaccttacccccacctcccttctcactaactcaccccaacttccttctccctgaacccccttccaccccacacactcacaagctccccatttcccctgatagcccccagaccctttctggaacaagcctgacccccacctgtatgctccagccactccctggctcaccccagctttgtccttctgccccttttcagctaaccctaacccctgggccgtcaatcacacccccccatcttcaccaaccccattcctcagtcctctccccagacaacctcaacatctaattccctctgcagccccctctccaatgaaccccacttcaaactccatccccagccccctctccagctccctgcaaacctcaaccccactcccagctccctcttcaaagaagctgcacccttgactcaacccctgttccccgctccaattaacctcaacccccaacaccatccccagcgtcctccccagctaactcagatttccaattccacttccagccccctccccagctaacctcgacctacaattccagccccctccccagctagcttggacctccaatcccactccaagccccctcggcagctaacctcgacctgcgactctagccccctccccagcaaactcaagacctccaattccaccaccagccccttcctagctaacctggacctgcaattccagacccctccccagccaactcagacctccaatcccgctccaagctccctccccagctaacctcgacctgcaactccagtcccctccccagataactcagacctccagtctcacccccagccccctcctcagctaactcagacctccaatcccacctccagccccctccccagctaacctggacctgcaactccagcctcctccccagctggccctgatttctaagtggagtcccaatgcccagacccaatccttccccagctaacctcgatctgcaccccctgccccgtccccagctaacctcgacctgcaactcccgccccctccccagctagccctgagccccaagtgcagtcccaatccccaaccccagcccctccccagctaacttcgaccccctaagcgcagccccgtccccaattccaaccccagcctccagttgcagcccgggtccccagacccagcccccctcctcagccgactccgacccccaactcggtccgcagccgaatccgagctgtcccagtcccctctccgggacgccggccgcgccctcacttcccctggcccggttcgcgggcgcccttacctgcgctcgggccccgcggccgcctcagccccgccgcgcagccgaaccctccgccccggcccgcgagcgctcgctcccctctgcgggggcggggccgacactcggggggcgggccctggcgtcccggcaaggccaatcgcgagccccggctgcgggaggccggagcgggggcggggcgcggggcaggcagcggggtaggctgcgcccaggagagtggggcggggctccgggcgcgggcggggccgggggcggggcgaagagcggctttccagggtgacttcgtgacgtcaggaaggcgcgagtagtttcgcgagttcgaatcccgcgctaggtgagctggttcgaatcctgcatgccagctccgggggctcatttgctggggaagaatgtcagtgatcataactgctgcaccgctttcttgaagactttataggctccctctcgtgggaccctccgcataaggccagaaggcgagattactatccacattttacagaggtggaaactgggtctcagaaaggtgaaacctaaggtcatttgcccaagcctgtctcatcatttccaagatttctcagtttcctaactcatggccctggatccacaaattcctgagccccaacacagatggaatgaaccagaatcctatagggaactggaccctgaaatctgtgttttgtttagttttcgttttgtttttgagacagggtatcactcaattgccgtggctggactgcagtggtgcagtcatagctcactgcagctttgaagtcccaggctcaagcagtccttccacctcagccttccgggtagctggggccacaggcacgcaccaccacatccagctaatttttgtattattagtagagacagggtttcaccgttttggccaggctggtctccaactcctgacctcaggtgatccacctttcttggcctcccatagtgctgggattacaggcgtgagccaccgtgcctggccctggctaatttttttttgttagagatggggtcttgctatgttgcccaaactggtcttgaactcctgggctcaagtgattctcctgcctctgcctcccaaaatgcttggattacaggcctggaatcttcattttccacaagctcccttgggaatattggaaaacactttgtatgtctccaaaagcagtacac

SEQ ID NO: 8335 - DNA, 6000 bp, Homo sapiens
gcggagtagacgggcctggaccagaagggacgacccccacctcttcaatttaatgcttaacagagcaggatggagctatgaggaaagacggattccacaagcaggaagctggcactgctcaccacgcctcccaccgcagggaccacggcggacactgcagggctctggcctaggcagaaccacggtcctcccagcagagcccagtccagccgcccgcacctgccatccccaccttcctcctgctcccgcaaagcccagtccagcctcccgcacctgccgtccccacctcctcctgctcccctcccagcagagcccagtccagctgcccgcacctgccatccccaccctcctcctgctcccctcccagcagagtctagtccagccgcccgcacctgccatccccaccctcctcctgctccccctcccagcagagcccagtccagccgcctgcacctgccatccccaccctcctcctgctcccctcccagcagagtctagtccagccgcccacacctgccatccccaccctcctcctgctccccctcccagcagagcccagtccagccgcccgcacctgccatccccaccctcctcctgctccccctcccagcagagcccagtccagccgcccgcacctgccatccccaccttccttctgctcccctgcccagggcccccacccagcagctgacaaagacatctccatctcgccaggatgccagtcaccagagggtctcacagcgatggggcccaggtcccagctgctgtgccacactgcagaccctcagtgtgggcccccaggggagcccggcctgcacagggaggaggggtcccagaagaaaaaccacgtgccagggaccaaggagacccaccccatgccctaggcctgcccgttctcaggagcacccagccctcagccttctggggctgcagggctcctgccaggctgtaaacctcccagacagagagacagccgcaccccctggtccccaggggacctgtcacggaaacaaacaggccacagccatttgcctcatcaggaacaggatggcagccacatgtctgaacggatgctgagctgcgcaccaaacgggccgacaccacaacgccacaagggaaaacagtgcagacgcagctctgccaagctaggactggggaaggacagctctggcttggctaaaggtcccaaaggtccctggtgccagacaccaaccccagcacacaggcacagacgggctctccaacagccgggccctcatcactgaaatcatgcaaagtctccggcctggtctgggagcatctgggtcaaggccctggtgacctcggggtggcagcatggtgaaagcccacggagccccggtccccacaatcgactgggggtctcatagctcttggctaatgctgcttccttcccacagctgccccagccccactccaagcacctcccatgtgacctcccccagagcccaggcagagtcaggagccctttctttccagttctgcccaccagactgcctgcccgtgagagcaccccttagtctggccccggtgccgagcccggagggtgccccttccaacacagccccccagaacccctcctccaggagggatgttatgggtcacggcagaggccaagaatccacagtccggcccaccttctgtgtttgtaaataaagttttattggaacacagccaagcccattcctaaggaagggtctccggctctggaagaacaacaggagaaaccaagcaaccaaaccagaggccacgtgggccacagagcccagcaaaactactgtctagcccttcccagaaaacacttgccaagctctgttctatgggatcagggactctggtgaaaagtgtcttttgtgtaaaatgggaactgatagaactgcttctctgcttctctctaaaagggtcatttaaaagcacaaaagcacattcatgcattttcctctccacaattcgcaaaactggttttccattaaaaaaacaagcctgtgcctctatcaaaggccagagaacgcggcatctcaccgggaagagtttcctcacctgctgagttaaaggaacggggaacaattcttccaaaggccacagctctaagagggccctgagttctagacaggcccaccgaaatttggaggagcagaaaaagctcaggctacaaggacaggctcaaagcccaagcctcgacctccaaatccttcacaattgcagcacaaacgctttgcaaccgcacacaggttcagaaactactaggcttagaaaccccgcttccaagtgactgtgaaagcatccacatcaagggcctttgaaacaggccagtgagtccaggcggggagagcctcccttctgggaagactgaggagttccaggagccgggccgggtccagccagggccaccagctccagctcagatctgctgaggagcgggctccgtggggtgggggaagggaggtgtctcactggggaggtcgacttccttgctcagggtcacagaatggtagcaagcaagcgagttgaggactgtcaccaaccaggctcctgccctgagagcaagtctcattcttgggcaatcggactcaaatttccactgccgcgaagcactgcccccctccagggacaggcgtctcagggtgtatttacaaccagggttctggaaggggcaggaacacctgctctctcacgtccctctgacacatcctttgactccccaccctccggataaagctcacactcctcagcccgcccaggttaaagtccacgcaccccagcaccaagcgccttccacggcctggcttccaccagacaacctgtcatccagactaggaggctgaatgctctgccttcactctctgcctggggccactcgcaccactgccccctcctctgtgcccctgctccagcaaccctccacggcccaccccccgggcctccttggtggtgacatctttcagggtgtaaacccttccttccagcattattccaccctacactccagccacagcccaccccttgccaaccccaaataacctgccagctctcacacctcccagcccccgcttatgctgcttctggtgcttccaacacccttcccctcctgccgacccggcaaactcctactcatcattcagaacacctgcctcggggccgggcacggtggctcacgcctgtcatcccagcactttgggtggccgaagcaggtggatcacctgaggtctgaagttcgagaccagcctgaccaacatggtgaaacctcgtctctactaaaaaaaaaaaaaaaaaaatttagccaggagtggtggcatgcacctgtaatcccagctattcgggaggctgaggtgggagaattgcttgaaccgggaggcagaggttgcagtgagcctagatcatgccactgcactccagcctgggcgacagagcgagactccgtctcaaaaaaaaaaaatagatctgcttcggaaaagccttcccaggcaaactgagtccctctctccacagagttctgtgatctttcttccacctctggctttccccctccttccaaatgtctggggagctctaggtgcctggctgcagaatggggggagtccaaagggggctgacagagcagctgggggtaggactggggttctcagaaagcttccgagggggcccgacagccttgcagagaccaggggcatctcagggtaagagaaaagactagagagtgaagcgactgcaatgagctgcaggcttccccagcagccaggtcacaactggacggcgcactcatctggatgcgacacggtctgacatactttgaaagggtcacccctgctgtgtcgaggatggactggggatgtggtggacaaaggcagccacagcagagggatagcggtggggctggaggagtggagactgaggagccaggtggcggcgacgccttaagagtgagaactctgagggggtagtgaaggttaagggctgcatttgtggggctgctccaggttccattgcctgagccaccgaactcaggagagagggaagatttggaattaagaaaataaaagatgcagttatgacagtgcgatctcgtagactgtccccactagaacctgacactctttacatcaaatgacacacaatgaacataatgaaggcctgttggccctgggcgctggtcaccctggacagaacctccagaatccacaccatagtcggtcctccttctgcacacgaattccatcgtccaaggtcacggagtaaaagatggagcggggatccgaccccagtgcagggctggactcctggccgctccaggatgctgccagttactgggggacgcgcgggacgcctctgggttcccccaccgcaccccctagggtgaggttagcttagcaccgtgcccgttccgcctaaggggaaactgaggctcggagaggggtgggcagccgcctgctcaaggccacagagccggagagaggcgtccccggcggcaactggagaccccgaaacggagaagcagaaccggaggatggagggggcacaaatttcagacccggtgggaagtgagtggcgctgcagcggcggagggcctccgaggcggggaaaggagaggagccggggacagacccgcaaggtcacggccgagccccggcaccgccggccgacaacgcggggacggcggatccccgaggctggacccccaagacgggccgagcggggtcgttcctgcgcgtagcccggggacagagaggccgaagggccgcagcccgcggtgccgtcgggaccggtgccgcgctcacctgggccgcgaggagcagaaaggccgccaaaagccgcgccagcgcagccgccaccgctgccgccatgtcggccggtgcccgccgcaaccaacggcagatgtttcccagcaacgccccgagaccccgggccacgcatgcgccgcgcatgcgcgtgggggaggtcaaagggcgcggggcggtgcctgcgaagagccacacggcgcgacaagatggcggtgagcgcgcggcggaatctggagccggggggcgtggagctcgggccgcgctccaggtctcatgcgctctgctttccccgcaggataaggagaagaagaaaaaggagagcatcttggacttgtccaagtacatcgacaagacgatccgggtaaagttccagggaggccgcgaaggtgaggaggctcccgctgtcggtaccccctctttaaaaatttcaaataaacccagcaacagagatgatgaggacgcatgcggaagcacctcttttatttattttcattattttttttgagacgcagtctcgctctgtcacccgggctggagtgcagtggtgcgatctcagctcactgcaacctccgcctcccaggttcaagtgattcttgtgcctcagcctcccgagtagctggaattaatgtgtaccaccacgcccggctaatatttgtatttttagtagagaggccatgttggccaggatggtctcaaactcctggcctcaagcgatctgcctgcctcagccccctaaattgctgggatttcaggcatgagccaccatgcccagcctagcatttttgactgggcaagtgagctgccttctcctagcctccgtttcctcatttgtcaaatggggctggtaactccacccacttcacagggggtggtgagaatgaatggttacaggcatgtaatgtaattgaggcagctctcagcaggaagtaagcagtcagacaacacgtcacttattcaatagcctcttggatctttggtttcttttttttgtaagacggggacccaaacctctttgtccctggattgtagacaactgggtggcatgagagttattaaaaatcacagtgccccagccggacggggcggctcacgtgtgtaatcccagcaatttgggagtctgaagcaggagggtggcttcaccctagggtttgaggctgcagtgagctatgaccgcaccactgcactccagcctgggccacagagc

SEQ ID NO: 8336 - DNA, 6000 bp, Homo sapiens
aactgtgtgagtcactttcctttataaattaccgagtctggggcagttgtttatggcagtgtgaaaacgaactaatacaggtacacactgtctctgtaaagtgacatcgttcagacacttcgtggcttttcatataagcacacccttgatgacctgggcagtttcacaagtgtcctttcttttggttttgagacagagtctcactctgtcgccgaagctgcagtgcagtggcatcgtgttggctcactgcaacctccgtctcctgggttcaagcaattctcctgcctcagcctcccaagtagctgggattacaggtgcccaccaccacgcctggctaattgttatatttttagtagagacggggtttcaccatgttggccaggctggtctcgaactcctgacctcaggtgatccacccacttcggcctcccaaagtgctgggatcacaggcgtgagccaccacgcccagtctcaagagtgttcttaaagtgaacacaaagatggaaacaccttgatttgcaagatttagtagggttttctgggtcaaatgaatagcgaaccattttcacagatcatctcaagccacttaggagaagacccccatctgctgtttcacttccatcctaggttcctcttcaccctgaagtttggtcattagaaccagtgagccaataacttgcttccttacctcctgttgttcagccaggatgtcttggcacctgtgtgcaagctgctggggctcagaaaattatacctcaaagtatggtgcttcggtgtgctgagcacttttaaatgaaaggaagttggaaggccttagaagcggtctcagaaccaaagactttctagccttctcttgtttcttcccccaactgtgcagggaggggatctctctgaagttccctccagaaggaacactttgacccccttcctaggaatctcatcaaataagcggaaagattaaccacgggagaagagaaaagaataaaagttgctaccacacccaggcagacttttcatctgttcttctgagggccactccaagagattaccggggagactttgcctgcaaaataaggcaacctttgttcaccgtgaagttctgccctcaccttcctgcaagttggcattgcctcccctggagctcagaggaacttcatcccaggctattgtctgctttttaggctcattcatttcccctaaaaataatttattatgcctcaaaattgcctatgttcccccacctccctctcccctatgaagagggtgctatttaagctccagccatctggcccttctttgagcctcatattttgtatggctcctgtgcatacttgcacattcatacatttgcatgcctttaatctgtctagtatcggttcatttcagtgaaccttcagagggtggaggggaagccctcagcgaggttgctgtgaagaggagggagacagaaagcaaggaatccagagtgagagagagagaggaagctgagggagccacgacagcacagacagaggggaggggtgaggaatcgagtagttttctgggaaggggggcctgcagtgctttaggcagagggaacaacatgtgcaaatatctggaggtaagaaagaatagcctggacttcgttttgttttgttttgagatagagtctctctgttgccctggctggagtgcagtggctccatctcagctcactgtgacctccgcctcctaggttcaagtgattctcccgcctcagcctcctgagcaggcacacaccaccaagcccgggtaatttttatatttttagtagagatggggtttcaccatgttgcctgggctgatctcaaattcctaggctcaagtgacccacaagccttggcctcccaaagtgctgggattgcaggcatgagccacagcacctgaccaaatagcctgtacttctacagagctggatccctaaagcaggcacatgtggagacgggaagtggaggcagaccctgaccctgcagtcctgtttaggagtttggttccgtgttttgttgtggttcaattcaaggcaagttgagtgtgaccagcacctctgggaactgtacctttggatctcttgaggaagccaaggtgtgctggaactgtcagcaccagcctgcagctggtcagccaggtctgtgtctggccatgtgagaatttccccagggcagggtgcttccctcagagaccggagtagctggagagacaatggatttcaacaacagagtgaagctagaacaaaagcttccagacacaggtggggaaaactcctgtccatccttcacaagaccctatacaatctggccccttcccccacctccccaacgtcatttccacttctccctgcctccccgacctccctgctccaacttcaaatgtgccaggcccgctcctgcctcagggcctctgcccttgtctcccctctgcctggaatgctctttccccggatttccacttggttcacttcctctttgctccatcgtcaccttctcagtgtaggctgtccttggccacactgttgagaaatgcatctgccccctatacccagcccttcccatcccttgtcccactgctgccctgcttatcatcctggatgctctataatgacttattccttgtttattggctgtgcctctcactagaatataagagcaggcatttttatccattgtgatttctctagggcccagaacagagcctggcacatatcagatgttcaataaatgtgtgctaataaatgaagggttggtggtagggatgtggcaggtttgtgtgaagcactgcccccacaccgtggtcaccatgaggtccgtgacaaatgataataccagcaacagaccttctccccaggtctagtcctactggggtttacagtaccctcaataatgacctcaacagctgccacccagctacactcttcccttggttctagtttaatccctgaggactgagctctgccctcatgcttttgaacagctgggatttctgaacactgtccccattcaggctgcctatacctcactcatgcattaattcactgcatgcctcctgggccaggccctgtaggatggtctgcagccacagagatgagatggtcacagccccttgcgcctctccctagtgtggctcacccctgaggtctgagcttgcccacagactcagggcagctgcacaccttttgttgggtaaatcaaacagtcctaggtttcaggccaggctgggccatgcttgcagtgggcccctgcagagccagtccccttcttttgctgctgaggcttcccaaggccacacagctggatgggggcaatgccaggactcaaagcaagatgcacggtcaaggccactgccatttgtgctatacaccacatcaactctgtaaatccactctcaaaagaggatcaactgtgtacaatttaccaccccagggtgctgtgaagttcaaaaaaataacatatatgagagtgtttacaaactgataaatatgtcttacaaatctggacttttccccagagccttgcgctgtggcttgtacatagcgggtgctcacaaaatgcttttgggttggattctcagcccgcaggcctccctccatggcgcttcctccccacctctctgcccttgctccatctcccatatcccccacccactcaccagtcactgagcactccagcggaccaggtgcccagccaggtgcccaggatgcaagaaggaaggccaggccctgcctgtgagacattcacagcccagttgggagagacagacaaggaagcagacaaaatgcagtgtgaaaagtgcatggcagagtgtgccaggctgccatgggaacagaggggagggctcgtaaccacaagaatgaaaacagctccttacatctgtgcattgctttctgcttttcaaagggctgggtgtgaaaggtgggggagggatagagaatgaagacatggcgttttcccagtcccatttgtccacattccggggctgtcaccttcgttgagcttatgctctttcaatggaaaggacacagagagactctttcctacccagaaatgaaggatttttagcagctgtgttgcacaatcattgcccgatgtttgtttttcagaagggctttgccgtatccgctgacactgagctgtaaagacccaagcattaaaaatttgcagcgctgcctcccaggagcagaattctcacctctgcttaatgagccactccacacgtccttctagcttagtgcccaaatgacatgaattgtccaaatagagtgagtgagcccttgtggtggtttggctcctaagtgtggcatataagcaggctggggtaggtgatgctgtggtagcaactcccaaatctgggccttaaaagtacagaggcttatttattgccctgacacaagcacatgatgcagtgggctctgctccccgccaccctcaccgggggcccaaggtctggggccccatcaggggcgtgtacgacagagaagggcaccttggctctcaaatgctttcgcggggaagtgaccctgcgcatatgaaatccaccggccagagcagtcatgtggccacacctaccttcaaaggggccaggaggaggatggggacagtgcccggccaacagcactgttgcacacacagggtccagggcagagcccgctcctgcactaaactccagccctgctgtctctgaggggccctaaggccctactaagagctgacccactctccccacacctctgcttcagatatgctgagaatctggtgggggcagtgagttaacatcacccttatttaggctggacttccaaatgctgcctgaggggtgtgtgtgtgtgggtgtgtgtgtgtgaggtgaggtgagtggtgtgtgtggaggtatagtgtgtgtgtgtgtgtgtgtgtggtataccacacaggtgtagtatgttgcacatgtgtggtaagtgtgatatgtatgtggtatgtgtttgtgttgtgtgtgcatggtatgttgtgtgtggtgtgtttgtgtgttgtgtggcacgttgcatgtgtgtggtacgtgcaatgtgcgtggcatgtggtgcatgtggtatgtgtttgtgtgtgccatgtgtgtggtgtgtatgttgtgtgtgtatgttgcatgtgcgtgatgtgtgtggtatgtgtcatatgtgtggtatgtgtaatgtgtatgcgtatgtggtgtgtggtgtatgtggtatgtgtttgtgtgtggtatgttgcatgtgtgtgtggcttgtgtgatgtgtgtggcatgtgtgatgtgtatgtgatgtgtggtgtatgtggtatgtttgtgtgttgtgtttgtggcatgtgatgtgtgtggtgtgatgtgtatgtggtatgtttgtgtgtgatatgtgtgatgtgtatgtgtgtcttctgtgactgcagctggtgggcagcggtcatgtgggtgggtcacgtggcacccacaggagccctttgcttcaggtgtggctgaggcctttttcctcaggctgcatgggcttgagaggctctgcccccaggtatttagagaatgtcagcctcagtgttggcttccctaaaagtagtgaatcttgacctctaggacacacacgggtcagctcagagagaagcttgtgcagacagcagcctctggatcttgcctgtggacggtctgagtggctcccaggccagcctgagactgcatttaacaagggccaggtggtgcagacgctccttctccaaaacctgacccaacttcactccgcatcttcctctcggaggaagttttaggagagaccgatctttagcaatgaggcctctggccagctctgtcatacaaggacagaacagtgaccgcatgactgagatgcccattcagggctcctgggtgccctgtgtgctactgcgtcaaacccactccccaaaagcaccctactacagggtggggcaccccagggtctccaggggggctttgctgctccacaaaagggtgctgctgtggcccctacctcctcactgc

SEQ ID NO: 8337 - DNA, 6000 bp, Homo sapiens
aaagatcattctggcttcactataggatctagaagggggccagggtagttacatagattcctgttgaggaaaaaaaaggcaaaattcccccactctgtaagtattggcgataatttcaccaagatatataaacttcgatgttataatttctaacctctcaacctgtacaaagtaatagtggattctacaaggatattcagtgaaaacagagataaattcacaaataaaaatacgttaatgaagctacaaaaaaggacttagtggttgtttaaagacgagagagtgaaaatgtggtaaaagtcaggaatattccagatttacagacagcctaagtgccatttgagcatcctggaacaaaagctaatttagaggaatgagcgtatttagccctatgattcatagaaaagaaaacaagatatttcctggccctcacaggattaaatgtttgaatccaaattttatagaaaaattgagcctgtttaagaagtaactgctacaatactgattttatagataatataaactataaaaaaaagaacatcagtattagctgaagtggtcagaaaaggaaaattataaaagttatgtcatttgaactgtgccttgatggagcagtaggctttggaatggtagactgagtgacggggcaatgggcagttatgcttaactgaagtgagagcttccttcagaaagctgaggaaaatgttaagaatgagcagtcttggcagattctggatagcctggaataccagaaatagaggcttggacttaatatagtagatattgtgaaatgattgtaaaaagaaattagatgttcctgctgattattgtaaatgataggctagagttgactgacagattaaactgaggacagagaatgtcaacagtacatccatgacaggattccaagcataaattaacttagctctggaccacagatgtcttaatggaaatggacaggaagaataattatttttaaaatatattatgaattatttcaaataactcaataataatacagaagataatcagtgttcatatacccaccacccagctctattaactcttagtagcacataagagtttttcaaagagcatctataactggcattccctgtttgcctatctcaaagtgcaactactattgtaaattcagtgtttatcaattccataaatctatatttttagcatatttaaatataagtactataatttgtcattttgctggttgttatactttatagaaatggcagcaaacagtacattttattttgtaacttactctttacactcaatactatttttccgacatttggccatgtcaataaatgatgcttgcacttcttaaacaatgtattgattttaatgttacaattataatatgagttagatttacattctttagtgacaggaatttaggatggtttcagttttggctagtgaaagcatggctccacaaaaattcttatatcttcctaggcacaaatcttattcactttttctatgtatgtcccaagaagtaaaatttgatgattgtatgataaaagcatcttcacgtttattagctattgctaacattctccaaaatagtgatttctgtctgcaccaactgcatgcatatgttagttgatctccttatctctgtcaatattggttttgtcaatttttgccaatcaaatagacattaaatggtttataattgccattttaactttcatttctaggattacaagggtatcggccatattttccttattaggcttcttcctttagaaattgtttgttcatgtattttgcatattttctattgtattgtcttcttttttatttgtaggagtcctttattcctaaccattccagttaatgtatgttggaaaaactactcttatttcggagcttttgtttccgtcttaatagtatcttttttgagcatgtttttaaaatgtgattaaatgtatgtattttcttaattgtttgtatttttaatcttatttaagaaattctatattatttagaagttttaaataaaatttaccttttcacattcaggacgttaatttatctgaaaatcatatcagtgtgtgctatgaagaagacatccaattttatagtatttttctattttcttgtcaatatgtataaaataatttattatttctctctttatttgtaatgcctactcttctaaatatgaaatcatcctaaatgtgtagaacttcttgtacatcctgtgttttgtgtcattgggtgtatttttgctaatttcacagttccaattattatggatctctggaagtctaggtatctggtaaatcaagcctggctaccttattattcatcaaaattgctatgcctgtgttttctatttcattatacctatgaattatagggtcagcatttctaatttcaccaaaaaacttgttagtaaatgcaattaaatcaaatttatatattaatttaatgaaaattgatattttgatgttactaatattatccagtctttgaacaggtacagttcttttcatttatttagtttttttaataccttccattattattttgcaattttatcctaaaggtttgaacatttttattcaggtttgtttctggataacaaactttttattgctactgtaaactgaagcttattccctacattttctaattaattttgtcactggtatatagctttgttactggtatatagaatttttatatgttgagtttttatcctaaaacctaagtcctaaaatcttaccagagtgtatcaactctctaataagttctaagagtatgacaattattttgaatattctatgtaagtaatcatatcatatgcaaataagaggttctgtatcttcatttacaactgtattttatattttgaagaaaaattagtaataatttctgtatttaatagctcatttttaatgtttacctttattgtggtacatagggcttatttctactctctcagtttgtgttttctttttactttcctttatctctgcttatcttagattgttcttttttaacgtcattttctccctctgtagcagttagtctctaagatgacttccaacgatccttctttctgtgtttatacctttatggaatcacttatccttcattgtcttcgagtaaatagaacatggcaaaagtaatagacatcacttccaagaataggttatacctgcgtaaacagactggcttaaatcacaaatgagctcccattcacaattgccacaaaaagaataaaatgcctaggattacaactaacaaaagaagtgaaggccatcaccaagaactgtaaaccactgctcaaagaaatcagagatgacacaaataaatggaataatattccatctcatggataggaagaatcagtatggttaaaatggccatgctgcccaaagcaatttatatattcagtgtcattcccattaaactaccattgacattcttcaaaaattagaaaaaaaactattttaaaattcatatggaaccaaaaattgcccaaatagccaaggcgaccccaagcaaaaacaagaaagctgaaggcatcatgctactcaacttcaaactatagagggctacagtaaccaaaccagcatggtactgttacaagaacagacacatagaccaatggaacagaactgagagcctggaaataacgccatacacctacaaccatctgatctttgacaaacctgacaagaacaagcaacagggaaaggactctgtatttaataaatggtgctgggagaactacctagctatatgcagaaaattgaaactagaccccttccttacaccatatacaaaaatcaactcaagatggattaaaggtgtaaacataaaacccaaaactataataaccctagaataaaatttaggcaataccatttaggacataggaatggacaaagatttcatgaagaagatgccaaaagcaactgcaacaaaagaaaaaattgaaaaatgagatctaattaaattaaagagctttggcacagaaaaagaagctgtcaacagagtaaacagacaacctacagaatggaagaaaagttttgcaatctatgcatctaacaaagctctaatatccagaatctataagaaacttaaacaaatttacaagaaaaaaaatcccattaaaaagtgggcaaaggacataaatagataattctgaaaagaagacatacatgtagccaacaaaaatatgaagaaaactcaacatcactgatcattagagaaatgcaaatcaaaactgcaatgaggtaccatctcacaccagtcagaatggctgttataaaaagttgaaagacaacagatgctggtgagattgtggagagaaaggaacgcttctacactgttggtggaagcataaattagttcaaccatcttagaagacaatgtggcgattcctcaaagacctagaggcagaaacaccatttgaccaagcaatcccattactgggtatacacccaaaggaatataaatcattctattataaagacacatgcatgtatgttaattgcagtaccattcactatagcaaagacaaggaatcaacctaaatccccatcaatgatagactggataaagaaaatatggtacatatgcaccatggactactatgcagccatgaaaaggaacgagatcgtgtcctttgcagggacatggatggagctggaagccactgtcttcagcaaactaacgcaggaacagaaaatcaaataccacatgctctcacttataagtgggagttgaatgatgagaacacatggaaacatgggggtgaacaacatacactggggcctgtcagagggtgggcacgggagaggaggaaaagcatcaggaagaatagttagtggatgctgggcttaataccaaggtgatgagatgatctgtgcagcaaaccaccaaagcacacatttacctatgtaacaaacctgcacattctgcacatgcacccctgaacttaagagttggaaataaagagagagagactgacctctgtcttggaagtgctctctcactcatttttggattgctcattttgggggaagctagttactgtatcacaaggtagcccagttgagaggcctggctaggtgagtaagtttaaaagcatcttctgaagtctgctatagccatgtgagtgagtttagaagcagatcagattcatcaaagatgtggacaagagtagagattgttgacatgaacatagttgacataatgatctttgggtttggactgggttggaagtaaaatgatgacagaatactccagatatttaaagaactggaatctaaaagactttttaaagagaacaggaagtaccaagtgagcaaaaataataaaggcaatccacacccaagagcaggttcaaagacgttaaagtatatatggagatgtgatgtgaaaagttgggaaagagcttttatttaccaagagaaggatctggctgtatagactaagaggaaggttatgtcatgcaaaatacgatactggtcactgcaaatcaaaacgttgacatagtcaaagttatttagctgtttaagtaaaggctttatgtaaatgaagaaaaaaacaggatctctgccttttttttttttcttgagagaaagtctcattccatcgcccaggctgaagtgcagtggcaccatcttggctcactgcagcctcgacctttctaacccaagtgatcctcccacctcagcctcctgagtaggtgggattacagccacgtgccaccatgctgggctaatttttgtactttttgtagagatggggcttcactatattgcccaggctggtcatgaactcctgggctcaagcaatccacctacttcgacctcccaaagtgccaggattacaggtgtaagccacaatgcctggccaggatttctgcttttctgcattttgtgataaatgaaaaagcaacaagatgttttgcttattctttacttaacgttttatacccaaatcatttccaca

SEQ ID NO: 8338 - DNA, 6000 bp, Homo sapiens
tcccaaagtgctgggattacaggcgtgagccagggtgcctggccccaattccccatttgggcatttatgtctctctcctacttatcccttcttatgtcctgaattagaggaattactgaattctgctcactataaaggtttctgagcattctcctttaaatcttctataaagctcccatcattctttttgagcaaagcctaaaaaaatagatcatattaggtaagaggtggtcctattctccactaagccatatatcaaaatatggagaacagagacctaaaagctgatttactcaatgtcacaaaaatgtcagctcctaaagaaacaaggaatcattctatctggcttcattaatttcttcaataaaccaatttactgagttgactatatacacaatgaggatgctggggaaacaaagatgattaaagtgatagacccagctcttaaggagttatcagtttggtccagcacagctctggggcttcaggaccaaagtggtcccaagtaggccacaggacaggtggcagtgtgtaattaactacagtgacctgtaaaaagaccaaccaggtcttcttactgagttggacacaacattccatttcttctaaatgcttaaacaatgtcctaattccaaatcactccaaacagcctgtctctctgaggacatatgcaatatatttgggaatgagaacagagtatcagcaagatttaatttattcctttttcaaatttctcttcccatcatcctcgcccaccccaactggcactgcttgcttactgagtttcactcccccccatggaaccacagctccccgcaatatacactggctgtggcacggagccagcacacacttaaatccaacagcaatttgcatctgacagaatttcctcaattttggactccagactccagctaagttgacaggcctagcttctcagttatgaaacggttcttggtgtgtacactaacgaaagaattaaattaatttgtctgattacttttgctttgagggtctgggtaagaatttccaaatgaaaaggcaatgctgttgatcagacctgtgcatgaggttatttgcagtgttgggcatagcttttaagtcagtcacattctcttagtttgtgggctgctgggaagacaatttaccaataattattattttgtgacaatctatgagttgtttcaataagccacttcccagaagtgtgtaggaaaaaattaaaaagcaatctgtttggaatgaaccttaggctttgtcaaactgcctccaaattaaaaggttatgatcaaatgtattcttaaacagtttagatgacaacactgctttacccaaaagaaagctgatacttttagtaggaggccactggtgagaagatccagcaggatgatctgagaggaatcattaaaaaaaaaaaaaatcaacttcaaatggaaaattaatgcaactatattctgaagtatatgccacagaactatttttaagaccatctcatgctttcattttcagaagctggaacagtgctaatagaactttgcaataatggaaatgttccatgtctgtgctaaatacaacagctaccagccacatgtggcaaatgagcaccagaaatgtggctagtgtgaccgaggaactcaattttatttcaacttaatttttacttaaatttagccagccactttgtatggctatcttattggacatcacagagatggaagatgcactctggaaaaggctgctccgaactgtaatttcccccatcggtttattctgagaagtgcaaaaagtagggtggagctgacctctcctagcaggttcccacaccagcaaagcctttcaaatctccagggtttctcctccaaactactccctttaatgtctttctctgatctccaccccaacacctttcaccccttagcacctccctaacttggctaataggctctcagagaggcccctttttttctgttgctgcctgggctgagcactggtagaatcccatacatgtttatgataaccacactaggcaaactctgctgtaagttctggaataggcatgcaccttgccttaccttactggaatgtctgataatttacatttgcttcattcgggcttctactgggtgatacatctgtaatcccaggagagccctgcctaccaggcacaatatcatggtctctttttttttaaagattttcaaagtttcaaattttcagcagaatgttttgagcctgcttattgaaaaccacatctcaaagggggagatgggccagaataaaagcctagatttatacacacatacacccgcacatgtgcacaagcatacacaccagtgcaccccctatacagcttccctacaatgcatatctttgtaaaaaatgtcctgaggaaaggagcagtgctgtaatcccagcactttgggaggccgaggcgggcgggtcacttgaggccaggagtttgagaccagcctggccaacatggtgaaaccccatctctactaaaaatacaaatattagccaggtgtggtagcacgtgcttgtaatcccagctacttgggaagccgagacatgagactcacttgagcctgggagggcgaggttgcagtgagcagagatcgcgccactgcattccagccagtgagagactctgtctcggaaaaaaaaaaaaaagtcctggaagttctaacttatgtcttccagacttgagggcctatttaatccctccgaaatggttagcttctctttttaagaataattttctaaaagaaaaagaaagaactgaagttccgaataatgggccacattttggaatcacaagtcattaatacacaaatagatgagaatgtactcctatgttaaaagacatgcctctacttgaaaatacacagccatttatcttgtagatcagcttataaccgcccaggtctcattctttgctagtctggacctgagaatgcattaagatcagttatgaaaatgcagaagttaattcaacttcctcctatgtgttacactgctcagaaaaaagtatacagcaatcacccaaaataagactctgggctgattcatttgaatatttaaaatgcaaagaaactggtaagagaggctaagacaagaaagaagcaagtcagcctcaaatataaccaactgcagcccctggcaggaaacagtactgctcactacacgtattacttcaaggaaagtagtgctttgttttacagataaaatctgtggccttataaaggagacaggacatactatatattcaatttaaatggcagttaatactttctaatgcctccaagccacaagtacattatgaccacttaaaaattcccctctaccaatcttctcccatctgtggatctgcaagcactttcctattactagttcccagttcaccagaaacggtctgcacttattaactgtgaaacccagatgtgaagccccatgctcatacatagggaaatgaggcaaagggactggccacaggccaccaaaaattagaacccaaaatccttagctcatgttttaaatattatactagaaaagcaaagcagctttggaggagcagattgtcttctactgattcttgtgtttggcagagaggctgccttggaaagatgccctaagcccatcttttaaaaagtccaatcgtaaagacaggttatctaagaactttatagattctggagtctttgaagtgtgtaactgggccagggctaccacagaagaaatcacagacctagggtcttgatgtaagaatttacaagataaccagataaaggctagtgggtgaggagagagcattagaacctcaaaggagagataaggaaggggtgtggagcgagggacaattggctttgctttaaaaatatgtaacaaaatggcccagtgtctctcacagaagggttcggggaagggaaaccagagatcgcgtttttccggctctaagactgggtcggcttttagtcttctcttctgctccttttaaaggagatgggggtggggaacgagaatgctggtggcgatgtgggcctgcatctccttccctcctccagtcctgggaattcctgaaaactccttccaacccaattccaaacaggctctctctgggttcagaacaatgccggggaatttcacgcagggaaggggtccccttctcgccccagagggcagggggctactccggagcgagttccggctccagggtcccccacgtcccacaggtctcctgccctttggcacgcacagccctcaccactcgctgcttccgcatccctcctctgagcctctccccacgcatctctgcccctcgcccggccgcgcccaatcgcctcccacgtctaccccgctggggcagcccctacaccctgccaggcaccccatttctctcctccaggtctgggggactggacaacattggggattagctggggtcaactctgcttcccccgccacccccggccccgggcgcgcgctcacccggcggccgcgttctcgaacttgagcgcgagcgtctcctcgatgatgcggttgttcacctccagcaggatcatggcggcggctgcccccaggggaaggagaaacaagggccggtgagggtgggtaagggaggcaaggacggagggagcggccctgctgccccctgagtggggctgggtggggtaggaggttaggggagaaggggagaggggccggggtggagggaagggtaagacgaacgcgctggcccacgcacgcagactgtggagacacccacccacccaaccgacctggcccccgaagcctgaacccgcctgccgagccgccgccgccgccgccactgccgcttcaccgacaagcccggtccccgcccagcccccggctctagccggccacttccgctctcacacccacttccgctcgccgcctggacgcgcggccccgcggcgccatttccgcttcaaccactcgtgaacgcgagcgcaggcgcgccggaggaaacggaggctgcgcttgcgtatgtgtgatgccgccgccccaccgtctactttcccaccgaccccgcttacgtctaccgcctaccagtgcgtcccccgcggagctgtcattccccgaggcttgcctgactgttcagcttctctctcccgcttgtcccagagatccaactccattcttccggtcttgtcatttcagaaacctcgcaagaagctcgcccttgtcgtctcccagcgggcttcttagctcccagcttgtttgatgggggtgcctctttttctttccaggtatagctgtccagcgacaccatcatgcattcatttctccaacaaacattttcatgggctcttgctctatactggggatgtagtggtaaatgaaatggacgaggccctgccctcgtggaacttacagtctggcaaaggaaacagacaataaaattctcagttgtctaaggaggcagagatgcatggggagaggatcagagtagggatgcggaagcagcgagtggtcaggagtgtgcgtgccaaaaggcaggagacctgtgggacgtgggggcagctggggccggaacttgcgctggaggaacaccccttgcctgctggggcgagaagaggaccctttccttgggtgaaattccccatattgttaaaaggacaattaaagaaatgaaagagaggtcacctgggtgaataggcaacttagatgggcctccctgtgttcctgtcatgcctccaattctgcgtccaggtgtccggaacacatttttttctgcctttgaaaccttccagtacctctggcagagatataccataccctccttgttacctgcgtgcggaatcttaactcatcgttgtgctacatctgcaccttctgcctttgtgccttgttttgtgttttccctcctccggggagaatataataaacttagctgagtccgttctacatacaaggaaataatttattttctgctatgtgtttggggatggggataaaaaaatgaacaagaaactagctcct

SEQ ID NO: 8339 - DNA, 6000 bp, Homo sapiens
tttctacatgatagagaatgcttacctagagctgtcctgagaaggcatcaatacatgtctttgatgctccctctggaaaacgcagccacccctaacagtgccacacatgaaagactagagactgtcccctttatctttgggcttccctcctgtgtaggcattaaaggtttaactccctgaagtaagtaacagccaaggagccaaggagcttcagttcctgtgattttttttttttttttttttgacagtcttgctctgtcgcccagactggagtgagtgacgtgatctgggctcactgaaatctctgcctcctgggttcaagcgattcttgtgcctcagcctcgtgagtagctgggattacaggtgtgcaccaccgtgcctggctaatttttgtattttttagtagagacagggttttgccatattggccagcctggtctcgaactcctgacctcaggtgatccgcctgccttggcctcccaaagtgctgggattatagcaatccctgtgattcttatctgctcattgccctaactcaatgaggtaggaaaagcagatagtagtcttatcacccctccatttcagatgagtaaaccaaggctgagaaaagctgcgtgacttggacaagccgtaagacaaatgagcagcaggagccaagacctgtcctcacctcttctgactgcaagcccagcatcacaccaacctagaccttgggaggctaagcacttggaggattcttccaaagagaagcagaaacctactttccctacaggccttaatgagctacatgaaacccattgacatagtttggctgcgtcctcacccaaatctcatcttgaactgtagctcccataattcccatgtgttgtgggagggacctggcgggagataattgaatcatggaggtcgtttcccccatactgttcttgtgatagtgaataagtctcaagaggtctgatggttttataaggggtttcccctttcacttggctctcattctctcttgtctgctgccatgtaaggcatcccttgctcttccaccatgattgtgtggtctccccagccatgtggaactgtaagtccattaaacttcttttctttataaattacccagtctcgggtatgtctttatcagcagcatgaaaacaaactaatacacccattaaaaagttaagaatgtattggtactggttattttgttcaaaaaatttgtttaacattcatccatatggaatccttaaacttgatgtggaaactgaagtgtaatctcacagttttcaaattttttagttttagttttcagttttacttttaatactgtaaatattgatagatataacccacataaacacaagttctctggggtcctcagtcacttttaagggtataaaagggtcctgagacaaaaatgttatactttctaaaattaaaactgagaatttttaagtatatatttttaattcattaaaaaaaccattacatgctaacaatgcatttttattagaaataaccatgtttccaagttaaaaaaattgcatcgtattgcttcatatttttgcaaatctcattaatgtctggctaaactgaagacaactgattccctgcttctgcattcaatctgttccaatattatgcactggttgacgtatataaagaaaagtcaatttcacacagacatatacttgaaaaactggggggatattttaataatctttcagatacttgtggatattcttctctggtattacatcaaatttgacaagtagtggtttcttaaaggttgttacaatatggaaactgaaactatactgatgaatttttcatcatcagttacattaaaatccactggtctactttctcttttgaatggatcttttactcatgcacaattttataccctcacacactggttatttgtaaaataccagttcatctagtagccatgcagatcatccaactgttgatacatttcattatataaaaatcacattatttcatatcaccattgttatcattaataaagtctttggatgttgggaaactgtcaagttcataatggcagatacaatggtccaaaattctgatttctttttgcaagctcaaatgttataaatttatttaccaaaatatgttctgttattttccctgagcgccagcttacttcattcatttttaagaaaatatctgccaaatactcaggcctaaataaccatagtttggcagtcatactttcaagtaaaaatagtattccaaggaaaaagcagcaagttcatcttgtgacttggacaagtgtaatgctttcctttgaaatgaccatcgtacttccatatgcagcagaagtgattttatgcatgtgaagaagaaaaagcacaaatgttaacctttaggataccagggtaaatattacatttaattttgagttgctggcacaaaagcaaaaggagaagcatgatacacttcatcgcttagagtaacagaaaagaggaagcagacaggaaaggcatatattgcttgatattaaataaattattctgaaataatttctcgaccccaaacatcatatattgtacacaaacttctctgctgcctgttcacatgggcttccctctctcctccaaggagtctttgggtggaacacaatcagagctgaaacagggacagagctgggcagtggtcgtgacaaatgttttttattttgtctcagatttcacatcatatactgagacttctatatagaaaagacacttgggtctgtagcagtttattaactcattaaaagctttttaacctgtaagataccatataaaattattccttttttttttttttgagacagagtcttgccctattgcccaggctggagtgcagtggcacgacctcagctcactgcaacctccgcctcctgggttcaagcaattctcctgcctcagtctcccgagaggctgggattacaggcacgcaccaccacacttggctaatttttgtatttttagtagagacagaggttcaccatgttggccaggctggtctcaaactcctgacctcatgatccacccgcctcagcctcccaaagtgctgggattacaggcgtgagccaccgcgcccggcccatataaaattattctaaacaatgatttcagagaagcgagcactgtgcgtcaccacagcctctccactgcccagcaatttcatcatctctcctacggttttagggcgttgattcatcccttaatttccttaagatcacaagaaattaagtggacacgacctttcttttaaaattaaaacttcagggccaggcacagtggctcacacttgtaatcccagcactttgggaggctgaggtgggtggattgcttgaggccaggagcttgagaccagcctggccaacatggtgaaaccctgtctctactaaaaataacaaaaaaatagccagtcatgatggtgtacacctgtaatcccagctacttgaatggctgagacacgagaatcgcttgaaccctcaaggcagaggttgccgtgaacagaaattgtgccactgcactccagcctgggcagcacagcaagactctgtctcaaaataaataataaataaatacaattaaaacttcaaaataccatttaggaaggagctataaaccattaaaaaaatcacatattctgacaaagaaagccctcttcctttctttgtccctcaattgcaaaacacatcagactgaatatatgtctaaccacttctgctcaatttactttctttgtgggatgttctcatttgtagttacaactggctacataatttgcaagactctatacaaaatgaaattgcagggttccttgttcaaaaatgatgcagaattcccagatgacaacagcatttgactcaggacaaggccttttcaagcatgggaccccatgcaaaaacacagtcacatgcctaagaatccagccctggttgttaatgattcttgtcgttcaataaatgcttataatttcaataaatttattgtgcagagtaaaagtatatttacataatctcaatttcaatgtagatatggttatatgcccacatggaagattaaactgattatcaccgggccataataactttgctgaagacaaaaaagtcaggatccctgggttccaatttcaattctgcccctcagtaaataccaggggttcttggatgaaatgagaaggcctctgggcttttcagctctaaagttcgggtgttctgcatgaatttagaaaagtgaaaggttttaaaacatgctaaaaacacttctcacttcatcccctagctccatgagaatgacactctcaaaggactgggaaagtgtggcaccatgaggatgtattctcagtgacaaaggagcttcctggggctcttaggatggcattgaaacagccctttagcaagaacaataacaaaatgctgaagtgctgggaaagtctttcccaagatctctcccgagctgcacacacacacaaatcaacacaagggccaaggcgcaagacgaaagcaccatgtctatttatgctgcaggtagaaacttccacacacacgttcgctcatttcatcttcccagaaattctgcagtgtcgataataaagttgcaaaaccagattcagagaggttaaaaaacttgcccaagttcacaaagttcgaaagtggtggagttcggcccaactcgggactatcagcccctgaaggaacccaaccccctttccaccagcacgcgcttccctgggttgaactgaacccagacgtgtgaccgacgctaacgggctggcactcgcggtcccacgttggctcagggacaccctttcgggggcgtgtcctcccagttctagaggttcccagagaagaggaggtgctcactaaccaggcagctcgcccagactccgggcagtgagagggagggagcgccggccgcgggagcgggatggaaaccagcagcccgcggcccccgcggcccagctccaacccggggctgagcctggacgcccggctgggcgtggacactcgcctctgggccaaggtgctgttcaccgcgctctacgcactcatctgggcgctgggcgcggcgggcaatgcgctgtccgcgcacgtggtgctgaaggcgcgggccgggcgcgcggggcgcctgcgccaccacgtgctcagcctggcgctcgcgggcctgctgctgctgctggtcggcgtgccggtggagctctacagcttcgtgtggttccactacccctgggtcttcggcgacctgggctgccgcggctactacttcgtgcacgagctgtgcgcctacgccacggtgctgagcgtggcaggcctgagcgccgagcgctgcctagccgtgtgccagcccctgcgtgcccgcagcctgctgacgccacgccggacccggtggctggtggcgctctcgtgggccgcctcgctcggcctcgccctgcccatggccgtcatcatggggcagaagcacgaactcgagacggcggacggggagccggagcccgcctcgcgagtgtgcacggtgctggtgagccgcaccgcgctccaagtctttatccaggtaagggcgtggagagcgggagtcgggggagggggggtgggggggcggtgctgggaggagggaaccccctctccccggggaacagacattttcgactctaatgctcgccaccacccagcaagttgggtcttgttgctctgtcccattttactagaaggagggaggcgtggccaaagtgaagcattgagagaagtcccgatttcaattcaaaattaactccaaagtcagtgttcccactcttgcgagagtggtgctcagacatttgggcgtaaagttgcctgcagagcctgtgaaaatccggagtccatgacccacccaggttcctgcctcagtagcccgaagtctgtgttccaacgagctccccagacggctctggagagggcctccctggaggtagggtggggacggggaaggcactcccggcctctcttcc

SEQ ID NO: 8340 - DNA, 6000 bp, Homo sapiens
gctggccttggactcctgggccttaagcaatccacccgcctcggcctcccaaagtgctgggattacaggcatgagccaccacacctgggtccagcagttactttctataagaggtaatggaggccgggcgcagtggctcatgcttgtaatcctagcagtttgggaggccgaggcaggtggatcttttgaggccaggagtttgagacctgcctggccaacacggtgaaatcccgtctctactaaaaatacaaaattatctgggtgtggtggtgggcacctgtaatcccagctacttgggaggctgaggcaggagaatcacttaaacctaggaggtggaggttgtagtgagccaagatcgcaccattgtacttcaccctgggcaacagagtgagactctgtctcaaaaaaaaaaaaaacaaacacagaagaagaagaagtaatggaggccaggtccagttgtggctcacgcctgtaatcccaactacctgggcaggctgaggtgggagaatcactttggcccaggactttgaggccagcctgaacaacataacaggatcctgtctctaaaaaataaaaatgaaataagggagcactgcttactagcagccttcacaatccatgtttagaggtgtccaggagcaacctaggagctcagagaagctgccagcagctaaaaacttatcagtttccaaaaatcattatgtatattggagggacaaaggccaatcaccttgtggttcactttggacttgggagtaggtaggtggcagcaataagtccccattggtctgaactccactttgcctaagacctgattcagcctgtgggtgcttcctgacaccccatgaaactgatcggtccataagactgtaagatttgatatagatatacagatatatagatttttttttgagatggagtctcactctgttgcccaggctggagtgcagtggtgcaatctcggctcactgcaacctccgcctcctgggttcaagtgattctcatgcctccgtctcctgagtaactgggattacaggtgcccaccaccacccctggctaattttttttgtatttttagtagagacgggttttcaccatgttgaccaggctggtcttgaactcctgacctcaggtgatccacctgcctcggcctcccaaagtgctgggattagattacaggagtgagccactgcacccagccagatatgatatttttattaagatcttttctattacagaatacaaaattgaaacatacagaaaagtagaaaaatataccaaatctaccatttaattaaaatcaccgtttatgtcttggtgtattccatttattgattgattgatttgatacaaatattacctaaggcctccaatgcacggtgctaggcactggggggtactgaggtaaactcagtgctttggagagcctgtagcatttccctccagtctttttctagatatctctgtacatgcaaaaatgtttcaagcttttctaaaatcataggaacagtctaaaaagtgtaaaataaatctcaattttatcaatagttttgaacaccttggacaccttagctttatttgaactaggaatatgttgctctcatttctactgtcactattagtcatgaactcaaagtggttaagatgagagatgagctgggaatcaattagggaaaattatgttttgggggtggaatacggaggacctctccagctccagctccatcagctttcttttttttcttttctctttttttttttttttttgagacagattcttgctctgtcgcccaggctggagtgcagtggcagtgatctcggctcactgcaacctccacctcccaggttcaggcgattctcctccctcagcctcccaagtagctgggattacaggcacgcaccaccacacccagctaattttcatattttagtagagatggggtttcaccactttggccaggctggtctcgaactcctgacctcatgatctgcccaccttggcctccaaggtgtagtgctgggattacaggcatgagccactgcacccagcctctatcagcttgcttttttttttttttttgaggagtctcattctgtcacccaggctggagtgcaatggcacgatctcagctcactgcaacctccacctccctggttcaagcaattccctgcctcagtcttttgaggagctgggattacaggggcacaccaccaaacctggctaatttttttgtatttttagtagaaacggggtttcaccatgttggccagactggtctcgaactcctgacctcaggagatcagcccgcctcggcctcccaaagtgctgggattacaggtgtgagccaccgcgcccagcctctattagctttctaatgtcctcggagttccttcttccttcagtgttcatgctgatggatgaacagccttccctccactggaggctgtccttgcctctcctaactgggggctgccatggctcagtctcccctcggcactgaagcatccacttttctgggtctcagtccacctcttgcttgtgtatttcctggtcctcaacagaccctgttgagcatagtctaggaccacttcatgccttgacagactccatttggagactgcagcagatgctattgatgtcccacatccccttggcccatctgagactgcctatagctgcaacagacagcacacagcatgctaatagcatcctacctccagcacctgtgttttctctctcacttctctctctggttctcaaaccagattctccaccattttcatgttttctgaaatcagctatttacaagagcgattgctcccatgagtgtatttgcccagtgtgtctgctcttccattagcagcaaaactggcaaggggggattggaggtggaggtggaggtggaaatgcaatggggctatgtttctaccataggtacttcgtactttgtgtgtgtgtttaaatcaactttttttgattaaaaaaaaagtctatgattagaaaaactatatatgaaacagcacacagacccatccagatccttaatccctttctccagaagcaacaactattgtcaaatttctgatgtattcttccagaaatattctagggatataaaagtacaagcatcttaaatagattccttttgtttacatacatgggagcataatatatataacatatatttaaacttcactacatatattggggatcactccaaaataaagctacttcacttttcccccacaactttaagtaatgtgttgcttggaaatcccaagatttatataagctctccctttttaatagacattttgattgtttaatcaactcatttgctatcacaaacaattctgccttgaatattcttatgtacatgtttttacacacatgtacaactatacttttaatacttaatataattaaaattttctcttttgataattagcaggtgagaaatagtatcttcttgtttgatttgtatttctgatgcgtaaagttggaggtttgtatatgtttatcaaactacttcttttttatttttatttttttaagatggagtttcactcttgttgcccaggctggagtgcaatggtgcaatttcagctcactgcaacctccgcctcacaggttcaagcagttctcctgcctcagcctgctaagtagctgagattacagggatgcgccaccacgcctggctaattttgtatttttagttgagacagggtttcaccatgttgggcaggctggtctcgaactcctgacctcaggtgatccactcacctcggcctcccaaagggttgggattacaggtgtgagccaccgtgcacgcccattatcaaactatttctattccttcttcagtgaattgcctattcccatcttttgcctattttctatcttattgatatgaaaactagaagaaacttcctttgttgagaaaattattcttcttaggccaaacttaaaagtttttagacagtcaaatttatttcctttttggcttctcagttttatgtatttaaaaaacttaaatacataaaaaaccagtattatcaatttaaaaaaccttccgcagtttaaaattattttatgaaataacttgataattttttctagtattctctcagattcttttttacatttaagactctaggccagtgcagtggtgcacatgtgtaatctcagctacttgggaggctaagttgggaggatagcttgagcccaagagtttgaggctattgtgagctatgatcatgagctttgatcatgctactgcactctagcccgggcaacagagggagaccttgtttctaaaagaaagaaaaagaacgagagtgagagcaagcgagagagagagaaagaaggaaagagagagagaaaggaaggaaggaaagagtgaggaaagagaaagaaagaaacaaagaaagaaaggaaggaaggaaggaaggaaggaaggaaggaaggaaggaaggaaggaagggagggagggagggagggagagaaagaagggaaggaagggagggagggaggattctagtctatctggaaattattttagagtaaaaatcagctctcatatttttatcttttctttatttttcatttgtaaccttgactgtttgatcagtgattcagcctttgaggagttcagaacaatccagatttcccaggtccttgggaacatgactgaacctggcttatagacatgttgctggttgtgacttcgaacccctaagcctctcctgctctcggagctttgggtccagagcctaagaagagcctgggcaccattctcactggggcatgtgggctccaggtggcccccacagtgacctggattcccatttcactcagagtcacaggctgtagcgcttcctctgtaaattcagccctggctccctcccctcttccctcccatcccatctgcacactgccctgccagctcttccttgcggaaatttgcatcgtgggcttgtagggactgcttcactgagccatggtctgttcggctgccccactgctgctcctggccacaactcttcccctgctggggtcaccagttgcccaagcatcccaacctgtaagtgagactggggtgagacccagggaaggtctgcagaggcgacaatggggacccctgattgggagagacaaagcatggaatgaaaggataggtagtggggaaagggctgaggggagaggaagtaatgtgtaaggaaagtggatgctttgttatgagatctctgagaactcagttttactttcctgggtgtgggggatagctcttgtttccttatttgagtccctgtaaactcatatgatacctgctgtactttggataaagtctcattcagtcaagctggccatttaaaaagaaaaagaaaaattttgcagatttggaaactattggcttagaggatgggagagaatctgaggaaagacatcagagtctagagggtgcctttccatctgtgttctcctcaatagatagctatatctatggctatgtctatatgtcactaagcctaaatctatctctattgctaaatttaaatctatctttatgtaaatatatatctgtatctgtatctaaatctatctatatctatatcttttttaagacatgctctcaccatgttgcccaggctggacttgaactcctgggctcaagtgatcctcccacctcagcctcccaagtaactgggactaaaggcacgtgccattgtgaccagcttatactcacgtcttatccatactcgtatctatatcaatatctggttttggatagatatccacacgcacacgcaggtgcatatagacagggctcaggtctgtgacacagtgagcccctccatatttcctggaggaaggactgccatgttctctctccttgggccagctccatcctcacctccctaccagacagacccttccctgcctgccccatccccctatcttctagctttggccgatggcccaagggccagacaatgtgg

SEQ ID NO: 8341 - DNA, 6000 bp, Homo sapiens
gccacaatcatgtgataaagtatcagatagaaaagctataggaagctatagaaggataaaggaggaacccactctgaaagggaagtcaaggaaggcttcctggaggaggtgacatgcacattgcattttaaagctagtgtaggagtttgtaaaagaaagaaagggaggtggagagagcattctaggtgagggagaagcatgagcatgagctgtttcaggcttgaaacagcctggcactgggagcagccgaagttggccagaggcggggcttgggggtgggggtacaagtgtgactggtggactgtggagcagcaggcagggcccaggtcctggtaggtctgctgggctaggcaaggtgggaggacttgtcctaaagacaacagccctccaccaaagtattgaagcaggggagtgacaggccagagtggtgtttctgtaccacgtgtgggaacaaggctgggagggcaagagtggtgcagggagacctgtgttcacttgtgctttacggcttgccactggcacatcccatgggctttgaatgagtcaatctgtgcagggatgctcatggccacaggcttcccgtagaggcctggcctgctgctcttgggtaccagggacgtcctgagcttacacagggctgcgagaacatgcgcacatgtcacagcagtaccactcagccctgcaccccacctctgcaataccctgctcttacctgcttcagtttacattaatgaatatgcaccctctccagggcatcagcagcacggccctgcacagtagctgtgtgcttccaggctggtgcatgtcagagagccctcagcctcaccttccttgtcccctcctcctcctgaggccagactcataacctctctcagagaaagggaggtggcaccctctgggaagctgatggaaatgcgtccctcatgtgccctggtgagcatgccttcgcatgagcacacatcagagggaccacgggtgcactgcacgtgaaaggcaggcatgtgtgatcccaaatacctgttgcagcggcgggcacagggaggcctgcagcccaggcagccctcctctccaagtcctggtctctgctcagcacatggtgatggggctgtttcatgggccccaaccctgctccaagcaggcctggtgtctgggggccaggttcaagaccatctcccatgtggggcaagaagcaccagaagtttctgtttcacctcccaccaggtgatcgcctatgggcaaggcagcagcgaaggcctgagacagaatgtggacgtgtggctgtggcagctggcaagtggggcccagggacagggttgcagaaccccctgccagagggcatcagcccgctcctcggccctgggctcccacacggggcccactcttggggccttggggcccaggcagactcagacattcacccaggtgatgaggcccaacagtctccatttgattctcctgctcctcttctccaggagggctcctcggtggtgacaatggggggacggcgcctgagcctggcccctgatgacagcctcctggtgctagctgggacctcgtgagtacgcagggagggctttccctgggatcctcagggtccaactctgtgtgatccctgctcatctgtgtgtccacaggtatgcctgggagcgaacacaaggctctgtggccctgtctgtgacccaggaccctgcctgcaagaagcccctggggtgaccctcttgccatggcctgaagcagccacaggtgtgccaagcaccctcgagtgccatccctgccaaacaactctcccagcccccactacctctctgtgtactgccgctgtgtcccccacagacctgcacattgttgtcacccaccctcctgcccttctcagcccagatgccatgcccctgggcgggcagcagctccccatcttctctggcagactcagcccactgccttgccagtcttgccaggtggtctacccccggccccgctcctgcccattcctctgtccctgcagactcagtgcagcacttccacaccaagaaggccctcaataaaggcttcctgaggaacgcacacctgggggtctgccgcaggcagtcatcactggccttcccatgtgccccccaggaccatgtggtgtgtctggggcatcagggcaccaggtgaccatggacgtgttggagggtctgttattgggcatccctgtttgtggatgggcattcttcactgtgtgtgtgacttgatccacgcatgctccatgcctggtcctgggagcacggctaatgtcatctctccacttccttctctgttctcatttattctttttactttttttttttttttgaaacaggatctcactgtcaccaaggctggagtgcagtggtgtgatcagagctcactgcagccttgaccctcctggctcaagtgattctcccacctcagccttctgagtagctgggactacaggcatgcaccaccacaccctgttaattttttttttcttttttgtagagatggggatttcaccatgttgcccagtctgtctttttacataactttaaaacactagcatctgttgagtttttttccaataacagaagtcatctgtgctaactatagaaaacccagaaatacacaaaatcccccacccagagctaaccactgttaatacctaaagactatgatcagcctggagaggggcatgaagttgtaccaggagctcagcagtgttggtgggggtgtctggccttgtgtccccttccctcccctgtcatgcacaggtgccctgttcaaagactccagagggacccctgagcctgctatgggtgtctagggatgctggaggcctcagaggcaccagtgggaagagacaagaatgtggaacctgcagcgggcgcagctcagtttcctgggacttccgtgagaagtcaatgagggcatgcacatgagagtgacagatctggacagaacaggtccctgcgtggactcaaagcttcctctagaaaagaacacttgacccctgtctccctcatccccagcccagtggctcactgccttcctacactccactgggagcagagaaagacctgcctttgctgaaaaggctactggccctaagagacatcgggaccttcaacctcctcgtcacccctaagggctttcctctcctgcaagcaaagaaaaaacaccatcaggctccttcaaacacaaatggtccaggataggcacaggcagaggctccacgcggctcgttcctggcctgtagcaatgcactgctccgtgcaggacctgagaagaagacatagaatgttccagggaggacccaggtcagaataccgatggccgtgaagagaagagtttactctcatatgcagggcaagcttaatccagagagaaagtcatgaaaattagatctgtttttgtgaacactcgctctgtcccaaggaatcccctagaagtttgtttttttttttttttttttttttgagacggagtctcactctgttgcccaggctggagtgcagtggcgcgatctcagctcactgcaagctccgcctcccaggttcacgccattctcctgcctcagcctcccgagtagctgggactacaggcacctgccaccacgcccggctactttttttgtatttttagtagagacggggtttcaccgtgttagccaggatggtctcgatctcctgacctcgtgatctgcccgcctcggcctcccaaagtgctgggattacaggcttaagccactgtgcctggcctataagtttttacataaattatctcattttatcctcacaactctccaagaaggtggtagtgcctgattttacagatcaggctcagagaggtttggaaatagggcagctctgtttccaacccaggcctgtctgcatatggagcttaggctgggcctcaccaccctgcttctcccagggatgtttgccctcagccttgaccaaatgggagcccagggcagccaagagaggccaggggccactgtgcctgggacacagaggccaggccacacatggcagactgctgaccccagccagttggcagtgatggggtcaggccctggagcctggaaccagcacctcccttggccctgctgtcccgggttatcaggagcctgaagccctcatctccacccacaggaccagcccatgggctcatgagaatacctcaccatgggacagctggacttgtaccttgtctggagctagccccagcctcccactccctattccgcagtgaatgctaatgggggcaaggagtggagtggacaaggagccatggggagacacagacagggaaaaatcaggattgttctatttgcgggagaagcccccagctccccgtgccatggcagtagaaatttggcaggggcgtccccgtccatggggcctacttcaccgtgtacccggacttgggaccatcacagacttcggaaccatcaggaacctgggagcaactgaaagctgaactacagtgggctttcagacacacagcaggctggcggagcacaaataggactggttccctccaggccaccagcagggcggtggaggtcttcactgactccctgcctacctctcaggacaatgtccttttggctccacagtccctgaagccagagctggtgggggcagggaggcagccaccagcctctatatgtagtggaggagggggtgtccagggagggctgcatgatcctgagagcccccacctcacccggctggactatcctcccacttcagggtttctctgggcttccatcttgcccctgctgagccctgcttcctcctctaccagcagcacaacccccaggctgggctcagagacctcatgtggtgggatcactcagtaccccgaggcggagggaaggagggagggctgcagggttccccttggcctgcaaacaggaacacagggtgtttctcagtggctgcgagaatgctgatgaaaaccccaggatgttgtgtcaccgtggtggccagctgatagtgccaatcatcccactttgccctgagcactcctgcaggggtagaagactccagaaccttctctcaggcccatggcccaagcagcccatggaacttcataacctgagctctccatctccctctctctcctcctctgttctccctccctccttctctccctcaccctcctctgctccctctgcctttaccactgtgggggggtcctctggagggccctgccaccccacctcttcctcgctggtgtctgccttcctggcaccaatcctggccctggagtttgtcctgggcctggtggggaacagtttggccctcttcatcttctgcatccacacgcggccctggacctccaacacggtgttcctggtcagcctggtggccgctgacttcctcctgatcagcaacctgcccctccgcgtggactactacctcctccatgagacctggcgctttggggctgctgcctgcaaagtcaacctcttcatgctgtccaccaaccgcacggccagcgttgtcttcctcacagccatcgcactcaaccgctacctgaaggtggtgcagccccaccacgtgctgagccgtgcttccgtgggggcagctgcccgggtggccgggggactctgggtgggcatcctgctcctcaacgggcacctgctcctgagcaccttctccggcccctcctgcctcagctacagggtgggcacgaagccctcggcctcgctccgctggcaccaggcactgtacctgctggagttcttcctgccactggcgctcatcctctttgctattgtgagcattgggctcaccatccggaaccgtggtctgggcgggcaggcaggcccgcagagggccatgcgtgtgctggccatggtggtggccgtctacaccatctgcttcttgcccagcatcatctttggcatggcttccatggtggctttctggctgtccgcctgccgatccctggacctctgcacacagctcttccatggctccctggccttca

SEQ ID NO: 8342 - DNA, 6000 bp, Homo sapiens
tataccattctaaatgttcatggcccaaagaaaatagccttgaaatatataaagaaaaactaaaactgacagaactgtagagacttggatcatccgaatcatgtgaaatttcaacagaaatacttcaattagtttaagtaaaacttaaaatgttagtaaatatatagattttaggaaaataagctgaatttatggggcaaaaatagaacctggaaacaagtaaacagagaatgttgattcttctcaaactcacattaagtatttgtaaaaattaacttgtgtcctaagccataaaacacatctcaacatgtttgggggaaaaatacaatcaacacagacaacattctctgaccattatgcaattaagttggaggtcagtaacaaaaaaagataaatttaaatatttctgaagtttgtaagtttcaaaaccacacctctcaattatctatgtgccaaagaagaaattgtaatgggaaattgagaaatatttaaaaataaattgtaatgaaagatctacctatcaatacttgtagaagagggccaaggcagaaatcacagaaaaatttacagctttagtatattattagaaaggaagaaaggctgaaaactaataatctgacatataaataaaacgttttagaaaggaacaacaaaaaaggaaaaaataagcgcaaaaatcatggaaacaaaacataaagatagaattggatcagcaaagggtaaaggcaaaagttcgttctttgaaagaacaagaaaaataaagagaattttggaaaggttgattaatgaaaagaaactagacagaaataaacaagactagaaattgtttagaatagatttaaaaagagaatactaaaaatctttgtgacagtaaattttaaaacttaactaaaataaaaaattcctagaaaaaatataatttaataaatttaagaagaaatagaaagcctgaatcatctaataacaattaaagaagttgaatcaatatgtttaaattttcatacatacactgacacacacaaacatgcacacagacacacatatatacacacaaatatgaaccgaggctcaaatggttttttaggcaaatacaggcatactttaaaggaatagattactttaatctgaaacagtttttttttccctaagaataaaatgagggggattataccccaattcagactataaggcaaacgtaacaatgccaccaaactatacaaggacaacatgagaaagaaaacttaggaattaattatgcactaaaaattactcataattaagttacaaataacttacgaacatagatgcaaaatttctaaataaagtattaggaaatgtgtagtttaatagcatataatcattattgtagcccaggggtggtggctcacacccataatcccagaactttgggaggccaaggtgggcagatcacctgaggtcaggagttcgagaccagcctggccaacatggtaaaacctgtctctactaaaaatacaaacattagctgggcatggtggtgggtgcctgtaatcccagctactcaggacactgaggcaggagaatcacttgaacccatgaggcagaggttgcagtgagccgaggtcacatcagtgtactccactctgggtgacaagaatgaaactccatgtcaaaaacaaaaaaaaaattattattgtaaagaaagagtagaaagagaggaagaaggagagagagaagaaaaggaagttggagtcagggaagaaaaggaggaagggaggaaggaattgaaaagaaagaaactctctacacatacacacacacatacacagaattatttagatatggataattgtttgcatagaaaatgtaataagtggctgggcatggtggctcacgcctgtaatcccagcactttgggaggccgaggcaggtggatcatgaggtcaggagatcgagaccatcctggctaacacggtgaagccccgcctctactaaaaaatacaaaaaattagccaggcgtggtggcgggcacctgtagttccagctactcaggaggctgaggcaggagaatggcatgaacctaggaggcagagcttgcagtgagccaatatcgagccactgcactccagcctgggtgacagagcaagagtctgtctcaaaaaaaaaaaaaaaaaaaaagaaaatgtaataaggtaatttagatataagataaatattccaaaattaactgcatttttacagtatgacaacaaacataaaatgtgactttaaatattgatttcatttataacagcataaaacaggatgtcatcaggaaacacatttaagatattaggacatatatggaagaaagtataaagctttatttaaagacatcaaagaagggcttaaataacatggtgctataccatattcatggataagaagacttgttatcttaaaggtgataatttctgcccaaattaatctatataatcaatataattccaaacaaaattataccagggtgttttcaaggagtgtaataatctgattctaaaatttattcataggtccaaaataggcaagatactcctataggaaataagatagaagtgttttcttactgtatatcaaggcttactttaaagttgtagtaattaagacagtataacattggtgtaatgtagaaaaaagaatagtggaatataaaaaagcttagacacaaacccatgcaaaatagttacttgagatatgagaaaggtagttttacaagtgagaaaagaaaagagggaccattcaataaatggttttgggacaaatgtttatccatgtggataaaaccattatgccatcagataaaaaacaaattgagtcctttactcacacccataaatctcaatgccaaatagatcaaaggccaaaatgtacagagcaaaactaaaaaattttagagaagatataaaataatattttcacaacctcaggattttaaaaattacaggagaatgaaaacataaattatggtatatttatgcaatggaatatcatacagtagtataatattaataaactacaggtatacctaacaggtacaaaattaataaactgcaggtacacataacaacatggttatttctttaaaatgtctagttagtgtaaaatagtaagcagcaaaatactactaaaagactgatagactttgtaaaaatgtaaaaacacgcaagaaattaaataatatattccttggagatacattttgtgacaagattaattttacaaaacaaatgaaataataaccacaaaattcagattaatggtcaccttgggcataggaacacaagaaggtaataaaggaaaatcaactaagtagatgcaacaggactggctatgtcctttattctccagcccgcaattgtttgttgcattattatgcttaataaattacatttatgttacctataagttgtgaatacgacatagcatttaaaataaaaatctcaattttaaaaagatttctgcttattatactaagactaattacagagctctccaaaagctagaaggggacttatggggcagaggaattgggtaaaaggtttaattggtagtgagtttcttgtcactggagttattcaagtacagatgagaaaatccgtttaaattaatatgaatacttaaacttaagcattagttggttgattgaattaacttccttctacatctgaaagactataattccttggatcagttgttgaacaaactaatttaaccattcatgttagccaatttgttaaaaatatgaagtccatatagatactgcctttgtctgccaattccagaattagaataaaccagttgctcccagaaaaaatctagggatcaactttgccccccaaatcacttgcttctgtttttttcttaataatttaatcattctttacatggttttccttggtaaggcaggggagagggaaggaggggtgggataagtaggtatttttaacattttcatgaagctcaattttatgcaactaattatctaaagatagtattgaaactaattttagcaggtaataagttgtgggcaggatcttagagaatattctgccttttaatcttcatagattctacaattgaaagtagaaagccacttttctaaaagtgttgccaaacgttcctcagatccctcaccatcgaggaggggaatgccaacaaaagtgctgggctgtcacctcagggaacttttaaaagtaagttaaaagcgtagattaaataaattcatttatgccaattgccaaaaggcaagggcaatcttcagagcctggaaatgcgagaaggcaggcaggatatgcacgagggggtggatgtgctggcatttactaaatccccactggaaacatagcacatttcttagatcactcagttcagtcaattatcgctacagataaccctatcagaagtacctcccacctacggaaatctgcctaaggtttgctaacccacctgcctgtttctgaatagtgccatttttggcataattacagcaaaaaaagaggatcattgaatgcaacccagaagggctggttttctctcaggtgggctggttgaagaaattgatgctgaagactgaaggtcccagcccttcacttattagtacccctcttagtgatgtgtcatattgtgggttgtgtcttttttggagaaagtcaatcatgtcactctgttgagaagagaatggtgaacagcaaggagacttttgcaatgaaataatgcaaactattccagacatgcctaatggttctatttgctgtgtgccttaggtcagggtgtaagaaacccaatcttgaaggaaaacagagtagcttatcttgcctggaagtaacaaaaaaaaaaaaaaaaagcatcccttggtgggtcacatgaccctaccagttctcaagtcagatctcttctcataagggcactgtgtggagcttctgagatctgtggaggtttttctctgcaaatgcaggaagaaatcaggtggatggatgcataattatggccctgctcctggtctctttgctggcattcctgagcttgggctcaggatgtcatcatcggatctgtcactgctctaacagggtttttctctgccaagagagcaaggtgacagagattccttctgacctcccgaggaatgccattgaactgtgagtatcagagggagggggaacaactgcatggctggcatttgtgcattgcgtactattattatttttacattaggctgatatctgttagactgaaatatttctgccccttgaccgaagtcctgaataaaacaactaactccccagcccaaccctcctgcctgtggctttccaagaatcttagatgagagtttgtatcagcatttgtcagagaacggcagtgtcagagaaccggaatccaaaggcaaagggaaaagttttgtcttttcaatgcatttgctcttgggtttcatactctctttagtggaaccagaaaaggaaaatgaaggcaaagtagaaacttaggagacccagaattggaggcagaaaggcagctttgatctaagcagaatacacaaggtatgtctcccgaggacactgaatctaaaaggccatagtctttgtcgttttgaaggcagcagcaaataattcctgaactgagattctgcttttgggtgtaaaaaggaggtggtagagaagagaaaaggtgtgaagaaagaaagaaagataggaaagacacagagagagggagaaatacaggataatcttttacacaactggaaaaaaatgtgattaataagttagaaatttacttaactattttaacaggaagtagactcctagagttggccaagaatttagacaccatcctactctctctttcttttgcaaattaggaatctggtgtctgaagagtaaagaggattttccaaactctcgtgatgagttgagatggagccaaaagtagaaatcgggccttttgactcacagtctactgttttgttttgttttgttttgttttcccaac

SEQ ID NO: 8343 - DNA, 6000 bp, Homo sapiens
taaaaaccctgactggctgttttttccctgtattctttacaactattttttgaccctctgaaaattattatacttcacctaaatggaagactgctgtgtttgtggaaattttgtaattttttaatttattttattctctctccctttttattttgcctgcagaatcgttgagagactaataaggcttaatatttaattgatttgtttaatatgttatataaatgtaaaagagtgtataaactgtagagatagcattggcaagacattgtacagatgcaaccttttacacaacatcattgtgtaatttgtaaagattcacgtgtagttctttattatagtgattttgggctttgtacccactgaatgccattttttgtgtttttaaattattttctttatcttgttacaaaaactgagatgtggggttttttttttttcagttcacttatcattagaatgtctgaacttttatgtaacatttttgtgtgcatctctcaatgctaacaccacatgtttgcctatgacaagtttatagagtgaaaggtatcttctgggttgaaataattcacaaattggtgaatgtcatcttgcaacacaccctgtacagtcttccttaaaggaacactacagtatatttttagtatctacatgctgaatgactgaatacagacctaagcacagcagtggtcctggtacagtatttaagtgtcggcatacacaggcgtaatccctgtataaagtagtgccaaactgatttcagttgtgtaactagtttaaaacccaataaatggattctttttaacacctggcttttgtcttcattaagaggagaagacagttctgtaggcagtgactcctgtggatttccttttgcagccatagatttgtatctgtaaatgtatgtcctctgaccagtataaattatctggatctgccctgtacaatacagtagctactagccatatctgactatttatatttaattaaataaaaaatgtattccctcagtctcaccggcatattttaaatactcttgagccacatgtggctagtggttaccacactgaataatatcgatgaacttttccatcatcacagaaagttcacctagcactgacctaggtgattgattgtttttgtgtggaggtgtgggagacagagttttgctctgtcatccaggctggagtgcaatggcacaatcttggcttactgcaacctctgcctcccatgttcccatgaggaatgctcatgccttagcctccagaatagctgggactataggcatgcaccaccacgcccggctgatttttgtattttagtagagacagtttcaccatgttgcccaggctggggtcaaactcctgagctcaggcagtccacctgcatcggactcccaaagtgctaggattacaggtgtgagccaccgtgcctgatcctaactgattggttcttaaattgatgtgcctaagaatcatgaggggattttgtttaaatgtacagggaattcattgttcccacttcatgatatcaattcctggtcctgaggccacacgttgagaagtgaggctttatgttgtatgttgaccacttcagctttttttagttaagctgtatgaaactgccttagcaatggttcctaaatgggaactttaaacaaagatgtaagatactgggtgccctctctgttcctcagtgaaaacttctctggcaggggtgcttaggcattacagtattagaagctctatgatgattcagttgttcagccaggtttgagaaccacacgaatcccaccacagacctaaaaagagggtaccttaatctgagtgcctaacatgctcccaggtgattctgattctgggtttggaagtcgcttattactttgatatttccctagtgacattgtcctatgaattaattgtttaccaataggaaaaatgaaattttctaccaggagggaaaaggagaaagggggtggagaaaagagttgcatggcttgtatggtctaagatagttcttaacatgtatatggtgtgttaaaaagcatgaggacagcaggaactgtgttaagggtggtaacaagatttactagaggaggaggggagaggctgacctgtgtttggaagtcactgttgactgggcatggaagacagtatgggccactctctgagggtggatgagaagtgaggagaagaaaaagcctatttatctttttataaggtcaaataaatctttagtttctgaatggatcctttagaaagcaaagactgcagattgtccttcaaaatgtaggaggaaaatttactcacctattaatgtaaatgaaagtttaggtgcaaatatatgataaagctgttttcaaatatttgaaatacttgtcattaccaagccctttaagccgcaggccacttttggtaattaggagtgtggccagaaagactaaagagcaattttgttttattaaaaaattaattttggccaggcgcagtggctcacatctgtaatcccagcactttaggatcgcttgagcccaagagtttgagaccagcctgggcaacatagaaagaccctatttctacaaaaaatagaaaaaaatagctgggtgtggtggtacgtgcctgtagtcccagctacttggggggctgatgtgggaggcagaggttacagtgaactgagatcacggcaccgcactccagcctaggtgacagaatgagaccgtgtctcacaaaaataaaaaaatcatgagctatcatcacaggaaaagtaactttttctacgtggccttcataactgtttttgtagacttcgtcttctcagtatatcctaattgttttaagtattccttttgaacatcaaggttgttttcagtttcctgtactacagattacactgcagtgcacattttcatacctttatgctttaaaactcttcttttgttggagcagttccaaggagtgagagatgcctagatgaggagctttttttgttttaaagaacattttaacagctctcatatttgctgttttcctcaaagtgcacatgtatccatttgcattgcaataataagagtgtattagaagaatgccagtgtcagggcagattgatagccaattcatgatctataattagccctgcttatttatttgcagattttccatttttttactactaccaatgttttttccaatttcgctcacttgtggattttgtagatatactagttttagccttgttgaatggttctagctagttctggaactttgatgagtcctgatttcctcttctagatctctagaatcctttatgatttgtggttttttgtttgttttcagtttcagaccatttctccggtaggtataactctgatggtctcaatgcagcccaaacctattgtaatctccattcatatagccaaatgcctggaaatgaactagcatttatttatgcagtagctaatttattatagagaggtatataattttgatcagaattcccactccaaatgctaatgagtatttttctgtggattgtttctgggactcatggttaccattattgataacatatactggaactgctttattgcaagtggttgggaagtggaatatgtgggaactggaaaactttcttgaagttatttctaaacagaattctgatggcatactcaactcctggactgaataataagttatctagccttcttgctttttgttttttcgtttgtttttgttttgttttgtttttatgaaagcacagggaactgaagaaattgcattaattaaattacttgatacttgctagttctgttttaaaaagataaaccattagctaaaatgaagaatccagtataagtatttcatccgaacggaatcaactttgcttttctggtaaccagagtgaatgaaggaaagggcattcaaataacattctctgtttctaaatagcatccctgaggttagaaaagtagtaagatcctagttagccaggttgggatactgaagggagaagagtttaactggttttattttgtacccatcatagcagacatacttaggaatgttacttgattgttcagactaaaacctatcttaggagttcattattttggacatgtatgaattctagaagaatgagagaggatggtaattttagttttgtgtttgtgcttaataaaattagcttgtacattgcactatgatttatcaagattttttacattcaacatagtattaagtaatacatcaatatccatgattcctgggcttggtcgttttatttgcatgggtagtttctttatgctttgcatgtttcctgccaattagtccccttgctgagttccctcagtgaattcactaataccttaagagagcttaggtaagttcaaataggtttaatttaaattctattacaatgacttgatttgtaaattctaggtctcaaagttccaaactggaagccgccgccaatttaattcatgaggaaaaatattagccgcagcctaagtgaggagctagttaggacgtcttaaaagcgcggggaacgaggaggaggtgggctgcgggcagggtaagcagcctagggaggcccgcaaagacctccctgggtccctgcgtgccatcagtacccctatctttcccttccttccttaccactccaccttgctctgcgtttcaggttttggctatttcagggagcttgagttccccaaacagcaaaactgcgagcctgaaaaacctggctcaagcgcccctcgtgaggcgggcagcgggagtggccgggctctgggccccaggaggcaggcgacggaggcgcggagggtgcggggcgcaggcgggacgccaggcccgggtgtccggcggagggggcggtgccctcggcgtctccgtgactgcgcctctgcgcccgcgtcttgccgcggctcccgggatgcgcggaggcggtggcgatggcgatgatgcctctagtcctgcatcatccagagcggcaggcggagctggggtccggactgcgagatggaggaggggcggcgctgcggccacccggcaggtgagaggccgcgggcccctggaggaggacaaccccacgatgccggagacggctcccggaggctggcgggatagcgaggagcgcggctgcgctgggccaggcccggctccgcgtacctgtcttcctggtgcggcctgcagggtagccttctcgcccgtccctgccggttcccaggctctgctcggccgtggaaccccccccacccacccacccaccgcccctaccctggctgagccctcctaacccaccacccctctgcggcattcttttgcaagcttacctggcccggcctaggccctccttaccgtcacctcacccttctccgggaagcccctacccaccgccagcccctcacgggggggtcgaccttccctgcccgcagtttcccactctgtcctcaggctgggggctccctggcctcttcatccctcccatcaaatgactcaggtcttcccatcccattagctgctccgggttcaatgtagttctactggatagaaagagcaagggctttgaaatcagataatgaccttggggaagttatctaacctccctgaggttttcctgatcgatagaaatacaatgggaatcacaataatacagaaccttgctctctgtgaggattaggctttgaaaatgctaacctaagacattttggggcgcgcggggaatggggttggaagaattcaggtcgtgagttgatttatgaaagcccctatagcatgttttaatgttcactaaaaatttaaaacagcacactagatatatcagaggctgttcacatatcttaatgaaaaatcattgccactcaaattatacaataaattttcatccatattctttgcttgctagttacttcaggatgtctcatttgtaagaatatgcatgtgaattcattcttactgcagctaatatgcatgcttaagactggtgttccagcttaaaatctttctgatt

SEQ ID NO: 8344 - DNA, 6000 bp, Homo sapiens
attattagagaaatgcatatcaaaacttcaatgagataccatcccatatcagtcagaattgctattattaaaaagtcaaaaagtaacagatgctggtaaggtttcaaagaaaagggaacacttgtatactgctggtgggaatgtaaattagttcagccattgtagaaagcagtgtggcaatttctcaaagaacttaaaacagaattaccatttgacccagcaatctcattatagggtatatacccaaagggatacaaattgttctaccataaagatacatgcactgatatgtttattgcagcaactattcacaatagaaaagacatggactcaacctaaatgcccatgaatggtagtacactgcataaagaaaatgtggtacatatttgtatatataccacatatataaatgtggtatatatatacacgtgtaaatggaatactacacagccataaaaaagaacaagatcatgtcctttgcagcaatatggatggatctggaggccattattctaagcaaactgaagcaggaacagaaaacaaaatactgcatattctcacttataagtgagagctaaacgctgagtacgtatggacacatagaaaggacaacagacactgggccctacttgtggctggagggtgggaggagggtgaggatcaaaaaactacctatcagatactaagtttattacctgggtgacaaaataatctgtccaccaaacccctgtgacacaaaatttatctatataacaaacctgcacgttactcctgaacccaaaataaaagttttttaaaaaccatgctggtgtctgtgtatgtgcaaatatatgggcaaattgcaaataattcatgttttcgctttaaaaagtaatacatgaagttggtatagactcttagttatttgtataaaatataggaaataattcaaagaaacaaaactttatttaaaacttttaaaaataaacaaatatgaatagaaactcacaacatatatatgcatatgcataggaatataaatataatctacttcccagcaattccactttgaatctacccccatagaaagaaaacaccaggatgtagagaatgtttattgttaattgcctttagtgacaaaaactggaaacaaagttaattttcatgaatagagaattgaatgtataaattacggtgtatccataacatagaaataatatttaaccactgaaaaatgagttaaatctatacctgttgactctgaaacagctgggcaaagtttagagtgggaaaaacaaaatacagacaacaatgaaagtcctatatttgcatttacatgtgtgaatattatgtatgtttgtatttccatctagatagtatcaaagagtctggacaaataaggaaggatttatactacattgttaacagcgtttactttaagatgtgtgatcctgtgttgagtgtcaaggaagatgttcagtgaaaagaggaacgaagggggaaaaaggataagaaaacaagaatatcagctcttggagggaaatagcatgtatagaattttatctatatatttgtgcaaagctgtagggggaaaattcattactttatagatgggtgatgctagataaagtgtctcctcatatcataggtatgaaccaaaaacaacttctgctactgtatagctgaggcttttttttttcctcaatggtgaacccatcatgaatatgctttttctttttaagaagagaaactagctttagcaagtcataaggattcctaagatatggctaccagccatgaaaatcccggagtagaaagaaaaacaaccccaagtcagactcatcaacacatcagagttgaaggccagggtaaggaacgtaggtgtcccagtgcctggcaccagttccaccatttgaggtggctttggactggcatacaaagcctcaaagttagccgagggctaggcaggatggaggcagggagagaaggcgggctgacctgcgctccagtccctatgcaaacctggaaggtgagcagggagaagaacccctgatgccacccagggccccgctctgacctgcaggctcataggtgggcagtcattatgggactttaagcagagtgacaaggtttgatttataaaacttcagcctgaaatattcgccttttttccaccctcaacctcttcccatcctaactcattcttcaggcttcttcatggatgagattttcttccatctgtacggatacccctcattgtttaggttaggtggcctccctcttctctcctcactcagggcttagtacctttggtcatcataataccgcccattttgtatggttcattgcttcttgtttgtcttcctccatactgtaagtgcttgttcaccccccagccccagtgcccagcacagtacctgcttcaaaatatcaacttgctgtactaatggaggataaatggattaatgtttactttttagctatttcatatttattttatatttagctcttattacatatttagattttattcgattagctttctttttctcccttaaccactgaataaagttccttttgaaaacgtcagcctggctctaatggacagggagaaaaaagaaaagataactttaaacagcttggaaggaaaattaaagatagagaagtttcccctcccccctcccccaccctccgcatccccttccctctcccttttcctccctctctctgtcagctctttgagatggtggaagcctcaagcagagatccaaggtggaggaggcattcccttccacaaagaagacctcttgtgcagccgctctaaataaagggacgctgttctcttgaaagcatctctagagttttctatgcagtgtgtttacgggtgcctaggagaacctggcaaagcaatgtgcggttcctatatacgctaaaatcccaggctccgaaaaaatacagagtgaaacagcagattctcctccccggcgtgggatccaatttttgcccggcataagtgtatagtaaatttcccagccttaaagcacttcccgagagatgctttgagcgctcgcggtaccagtgcgtaaacgccgctccccggctggcgcgggtgtgcgccaactccaacctgcgcgcaagtctgccggtgcgcgctccagtcccacagctccgagtccccgcagtgaaaggagggggcggtgcaccggggtagatgggcccctgaggactcccggggttcagttttccgcggaactctgcctgcagcagtctggcgggaacgtgctgcggagctcatcccatcttggcttctccaaaagggtttatacggactggcgagtctttgccctgcctcctccaagtgtctggcaccagttctaccgtttgaaatggtcttggactgggatacgaggcctcaaagtcagaagacggcagggcaggatggaggcgggcagagaaggctggctgacctgtcctccagcccctatgcaaacctggaaggggaacagggagaaggaccaccgatgccaccccgagcccggctctggcctgcaggcttggcaggcgcggaggcggaggctgccaggtccccgggaggcaaacgcagcgccgcagtgattgctggcggagagcccagagccgcgcgtctgagcgacaagctgcctatgagtgtggctcctgcgctcaccaagattcgcagggagctcagccctgtccccagtgattgagcagaggctcatccagaggggtcaggtggagggctcaaatggagcttctcctggaacgaggggccaagtcaccagggtggctgaggaaagtgtcctcaaagcttagagactgtcacttcccaggtgaatcagctagccaggtaactgagctagatattttgtgggggtgtttcctaaacacagcctcaggaaagttgttttcgggacacctggaccagggagtcgtcgcctctggcttctcggtagctggagcgcggcccggagcgcggcgctggcacatcgcccccacacatgaccgtttcccattgccacaggcaagccgcctctgcagagctgtctcagggctctgggcttcattccctggaagttgattgtcctccactccagctgtttcccaaatccttccttcctcccagcacccctcgtgcaacgacgattccagctgcggaccgcatctgtgtcagttacttccaagccacctactgccccctcgcggagtgcgtggggctcccggctcgcagactcccacggcaagtagcaagcagcaaaaggcgtggtagctgcggcggtggaatgagacagttgtcaacagctggcgcagctgccgcgctgcgcaccgggactggcgagtacgcagcccaggtactgccccttcccagtgacgtctctgcagggggttataaaagcctcgtgcgcagctaactcgcgagctgagcaacccgaaccgagaggtgcccgcgaaactgcaggcggcggcagcggcagcaaaagagaaggaaaaatctccagctggatacgaagctccagaatcctggccataggctcagaacttttacaggtcgcgctgcaatgggcccccacttcgctcctaagtcctcacgcagcacagggctttgcctttccctgcggaggaaggagaaataggagttgcaggcagcagcaggtgcataaatgcgggggatctcttgcttcctagaactgtgaccggtggaatttctttccctttttcagtttaccgcaagagagatgctgtctccagacttctgaactcaaacgtctcctgaagcttgaaagtggaggaattcagagccaccgcgggcaggcgggcagtgcatccagaagcgtttatattctgagcgccagttcagctttcaaaaagagtgctgcccagaaaaagccttccaccctcctgtctggctttagaaggaccctgagccccaggcgccagccacaggactctgctgcagaggggggttgtgtacagatagtagggctttaccgcctagcttcgaaatggataacgtcctcccggtggactcagacctctccccaaacatctccactaacacctcggaacccaatcagttcgtgcaaccagcctggcaaattgtcctttgggcagctgcctacacggtcattgtggtgacctctgtggtgggcaacgtggtagtgatgtggatcatcttagcccacaaaagaatgaggacagtgacgaactattttctggtgaacctggccttcgcggaggcctccatggctgcattcaatacagtggtgaacttcacctatgctgtccacaacgaatggtactacggcctgttctactgcaagttccacaacttctttcccatcgccgctgtcttcgccagtatctactccatgacggctgtggcctttgataggtgagattagcctttgtgaaaaggcgagaaagtgctcatagaggaccacggcattgctgtgaggtttggaactgggtggggtatgggtcaagtggaagattggccactctgagggtttttttactgatcaactgagtcatttgttgatggggaacttcatcttatgtatttcaactttttttcctcttttttacccatcactctctctcttcctttcaacacacatcccccttttcttcatttaactcccctttcttcatctcttctccactcatcttcctgacactttcaacttctgctttgctcctttccatatattccttctcccctttacccttgcaggctgcaaacaatacctagggtttggtcaaaggactagaccctggaaggggctttgtaaattcctccaggcctgtttttctgtcagacagcctcttgttgccttcctgttttaagtacacctagaggattctgggactttctgctcccactgcaactctccagtttgttgttgtagttgttgttgttgtttggttggttggttcgttggtttgtgtttgtttgtttgtttgttttggatgtgaaagagcatttcatcagtatcataagatact

SEQ ID NO: 8345 - DNA, 6000 bp, Homo sapiens
caagagattaatacataggccgggtgtggtggtgcacacctgtaatcccagcactttgggaggccaaggtgggaggattacttgaggccaggaatttgagagcatcccagtcaacatgttgaaaccctatcactactaaaaatacaaaaattagccagacgtggtggcacacacctgtaatccctgctacttaggaggctgaggcaagagaactgcttgaacccgggaggaggaggttgcagtgagctgagatggcaccactccacttcagcctgggcgcctgggcaacagagagagactttgtctcaaaaaaaaaaaaaaagataaatacataggtcaaagtggggaggaagatgtgaacatggtctcattttaatgtctttctgggcctgataattaaaaggatttgcattcctcaagtaacagttttctcaatatcatcttgaggttacagaaagaatgggaggcttagattatggcaaaacaggttatggagtgggggagagagtcattctgttgaggggcaaaatgacttctagggagaatgaatggatgggaaatagagattaacttgtaaatagctttctttggaattgaaggagtctgagacacaaacatcttgtaaaagggtctgttgaggtatggttacattcttggtcttctttctgtaatagataatgagataccagagaggagaagaaaaacaattgttcttggtgggtcctgactttaggcagataaagaaacttcagggaacagcttcgtcctatgctttgggagagacaggggttgggcaggggtagaggggaaggtcagatagaccttaagccttcttcagatcagcatgtcaaaatgccacattttggggtaacagtttctgagccccaacagcccttataggtgacctctctcccaagaacaactcttgccagcttttagaagcactgctttcactctttgccccttgttaaagaaaaagttattgcgacacttgccaaaatggtaaggatgatttatttcaagactatagcaacaggggctttgtgatggggaggagcaatcacgctctactccaaatacaacagggataagtgaagatttacagcccaggtgcagggtaagggtcagtggatggaaaattactaagaggagatatcagtgctggcaggattcttgctaaacccttctaaataggattcttgctaaaggcagaccaagggcttaaatatcaaaggtggagaatgaggaactgaagcagatatcaaaagtgatgagatatcaagagtggagtaggagatcttcctaaactcacttcacaggatccttaccgagactgggctagggaaactgaaaacaggacggggggccaaggtcaaagcttagttgggaagagggctagaggagcctgactaaactttagtcaaggagagtcttcgtcacccttcagacttcctgttgccgatccctccacctcaccatcccttgctggttcctgcctaccctctgcacatagtcctttcattaaactccctttgattaaaccgtttgagccacagtttctccttcttctgccaggcccctgcctgctcatccctacctacctcacagagctctgttaattaataagaagatgcacacaaaagagcttgtgaagcctaagtacaaggagaccatctccatgttggagaggaatcccagtaccatgcaaagagctctaggcaccaaggaaaaacttcccttttgccctctgaagttccactgaaaatcaactgaaaaaaaaaaaggcagattcataggcgaaaaggcatgcaaattttaaaatgtgcacaggagtctttcaaaacacaactcaaagaaatggccagagggtggacgctttcatattccatcttgaagttacaggaagaatgggggcttatggtgtgtggcaaaataggttggggggtggtggagaagaggaggcctggctggtaaagttgggcttgttatgcagatgaaacctcacaggtagcaggcctaagagaggacagattgtgtgtgtgtgtgtgtctttcagacagttaaggtgttgaactctcagttaacctttcttagatctggatatgggaggttccacagagaaagcctggctgcatcagtgcagagttctctctccagatgcaatctccccagtaaaagacagccttgcagggctacttctgtttggaggccctctgaacagccatctcaaaatatgtcaaataatagagtgaaatattttgtttccttcacgacacaggcttgggctcagtcctgaattcaaatcctggctcctccccttattagctgtgctgatggaggcaagcacttatctttcctaagcctcaagttcccatctcttttatggtcttggaggactggatatgataacacacccgagcttcctaacagactccccagcacacgacaggtggtaaatatatggttagttttcctacctcttcccttctacccctattgtgaaattgtcttaggcaggttttaaggacctttcagggagcacttcaatcccttttctcaactctctgagaggcagagcttcccatttaagcaagaatggcttgctacaggccagaaatgtattgaattgcccagaactaatgttgttttgttttttcatcagatatcacgaagctctggtataaagcacggattgcatttttgtgttgttttctttttatttatttcaacgccaaacagccatacgcagcgttgttacagaaaacattcaaacaacacagaaatctgtatagtaaaaattgcaagtccttacctcaggcactttgcgatggatatttagggtgctgcggttcaagcagcctaggaaataacatttttctttctagcctgaaacttgaaccaattgagaaataagatcaagacagatgcggccaaatatcactttataaagtcagtattgcagaatgtggtttatacttgtaggcaagtgggtttcctaactaaaccccagaattagagagacaacagttcatactggaccagttccagtagagcctcgaccactaatcacagcctggcccagggaaatccagttacaggctctctgtaggggggcacactgtcaaaggaaggagagaggaggggaccgaactcatgccagttccttattccaaatgcatcaatcatgtaagctggcctcacctgtgtatacgtgcctgcatgcatgcttgcgtgtgggtgcacatgagagagaggtgggggatagacagacagagagagggaaggggtagaaacaagtcaggagcattatagtaatgactgctgcccatgagaaagaaagaaataagggtgattccctttccccatatatcatctcgtttcctgccactgtcatagtgcttccgcaaacatccttgcacatttcattaggcccttgggtgagtatttatgtagaaagagtttctagcagggggttggtgattatgtatactttaggtttgatgtgtactgagcattggttttggacctaggagctgaatggattttcctcccttttatttctgctgggatttaccagcctcaatttactaatagtctcttccggtagggaaggctgctaaggacaacacattgttaccttaacagctgcatggccttctgcgtaagggccagttacagagagtcgggtcagccatgtaagggtagattcaggctttcctgtctgagcctctgagttgcagtacccagacatgtaatgaatcctcctccacctccaatgccctcctctgtcaaatggacatcgtatcacctaggggtgtgagggagaattaaatgagctgatgtacttaaagtgcctgggagaaagatcaagaaaggaggagagagaagaaggaagggagtgggcaccagtgcagactaaggaaaattgagtttgcaagacccatctagtgctgggcccagtggctcatgcctgtaatcccagcactttgggaggccgaggtgagaggatctcttgagcccaagagttcaagaccagcctgggcaacatggtgagactctcttttttatgtaacagtaaaaaagggccatcgccctgtactaagaggccaaaagagacgccttgtactaagaggacgtcttgtactaagagacgccttgtactaagaggccaaaagcaaacctccaggatacacagcaccgatggagagggctactgggactacctgcctgaggcttaaatagcctcccagggggttcatcctcaggacggtccccagatgcctgagtgtaccacagatcctccttggtcatcatcaaaggaggagttcatgggagtgaaacttcatggaattagcgctaatgacttcaataatgaaaaaatcggaaataaagtgcaaggtagctatcggggggaatagatgcaatgggcctcgactgtgtgacaactttcagtccgagagtgggtattatcagacgtgttgttagggatgagaaagccgaggcttacaaaggtgacctaagttgcccaccggcccccagcgagcttgcgctttctgtccgtggactccagagacagtgctctttccggacccggggttgggcgggattgccgcgtagaaggctaagccagcgtgccctctcctggcctcctccagcttgggcccagcctgcgggagccgactccgggtccccgcgccctccctctgcctcctcccctgccagcctccgcgccgaccccgcgccagtccctgccgggtggaggaggcgcgccggcaaagccgcgtcctgatcaatggggcgggcggcttagcgcgcgcggccacctggtccgaggaggagcagtcccggggcccgccgcaggtcgggtggctcagccatggctcctcggggcgcagcggccggccggagcccgggaccctgcgcggggcgctgagctcccgagcgggcagagggcacgggcaggcggacgtcggggcgccctcggggaacgtgcgggcaccatgcgtccccacctgtcgccgccgctgcagcagctactactgccggtgctgctcgcctgcgccgcgcactcggtgagtactgcgcccttctgcaggctggggacccgagggagcgacagtctcgccctttctccggcctcgggcaggatgcaggtggagagggactagcagatcttcccatgaggaatagggactcttccctcccaatcctcccaacattaatctctcccagctcttctccggagggaccctttcccaaagaaaaacatcgtgcgcgccagacgaaggcggctctaagatgaatccctgtgcccaccaccgaccccttcctctggtctggcttctgaaactctcctacacggaaattctggagccgcccgtggcagtgcctactgtgtcctgggcgctttgcctccaatctttccttgaaacctggtaatcacctttcgaggctgctattatcaccgtcactttacagacaaagaaaggaaaggaaaggagaggagagggggaataaaaattcttgctgcaagtcagaaaaagaggattggaacccacatcagtatcagtctgcccccaaaccttgacattttcacactcacgggctgcggatgggaaaacctgagggagctctggcaggagcttctgggtctgcgatgggaccgcctgccgctctccccacaccgtctcgtgtgggatgcggctccctaatgtctgcgtgcctggtggctccagggcgctgctgttccccaaagccaggtcctggcaaggggctggaggaggaaaataataataataataataataataataataataataataataataatagcggcaggatgggtggtttgtttttctttccaacagaaattcctgggagtcccgggcctctctgagctccgggatctctgataaagagagtggccccacccagaccagcagaaaggaaggaatggggagggagtgggggttagaggtgggggccagattccagaat

SEQ ID NO: 8346 - DNA, 6000 bp, Homo sapiens
catacacacacacgcacacacacacacacaagtaattcccaccctgttcttttgctaatataatattcttggaagaatgacctcagaaatatctcaaagcccatctgtatgggcgatcagatcaccacatttctgggagcaccaaggctctgccatgggatgcccagttctctttataaaacttgacagtccacagggctctaggcgcttcctctttttatatagctgtctgaggtcaccaccaataaattactggtttaaggaaaacaatgacaagcctattccatggaggacagggttcactcactcaattatttcctaaagcagtaccctccttcccagtttgacaccatgatttttgaggcaatagcaccgagcctgtttgctgctgttctttacacccataaagccacacaagcacctgccacaggagcacagcaaactttgtgaacagtcatcctcctggcagtggaactagtagagtaatgatcattgcactgttaattaagtggctgttttgtttaaatgacttaccaggatggctctaaattgcctatatttgtttactagtctagtttattctctttgtataggaaatttgttgactagtcttgactgctataaagcattgatggaaatcactaatcatcccattttagtgaaggcagaccttttcaacattcaagatacaacttaaatctagagtaaaaatggctctcccccaaaaaacagtaataatttcctaaattggtaaagaactgtaggatggaaggtttgggtttgttttcaaagtcacttttcatctgtaggtgttggagacagaaggatttagggaaggaggagagggcggggtgtggttaggcaagggacaatttgttccacctaacaccagcttggaaatagttgacatttgataccattgtctctttgagatttgtaaccctgtgttagaattacttgcgccttgagaaatagtctccgtttttgttttttttttttaatcacttaggaaaacattaactttctctaagtatcccttactactgtcaaggaagtttgcacttttttcctctttcagaaacaaaagcgatcaatttttttagagacaggagaggggccagcgaaggaaccagaagaccctgtgtattctgaaggcctttaatgcctcctgccatccacctcctcctggcacctcctcctttctctaacctcctgccatccaccactgggaaaaggtctgttcctaagctttctgcctagctaacatgaagccaatttagggacagagtacagcttttcatcacacacacacagatacacacactcacacacaaatcaaccagctgcagagcgagcaacaggaggtggcaggatgcttgccactgtgtcactggatttgtaagcatcccctccaaactgtggccaaggctagttattccctgggctaaagccaacctgagaagttggggaccctgccaaatccctgacagcccctaagcctgactctgttgccagagccacacaggaaagtcattcattcttttaagaaaggttcagtaaaagattaaggagcccagtatttgttcagcaatgggctagctggatagaggatatctgggcattcactttaaggaacctaaaatattggagggataggagtatgacatatactcatttaaaagttgagtaacatcacaagggatgccactcaaagcagtatgtacgtaaatgccaaatgacctgggcttcagagccagacagactgggtgcagatcctcattccggggtcacaggccagttcctcatctttccagaccctaatttctttaccatgtaataaaagtaatggcacctgccttgtagagttattgaggggattatatgaggtcagttgcacataacaagcgctcagtaaatgcttgagttttgtttgttttttaaagaacatcatagaatagttgagaataaggtttaggtagcccagtggaaatagaagtttaagattagcccattggaaaacaagccttccttgaaaggggaaaggactattgtgaaaaaagtctgacatcttagtagatactttagaagtggaaacatacatgaaggaggccttctgattccctttttgtcatacaatttgttggcttttttatgaatatgaaaatgattcatgtctattacagaaaatctggaaagcatagaaaaaccccaggaagaaagcaaaaatcaaatataattctgcaccaaggaaaacgcctataaacattttggttttcctccctatattttccaaatgcatattttaacataactgagatcacactatatacacaattctgaatcctgccttttgcacttaatgtttcataagtatttccccatgtcactaaaaattcttcacaaataacattcgcgatgtccatatggaatttcagatgtggatgaaccaaaatcttgtcaactattccactaacagtggttatttagggatgttcagacatttcactatttaaaaaaaaatgtttccacaaatacctttgtggcataagtttttatgagtggagttactgttctgaagttcctgctgaatagaaaatgctttccagtgaggctgtcccaagccacattcccatcagtgacaagcgagagacagctggtcttttcaaatccggagaccaaatattatctttgaaaaaaaatggatttttgcctaatttggtagtcaccaaatagcatctcattgttcttttaattatctgcttccttttagtagagatccctaaaaagatctgaaaggagtcttcagataaaggaaggagctttcttttgtctgtctacaatcaacaaatatttattatgcaaaccattttgctccgagttttctcctctttccctttttggacagatttgggagatctcacctttcaggttttagacatcgtgcagggaggagttttgaggtagggtgcagcttacggtccaggataaaacatactgattctgccactaccaggctttgtgaaaagcaagtcatgaaaacgctctgaaattctagaccttcagtagataggatctaccgtgtctataaaaatatgaagatccttaagttttattaaagattcgaaaaaagtaaaagtgtttttacggttttattttcatttttatttcttaccgttatcgtttattataaaggatattataaaggatacagatgaagagatacgtaatgcaaggcctgtgagaaggggcgtggagcttccgaaacctcttccagccaccaccctccaagaacctggagtttctttttttttttttaattctacaaatgtaatattagaattgattttatctggccattagtgtgtgtcctaactcgttcgtttctgagagtcccatctcccggcccggatatcatctttcctgtgtcagtgaaagtgcagagtagatgagaacctttaaccaccaacattagggaggggtcccagacaaagggggaaagtcatgctctgtagagaaaaggttccctgcctccgaactacctctggaacactccagactgaaatgtttcctcttttgatatagaaaagagggatcgtgtgtagagtgcagtctgggcaatccctctcctcgggaccatttcggggtgggggcctctggggtccgtgtcgcgacgcacgcgcctcggtcccagctatctccgcagcggccaccccgcctgcggacgcagtttctcggccccgccccacactcgctcccccgccccacccagtctccgcgccggagggaagtggcgcgagggggaaagcactgtctgcgcgcccactgcaaacctcagccagtctgagatcgctttaaacgtctgacccccacccccactccgccccgcccagttcttcaacctaatttctgattcgtgccaaagcttgtcctctgctcaaaatcgtggaagacgccgagtatggggaccgaagacctgggttcaagcccggcttggaatccctgcccatccctggcatttcatctctccgggcttatttgctggtttctccgaatgcgggccttgtctggttcacgctggatccccaacgcctagaacagtgcgtggcacgcagttcgtccttctataaatatcggactaaatgcatctctgtgatggtaatacccacacggtgttgtgagaatgaatgagtgattctgtgcaagttcctagtgatctgttacaaaaagtactggtcgctaaattactcttataataaagcatacttttaggataataaagcactattcgcgaattggttaccgctattatgaaattactgagcaatacatatctacatctgatcagtctccagaattatgccaaatcctaccttcttctgaaagtatctcctaattatctgcacctgaccctagtgatgctgtgaatgtgcaagtatagctacatcctccgaaggaaggatctttactccttttacctcctgaatgggctgcgtctgctgaaagcgcggggaatggcgttggaagcttggccctacttccagcattgccgcctactggttgggttactccagcaagtcactccccttccctgggcctcagtgtctctactgtagcattcccaggtctggaattccatccactttagcaaggatggacgcgccacagagagacgcgttcctagcccgcgcttcccacctgtcttcaggcgcatcccgcttccctcaaacttaggaaatgcctctgggaggtcctgtccggctccggactcactaccgaccacccgcaaacagcagggtcccctgggcttcccaagccgcgcacctctccgccccgcccctgcgccctccttcctcgcgtctgcccctctcccccaccccgccttctccctccccgccccagcggcgcatgcgccgcgctcggagcgtgtttttataaaagtccggccgcggccagaaacttcagtttgttggctgcggcagcaggtagcaaagtgacgccgagggcctgagtgctccagtagccaccgcatctggagaaccagcggttaccatggaggggatcagtgtaagtccagtttcaacctgctttgtcataaatgtacaaacgtttgaacttagagcgcagcccctctccgagcgggcagaagcggccaggacattggaggtacccgtactccaaaaaagggtcaccgaaaggagttttcttgaccatgcctatatagtgcgggtgggtggggggggagcaggattggaatctttttctctgtgagtcgaggagaaacgactggaaagagcgttccagtggctgcatgtgtctcccccttgagtcccgccgcgcgcggcggcttgcacgctgtttgcaaacgtaagaacattctgtgcacaagtgcagagaaggcgtgcgcgctgcctcgggactcagaccaccggtctcttccttggggaagcggggatgtcttggagcgagttacattgtctgaatttagaggcggagggcggcgtgcctgggctgagttcccaggaggagattgcgcccgctttaacttcggggttaagcgcctggtgactgttcttgacactgggtgcgtgtttgttaaactctgtgcggccgacggagctgtgccagtctcccagcacagtaggcagagggcgggagaggcgggtggacccaccgcgccgatcctctgaggggatcgagtggtggcagcagctaggagttgatccgcccgcgcgctttgggtttgagggggaaaaccttcccgccgtccgaagcgcgcctcttccccacggccgcgagtgggtcctgcagttcgagagtttggggtcgtgcagaggtcagcggagtggtttgacctcccctttgacaccgcgcagctgccagccctgagatttgcgctccggggataggagcgggtacggggtgaggggcgggggcggttaagaccgcacctgggctgccaggtcgccgccgcgaagactggcaggtgcaagtggggaaacc

SEQ ID NO: 8347 - DNA, 6000 bp, Homo sapiens
atgggtggatttcatatatattcctggtttaataaacgatcatcgttttaaaatttgttttagaagattttcatatagccaaaatacatactttgtatattaattttatcaagaaaaagggaaacttttctgcacagaaaaaaaaaatttaaatcatgtgtattcttaccactcagagataattactgttgcattttcctttagcatttttcctatgcatttgattttaagtaatagaaaacccaactcaaacttgtttaaacaatgaagaaaactgattggtacacatcaatgaagagtccacaggccaaccggtgaggctgctttaggtggggcttgaccccacaactcaatatgtcatcaaggtccctgtttatttccttctctctgctgtggctaccttggtctctgcaccattctaagactggcttctcttatggttctaaaatggctgtcggcatcttcctcttgtctagcaagaaagagaagatcagcattctctgcaaaagtcctgaaaattattcagctgagctacttcaggatcagtgcctaccctgactaatcattaagtgcaaagggatgaaatacactgattggacagcctacattagttacatcatctctgaagggagagtgaagtcaacttctctggaaacatgaatccctaaagagaaaatgatgctattgggaaggggaaggggagttttaaagaaactaaaagtttttaaacaaaatctggcatcgtactagacatgttcaaacagcacattttaagtcactctcttttatttttctatgctttactcaactttgattagactttatagatggcccagtttccactttttcgaagaagatcatcctcaaaatttcgctagggagtatttaataggcattaaaaatgatataaatctatctatatgaataaattgtttatggattaaaaaggtattactaaatgagaagtgactaaaatcatgtgtatgaaaatcatatgtataatcctatttttcttaaataatctatatttgcataaaatgatacatatatggtataatattaaagaagttatccataggtatgattttcactttcttcattcctttctgtattatctgaatatgttatcattgttattactttcatagaaagaaacattagaagtacttcattttggaaaagataaaattcaccaggaatccacatgtacatcatattgcctcaacatatatcctacatgacctttgtcattgtatcaaaccatttggtttgtttctcctgtcaattttgatcagcgggacttgagggaaatcgggatatcagtgtgcttgaagtttataggtcccacttatttgtaaatgaaagttatgattaatttacagttttccctccattattctgcattacttttagcttttcttcattttttccagttaatagtatagaataagtcagcatctcacagaatgattagcagatatggcagtggaattaagttagtttctcgtggcgttcattggtaactacttctctgagggtgactttttaatgaagtctttcatctttgtttacattttgttcttagagtttccttccacaagctgctctgtggaaggaaacctcaccaatgaggtttccacaagaaacttcatcaattctgtacggatgtcttctcaaaccatatctttatttctgctctttctctctcttttctgttttctccctaggggtctaccggaaatctctacatacatgtgctgatgcctttatgagaagtttgtttacaggacgggggggcttttattctcattctctgtcatggactagttgagtgttcttagaccaactgcttaatctcctagagtctcagatggagaggatgataacttcaagagagaaaactgaactagaaaatttctcaaggttttagatttgaggtctaaaaccacattcattattttctccttgaaactgcttctcccactgaaatagttcttcctttcattttcaggtaacagaataatagaaaacaacgaaattttatggctggacaggatactagaagctctctagctcaatttcttttctttattttaatggatgaggaaatacataagcttgttaaatccttccttctctctctctctcttttttttttgtcgttttcagacagggtctcactctgttgctctgggtggagtgcagtggtgcgatcttggctcactgcagccttcgcctcctgggctcaagcaatcttctcatctcagctgcctgggttgctggaaccacaggtgtgtgccaccacaccccgctaattttttttttttttaaagaccaagttttgctctgtcaccaggctggagtgcaatggcacgatctcagctcactgcaacctctgcctcccgggttcaagcgattctcctgtctcagcctcccaagtagctgggattacaggcgcacaccaccacgcccggctaatttttgtatttttagtagagatggggtttcaccatgttggccaggctggtctcgaactcctgacctcaggtgatccacccacctcggcctcccaaagtgctgggattacaggcctgggccactgcgcccagcctaatttttgtattttttgtagagatggggttttgtcatgttgctcaggctggtcttgaattcctgggctcaagtgatcttcctgccttgcctcccaaagtgctgggattacaggcgtgagccaccttgccctgtccttcctcctctttagccctatcagtaactgagtctcatcagttctcccttttcctgtctctcaggcctattccattatttttactgtcatcacccaagagtaggtcttcatttccttatgtcttggttcttctccaagtcaccacactgtttttcttgccttcagtctctctttcaactaatcatggtacagcttccagattacacacccacaaatagtgtgatcattctgacatgttcctgtggggaaagaaaagttacatgttttactgtggccaaaggataaggttcaaactaacccaaggaacctcctacaggttgaccgtaacttacctctgcaggcctatcttccagtattcccctgatagtcaatgctcaataagtatttatttaattgaattaatcttcatacttcctaaacaaaaatccttttagccttgagataatttagatcttcaattttttttttaagtagtcaggttcaagggaaacaaagaaggcagttaaaagtgaggaagacagagaacaaaggagaagcaaagagaactggagcaggatccatgccttttatagctttaatttctgctcatttttcctgctaagtttcagatcctttaacctacccttagcttactgtaatttttcttaataagccacacaattttgtatctttgcactaagatggccgagatgataggaagacacggaaattgccatacagaaatgtttaagatgcaaagcaagataaaaggttgtaaacaaatgcttgtagatatcttaagtggaaacatatataaatattttaaaatttgaaataatttttatttcaaaaggctaactcaattgcaggatttcttcaggtttcaaagtggagcaccatatttgggatactatatataggtttgttgtctgatgcccatggcaagttaatacactgggacaccaggttgcagaagagaaagaggtttaatcatagggccaccaaacacagataggaggaaacctcaaattcgtctccaggaggactttgagtctcaggttcttaagggttttagagtggtcccaagtgtggagatcattaattggctgaagagtacagggcgaagtcatgggacagcgagatgaagaagctgtattctcatgctgattcccttcttctgtggcaggggtcttcaagctggctggcatcagctgtttcgctggaatttggcgtctgaaaaacattttaagcaattcttaaaaagccttacgactcttaacatcagaaagcctatctatagggacaacgggatacaaatgtactatctagctctacccgactttcgggttacaaggaagtgggtcaaagtgtagcctgattaatgcttaattatatttttgtccagaattcttataaaccctgtgaggatagtttcaatacctttatttcaagaagctttggaagttttccatcaatgtaaccagtttcagtatactgagtggacatgcatgtagttccccacccccaccccacccccgtaccgcaatagaatagaagcagtcatggacggggcccagattctaaaacaagctcagggctaagggtttacattttaatctcttatgtaggaacgtcaaggtcacactgccttggtgaaggtggaaggcaggattttgacccaggtctgattctaagcccttgctttaaaactctatgctataaaaagtcctgggctaaccgggagcgaaactggcagatcacacgaggttgaggttaagcggaaagacaagtctgctctgcgtctgtacttgggaagaggaaaaaaaactggacatcccccacggcggctaccattttgtgggagcagggaagccggaagtcccgccccggaggatcgcggctgggaggctcccagccggcagggcggggccgggtaccctggggctccgaggctggaggagggggcggggactgaaggcggggttggggaacgtgtggctcggaggcccgaggctgtgggtggggcctgagggcgggacggagactctgggctcaaggctcctggaaatgggcggggctcgagggcgggaagcggcccgtcttgctggaagttcggggctgggggcggggtctgaaggcggggctgggagggagcggggcctgaaggcggggcgggggcggggcctcgcggccggcgaggggctgagctgacagggccgcatcggcttaccccaccttactttatcggaacgtgcctaagctgctgcagctggcacccggttgcgctcggcgaagagggctgggggcgggagatgacggtggtcttctccctgcttggcaccctgcgagcaccagctcccttctcctcgccactccaaggttgcagacgaagcaggtgagaggggcccctggagcgcggacctgctgggtcctggttctcccttgcgggcacggggtacccctgcctctgcccctcaggcctgggcacgtgggcagccgccgaccctctgcgccctggccccgcggcccgttgtctggacctgctgtctctgccccgcagcgcctgcctgtggaacgtgtgagatcacccgggaaggctcgcgcgggggagggggtgtctcgtcccctccggagacagaactgccatccctagtttgggaagctcctcactgcacgggcgtccaccctgtctttcttagactcttccctttatcccgagggtaccctcagtatctggcccttccgaaggcttctgcccaggcacctggagcactgcgccaaattttctcccttacccgtttttggggtatgttagttaccatgacgttgtgactcccgtgccctgggaagactagcgaccacctttttcttacgccaggcaaagacccctggctgcctttccacttccacagctgccttcccaggggttggctggcagctgctctccgagcagcctattcggttaggaactctctgcgccccttatcttggagggccacagtctgtccctgcagacgaggcaaggaggcagtgctcagcgctccctaccctgggtctctagggaggacatttggcgccctgcaagtaggtaggagtgggtgaatggtgcgactattaatgttgaagagtgctctaatagtaccacactgtattacacttatcccacgggataaaggatgttggatgtttgagaaatagcctgagagtttaaagctttctctatgaagttagtcaaccctcgccttccccccgcattttcacttaatagcagttat

SEQ ID NO: 8348 - DNA, 6000 bp, Homo sapiens
caaatccatcatacatttcaatatatgcattacatacagttccatagtcattaatgtttaaagtctcactgtatgttattgactaacattaaatatgaataagcttttaaagaaaataaaaatataagttgctaatgtttttacaagttatataaatatgatgatagctgaagaaaatagttcgttataactggaaagacatgaatactatttggcatctttagaacttaatgattaaattatttatgtaaaatatagggattggtcatttaatcaaatactacttaagtcgaaatgcctaaatacaaatataaataaaccttttattttcacaatcaagattgatatttagcaaataagaggcatttcagaataaatccacattaaatgcatatccagaattaaaaagggcatcttttttgatgctaactaaaaccatcctagaaatagtaagaactattttaaactcttctggaaagaagatttgggtttcccaaataaattactcacacactcttagtatttatgtgctacttgtcattgctctattgataagtatggctaagttcaccatatactgaataatatttttttcttcaaaccagagcatttttgagcctgaaattatgaattgggactgccccagaaaactaggacatatgatcactctattgaaggtatttcccctcagaaagttcattgtgtactcccatttaaagtaagcatttataattttgttggatttaaaaatccatttgaattagtccatgacatagctcactagccagtactagcactttattctagcaatagccacccctccaacactcatgaatatctgtaagaaaatactaagttcgcaggaagatctaaatccatcaggatataagaatttttaaaataggcaaatgtttggccaattattttttatgttacttggctttcttgagaaaatacattattaaatactgaaagaaactctacatataggctataaaatagttttatttatctgtatattaacctggtatacatttctgtatatctgacctgatatatatactgttcatttcaaacatagttttctgcaccttccaaattcttattcatagtaactatttttaaaataatattgtaatcttctttaaaatgatagctatgtgcccaattaaagtgaaaaacggccctttggttttagtaatagataatagcatattcactctcatgtcccagacattgtacccagattcttttactaaatgcaatttatttttgttttgaaaagcaacttgaaaagtgctaacagcaattgctaggtaaaataataaaaggttgggtcaacttatttccttgctagaagtagttttttaatgtaaagcttttaaacatataagcttctgatgtaaagtttatgtgtttctcctcaaattattggtgcatttatcataaggcaagttatatataatattgctgactgcataaattatcaccaagtataagtaattgctttcagacaattaagaacacagaagaattattaacataaaataataacttttaaaacttcagaataattattttaaaagtctttcttttgacttgttcttgcactctcactagggaaagtctgtccttaatatatttcctgtaaaagtgttctgctttattttgtttgttcttgtggcaagaattatgctccaaggcagtatccatacaaattcaaaataagtggtcagtttggtcagtagaaaattaaatttgtcaaaccacattttggtctggtttaactaacatattcaatataaacagtagcccagaaacttggagttagcctactcctaattttgagtcaacttgcatttgacatagtaactagtatcccctattggaagaaaaggtcgcttgtgagccttatgtgtgagcacaaataaaagcacaaatcctgcatgtaggatgctaaaatgaaaatgtgtgactgtccatcattacatgtatatatttctacacttatacaccactcctcacttctacagaaaaccttattgcagtgctctgcatcattacctctagattctatgttagcagcatcagttgctaatttcacagaatttggcccttgacttctcatgtgctagtcaatctgttcattaaaggactagatagcagggaacattctatttttacttatctcactaaaacacagttagcacattacctagctcaaaatacaaatttggtcactactaattaaattattgcaagtggctttaatgtcttctgaagaaagattataatatataaatccatataatgccacgttggctcaaaattgcttcattgattattgaaatgttttcatttagctctgctacagttttccaaacatttgccttcatgtttcagtaggtattagagaagtttttatgatctatcttatcacttgctcctacataacttagaataccctgaatgccttcctggaagtccttgtaccatttattttttctgaagtttataaaatggcagctcttgaggattactaggatgcaattttcctgttatgtctaaataagaattaaagatgatattaataaaatttatcaaggagtcttcatggactacagccatgggcccatgtgtacgtcaacttaaatataaatgatacaacttctactagacaccccataaagtatagcacttgatagagagtagaagagaaagagcattggattaagggtcttatgacatgagctcaaaacatgaatttttttccttcagtagaccttactagtattgggcaaatgaaatcaatgaatctcaccaggcgcaggggctcatgtctgtaatcccagcactttgggagaccaaggtgggcgggtcaccttaggtcaggagtttcagaccagtctggccaacatagtgaaaccctgtctctacaaaaaaatacaaaatgttagctgggtgtggtggcgggcgcctgtaatcccagctacttgggaggttgaggcaggagaattgcttgaacccgggaggtggaggttgcagtgagctgagattgcgtcattgcactccagcctgtgcaacaagagcaaaaactccatcaagaaagaaagaaggaaggaaggaaggaaggaaagaaagaaaaatgaatctttggaaagacgaaaatatcaatgcttttataaacatattgggaaaagttttagttttccatgatttaattaaattcaaaaactatatattaatctctttataggattcatatattacacttagcatggaagatgagaagacatgacccattattactttcatattaaatctagtatttgtttttctctgaatttcaagatgggaacatgaagcctaaaaagctttgtcaagatcacaccagacagtatcagaaccggttcaccagtgtaactcagtttcttacaagtcttttctattaaccataattatagagatgaaagtatatctattttttatatgtctgtattttgtaatcaatattgatctcactggtcttaaaatcaaagattgtataaacattttcttccactaattcagacaataaaaatgtcaacatgagcaccctgctttaaaaacatgatattcctgaatttattttgcctttacctcctttgtctgcctacaaggtgtatggcacctcattttatcctggaattgcactaacaatttactaagagttgaatgatcctcaccgtatcttatctatttcaaaatgttatgaaatttgtcgattcaaagccttagacataaaatctatctcttctagtttatagatgagaaaatttatgccctgataaattaagtgacttttagtgctgtttaggttatagggattataattattgcttcatatcgaacatttaccaaattataaaaatgataaaagcattttaaatttacattttcccctgatcatatccaatgatgtattaaacatattcaggaaaaactatgctttgagatgaaattttgtctaagaaataaagtatcctttgtatttatattattttataatattatgtttacaacatctatattttctttaagattatattgacttacaaatattgtggtataaattattttatattataaataacataattataccaaatatttttaaatgtgtgcaataattttaaaattatgaattattcaaaaggctattttgtcaaatatatatacttatatattataaaagaaacactctatacacacacatacacaacctgaatttataacacatacactcatgttcttatgaagaaggtaaaggaaaaaataaaagatttaaaaactgcaggataaagtttcttgatctaattaactgattaggaactgcacttaggaactgatggaggaacagcacccaattagcagagctccaaattaagaagagccaaatcacaaaaccagttatgatgaatacagttaatttttttttctgtgttgtgctatgaacacagatttgttagattttttttcctggatactttgtaagctataattcaacacacacacacacacacacacacacacacacacacacacgcctaactcctttgattctttgagcagaatactatattcagatttccttcaaatcacaagtagcttgtttggcaagttctaacagaactcagtcaaggtgaaagccagccagctttttactggtaacaatgtattcacacagcctatgatctctctctgttcaggctgcttcttgctcttgtctcacaataagaaaggagtgctgctttcctggggtatgctatttgagaaagaaagtaacctaacactaactgcaggcggggtcagagtgatgtaacaggaagctctgatgtttcccttctgctgctgatcacttacaatctgacaacacttacaatctactcagaacaacctctctctctccagcagagagtgtcacctcctgctttaggaccatcaagctctgctaactgaatctcatcctaattgcaggatcacattgcaaagctttcactctttcccaccttgcttgtgggtaaatctcttctgcggaatctcagaaagtaaagttccatcctgagaatatttcacaaagaatttccttaagagctggactgggtaagtgcacattcaaaataaatatatttattctaagtagtattctcatatagtttggcaatgtttctattatagaatttagtagatagcactgaaataatgttgaaacatagtctcacttatttcacatgctagagaaaatacagcctactaccccaacatgaatacaaaatctaatactactagataatattgtttaccatggtattctagaaaataaatttagcaagtattaaaaatctaaatggattaaaagacatatttctgaacaaataccttaatcacagaacaatgtcttttaaaattagctctaatattagctaagcttgaatcttgacaactggaaaacatttctccccccggaagggtctttaaactttccatgttatcagctgtaagaaagaggtgaaagaataactacttaatgggtctcggagtctcacttactctgtggttgatcataatgcagagttttgaaaagtaatcactttgtatttattacatttgcttttatttgcctttcacctttatttacacatatatctgtaactactgaactaatttttgtgttcattgttgccagatgtgtttaaatctctcttctgctaaccctgaactgtttgctctttatttggatcatggtgtcggctacaaagaaaaaaaaaaacctagagtttaggaaatgtagatttttaaaacaattcttaattttgaaatctttaagagaatacttcaacttgactggttcccctctgcaagcttttggaggggggtgtgataccacgatatctgtggataaagaaacgtgacagctttcccaaagaagtatattagacgattaaacaaagaaattaaagt

SEQ ID NO: 8349 - DNA, 6000 bp, Homo sapiens
acacattcacagctgcagtgagcccccaggctaccaatttcctaatgaaaaatgcaaaagtagcagctgaacaagtttaaagaggttgagaaaatatgctgtcttatctgatccttttcctttcctaaaatgtggcattttggaaaaatccagatacacttacatcatagccacaattatctgcagtttaatgagaaaagtagcataattagagtaggtaattgggagtgacctgaatgtccacagcagccctttctcttaaatcagggccaacaatggtgtcacccagatgctgttgactaactgatgtacaacagatttacttaaccactggcaaaccacatttccttttccagggcaataacttaaaatattatgtatttccctttgttgcaaagagaggaaatacttcttcctagactcagggcagctgtgacccgtcctcccagagaaatcattaaaccacaaggattcagacagagcccagagccctgaaaactttggccacgcactttcccgcagcagccacaggcaccggcaacttcagagaggtgagtgcttgctttgccccccaaagcttcacaccccgcgcatgccttgtgtctgagccagtatattgtagttaagaaaaccaacctaaaaatgctttgtatctggatctcttttgaattcgtatttggcatattaaaagtgaaggtttattcaaattagagataaaacagaagctgttccccacatttctacaggtaattagaacttcggaaatcttagtggaaaagatggagaactaagtcctccgcagactttcccactaagtatcctcaagaatcactttctgcatcgggcaaaacagaattagaagcaagaatctagacaaggcttcgtcctcatttagaagcctttaagaattctctgctttaagtggatgaaaacgtccctgtatggctgggttgccatggttcctcgctgtgacccccagggctactgagcctgccatgtgagtccatttcagtctctggaaaaagctttgtgtgtctccagcctcacagtttaaccaagtaagggcctcctaagtctaatctccaatgtgactaccctgaagagccagccctaagaaaggcatttacacaagatagtcatcaccctgtatgacaggaggaaaaaaattgaagtgtctttgtttttcataaatcagcttctttgtaagaaagtgtccttttgtatatctctcttccaatgcttttgttccggatagattttttttttcaaacaacaacaaaaagattagaatgatcactgacaaaaattaatatgacttgatgatataatattctcccaaatgtctatttctaaaatttctatcatcagagtttttagatgtttgggagaaatgtgctatttaacgtcatgcaagaaagagaaagaataatgctaaccttaatgatatcaaaagatgaaaggccaagttggcaaccccaatttttctcatggggttgatgggaggggaggggatgacccacttaaaatcgcccaaacctttctcactattaaagcttcattagattaatataaatcttctcttttacaatgtaatatcttcaaaagaacagttttctaatagtgatagttcaagcattagtggagaaatgctatttgtatgaaatgggagatcctagtccccagaataatatgatagcggcattgtgtatcttccatctctgagcccagttggccctatagacctgcttgcacacattcttctgtcaaaaacctgttgagaccaggcatggtggcccatacctgtaatcccggcattttgggaggctgaggcaggaggattacttgagcccaggagtttaagacctgcctgcgcaatacagtgagaccctgtctctatttttatttcgagatggagtcttgctctgtcgcccagactggagtgcagtggcactatcttggctcactgcaacctccacctcctggttcaagcaggtctcctgcctcagcctcccaagtagctggggactacaggtgcacgccaccacttctggctaatttttgtatttttagtagagacagggtttcaccatattggtcaggctggtcttgaactccagacctcaggtgatccacccacctccacctcccaaagtgctaggattacaggcatgagccaccgcacccagctcctgtctctatttttaaaaataaaaataatatgaaaagaaaccccttgaaatactagccataacagccttcagaaaatttgcaaatggttttttagaaagtggcaaaactgtccagaaatccttctacctggcagaagttttgctatcccttcccctcatacactcaattctataaatatctcttccaataaggagatggatagcccaatggttaagtttcttaagataatggtatttgaagtcagaacgtctggagccaaaccccaactctgccacttacacaaaaggctctcttaatagatctccaattaactgacccaccagcttaaccaatgcaccaaacagcctggctggtatctactatacccttaatgctcagaggtggcaggtggcttatctctagtacacctgagcacttcagctacttttgcataacagatcaactgcaagtcatgccttagggtgtcaaagggaagctcttcaaacatacctcaaactataaggcacatttgcagagatattttatttattattccttttatttattgtttcttagactaatttcaaagctaagcaagcatatgttttaattgttttaggtggtggctaaaacataaaaatgcttacactttcctgggtttcagtgtgtactgtgcttaaactatgcgtggcacataggacaatccttgatcaatgtcatttctcttgtcgcttttcatattctttgctactcaatggttcctgctctatagccaaaaataaactcatgtaaagtaaccaaaacttcctgagattctcctcaataatggcttttacagatgaaattgtgattttgtggattacagaacatagtatagactatagtaaatactaatactgctaacgcaaaggaatggaaactagcagagctctactaagtacccccttcactgacgacatctattcatccggtctcacaaaacactgaaaaatatgccaagattgaatcaagggattgcgggtaggtgtggaagcctatacattcttatagggcagagggatatttgtagtttgaaaaagtgcaccccctacccccgacctccaccgtgagaattcctgctttagatttcctagacttggtctttaacagcggaaaaaaacaaaatcctgtgcttctctggcagctgacctttcatggcctaacaatgtgcaatttcaggtatcacatggttgagctgaagttagaccatacaaaaataaagatagcggccaggtgtggtggctcacacctgtaatcccagcactttgggaggccgaggcgggcggatcacgaggtcaggagatcgagaccatcctggctaacatggtgaaaccccgtctctactaaaatacaaaaaaaaattagccgggcgtggtggcgggcgcctgcagtcccagctactcgggaggctaaggcaggagaatggcgttaacccagaaggcggagcttgcagtgagccgagatcgtgccactgcactccatcctgggcaacagagcgagactccgtctcaaaaaaaaataataataaaaaataaaattaaaaaaataaagatagctagccgtcagaggtaagctcaccacatcaaggcatgcctaccttcaagctccatgcttctcatcccttgaatttatgaattctgagtcctgcctcaggtacacagatgtgcccacatctgccaggcccacaaatggtgaccagggataaaaatcaaacctttaggccgggcactttgggagaccgaggtgggtcagaaattcgagaccagcctggccaatgtggtgaaaccccgtctctaataaaaatacagaaaaattagctgggcatggtggcgcatgcctgtaatcccagctacttgggaggctgacgcaggataattccttgaacacgggaggcggaggttgcagtgaaccgtgatcacaccactgcactccagcctgggcaacagcgagactccgtctcaaaaaaaaaaaaaaaaaaaaaaaaaatcaagtctttaaggccaggcgtggtggttcatgcctgtaatcccagcactttgggagactgaggcgggtggatcacctgaggtcaggaattcaagactagccgggccaacgtggtgaaaccccgtatctactaaaaatacaaaaattaaccgggcgtggtggtaggtgcctgtagtctcagctactccagaggctgaggcaggagaatcacttgaacctgggaggcggaggttgcagtgagccgagattgtgccattgcactccagcctgggcgacagagcgagactccgactcaaaaaaaataaataaaaataaataaacgttaaaattcacacttaaccaatatgtgattccatctcttcactatcaggacacactgaatcacagaaagtaaaatctcctgatgagccttataccatgcattcgaagaacattccatctctgctaatttaacttgccttttcataagcaaaagcctacccagacaaaggagggctgggtgacccccatccattaccgattttcagtctgcagcagaacagctagtagcagtggtttccattcaaaaaacaaacttcttacacaaacataggctggtcgaaagaattaatttgtacagtatgttcattgcttacttttctccaggattgcatgatgaatttttatggaggggggtgggggaagggaagaaccacattcaaaacccaacatcattcttctctacactgtcatttcaaaagccagataaaagtggaatgaggaatgcagccgttctgaacaccaccctccatttcattctggaaccgggaaggtacacccaggcatgacaatagcttctctcctcacagaaatttaactggtaagtgctttcctgtttgttttcctcaaactgacacatttacagtggacctgatgaggattcctgcagatgatttatttacaaaacagcatttgactaactaccagctggcaaaaaaggaaaaggactcctgatcgtttacaaaatgctctgtctgcagattcatatttttggtcttggcaaaagtgtttagggacgatcctacagggttcgctacagctgctgattaatcctaaaacactgcaagagagaaaatgagcatgttgctggggtgggcggacaaagaactttcagtaattttctcagcttttacctacataattacagctcataaatctgtcttttaaggagttgtgatctagaaatagtcaaacatcatttgtggaaggctcactgttgagaaactagtagaaaaaaatggtactccgagatgaaagctgatattgccctctttagattacaaggtgggaaaaaagttataaattgagttgtaatgcagctccccgccactggctccccatttttacgatgaaaggcttgtggtttgttgggccttcccatttgtttgttgttgttgcctttttgaatctcgctatcaatttcttgttagaataattggtatctgggctctcccaacaaggggtagatggctaaatgcagggaagactgtgggagacaagggttcagctattcaattattccttttctagtcagaaactgtgagcaccaattgtcttttatcttttcctccaaaagaaagctgatgaaaaccaaatcaagtttgataacaggactttcactggcaataatgctcttaaattgcctttttcacttaaggcagactcattcacccaagaatccacaaacctgttgttaaattaatccgatggtaattttgtcttgttaaaaaaaaaaaggccaagggacctttcctgggtctcaagtta

SEQ ID NO: 8350 - DNA, 6000 bp, Homo sapiens
attaataaacacaatttggacaataattccagttgaatttcatgagtttggcttcatcaaattatgttttgtatggcagtagtgtcttcaactcagaaatttgacatttggcgaatggatggattaatcgatagatggacagatacatgagtgaataaatagacaaggatgcttaacaatgttctaaatgcttaaacattgcatctttaaaaaaatttggccaggcacagtggctcacacatgtaatcctagcacttctggaagctgaggtgggaggattgcctgagtccaggagttcaagaccagcttcagcaacatagtgagacctggtctctacaaaaagtttttaaaaaattagctgagcatggtgatgcatgcctgtagtcccagctactcagaaggctgaggtggatcacttgagccaaggaggcagaggttgcagtgagccaagatcgtgccactgcattctagcctgggtgacagagcacgaccctgtccccccaaccaaaaaaaaaaaaaaaaaattcagtgttttctagtttgttgggtaataaagtatgactcaggtgaaaattgtgagatattttattttttaattgacaaataacaattgtatatatttatgatgtaccacatgatgttctgacatatgtatacattctagaatgggtaaattgagctaattaacatatgcattacctctacatatttttcattatttttgtgtggtgagaacacttaaaatctactctcttagcaattttcatttacagtatgttgttactgaactgtcatcatcacggtgtgtgaaagtttttgactccatagactaaataaataacttcaagcaagtcatcaaagtcattatagcaccagtttcttcatctgaggattaaacgacgtctagcaccctgcctaatacatgttaaacagccagcatattttaaagtgccttcaaaatatagacaaaaagcaacacaatacaatacaaaaacatatacgatataaaatgtcttgctctctccttttttttttttttttttttttttttagagatgaggtctcactatattgccaaggctcgtcttgaactcctgggccctagtgatcttcctgcctcagcttcccaaagcgttgaaattactggcatgagccaccttgcccagctgaaataagtttctttccataaagttctctgctatcactattattattagagatctccaagtaaaattaagattttgctgttgatgaagaaaaggtttacaaaccagtagataacattgttttcttcagaacctttactggaaaagggtcctgattcagaccccaagagagggtttttggatctcatgcaagaaagaattccgggcgaatccatagagtaaagtgaaagcaagtttggtaagaaagggccgagcgaggtggttcatgcttgtaatccagcaccttgagagtccgaccgaggcgggcggatcacttgaggccaggagttccagaccagcctggtgaacatggcgaaaccccgactctactaaaaatgcaaaaaatagcagggtgttgtggcgtaggcctgtaatcccagcttcctgggaggctgaggcacaagaattgcttgaacctaggaggcagaggttgcagtgagacgagcttgcacccccactgcactccagcctgggcgtcagagcaagactgtcaaaaaaaaaaaaaaaaaaaaaaaaaaagaaggaaaggaataaagaatggctactccatagacagagcagcggcatgggccgccggttgcccatttttatggttatttcttgatcatatgctaaacaaagggtggattattcatgagtttccgggaaaggggcgggcaattcccggaactgagggttcctccccctcttagaccatacagggtaacttcctgacggttgccatggcatctgtaaaatgtaaactgctttggcattggtgggagtgtcttttagcatgctaatgtattataattaagttacaataagcagtgaggacgaccagaggtcactctcctggccatcttggttttgctgggtttttgccggcttctttactgcgccctgttttatcagcaaggtctttatggcctgtatcttgtgctgacctcctatctcaccctgttgacttagaatgtcttcacctcctgggaatgcagcccagtaggtctcagccttattttacccagtccctatccaagatggagtcgctctggttcaaatgcctctgacagaaccgtgtgaaataacacaaatattctggctaaattccagtgtgagtgattaacattctccaacttcaaataatttttattattagccaacacttgtccatccccagtaatacacacgttgcataaagagcacagaatgagatgggcctcccttggcatgttcatagtctgcacatactttccactgagggcttccctttcttgctcactgctatgcccacagcttttcaactcccactattttcaaccctgggatgcttcctgacccagagtggcaagtaattccaaaacacaagagataaaatatgaacacctgtagaattccagagaaagaaagatgtaaggtatatttattcatttatttaattatgtattttagagttgggggtcttgctatgttgctcaggctggtctgcaaactcctgggttcaagccatcctcccacctcagcctcccaaagtgttaggattacaggcgtgagctatggcgcccggccttttaaacgtttattaatagttttgatatccgcgaagtgattgatatttgttcctttttaacttggaggctgggattaacacacgtgttcttcattattgcccacaaagcgttgttgatacgcaggaggggagtggcacttccgcaatttattcttccaacctgtgccaatgggatccagcacaggagatggacagtaacccgcggttgatctggatctagtccagttagtccagtccctatcccttcaagtgtccccaggccctcttgcctattttcgccctttgcccagtggaaggaaaagtttggggagaaggaaaaaatttaaaccctcttcctaggcgtgtgaatgtatttcaagtatgctaaatacctcagtcttccaatctaattacaacacatagaaaagaggcatttttaggacatttaaaacttgtagcataattgcgcaactgaagagcgccgccgtgtccccgccatcggtgcgccctccgaccccccgcggcgcgcaagtgcgcggcttagcagcaggcagccggggacggaagggcacggggaggccggcgccctgcccagcacagaaccctgggtcggtatcgcttctctctgcgggcgacttcggaactgcctgggattataaacctcgaccaataaaggactcacatctttctgggtcttctaaaggcagaaagaaatccattttcttgtcacaacaagattttgttaagagatgcaaaagtaaaggtcgaagccagggaggctgcgatagtatggggggaggggcggctacgatggtgagtgccgctgaccaactacctgggttcgaatcccagggttgccatttgggcggctactatgtgccaggtgatcggaatacggaggtgaacttgcttgccgaggtcgccctttcttgggggaactatgattagctcggttgccttggccaagtctcagtctcggtttcttcacctgtaggaagtacctgcctcagaattgttgtaaggagtgagatcttgtcttaagatgtaaacgggccgggcgcggtggctcacacctgtaatcccagcattttgggaggccgaggcgggcagatcacggtgtcaggagttcgagaacagccttacatggtgaaagcccgtctctaccaaaaatacaaaaattagctgggcgtggtggcgggcgccagtaatcccagctacgcaggaggctgaggcaggataatcgcttgaacccgggagacagaggttgcagtgagccgagatcgcgccactgcactccagcctgggagacagaacaactcgtctcaaaaaaaaaaaaaaaaaaaaaggatgtaaccgattaacactttgttgggcacacagtaaagggctcagtaagtatcctctcttctttcacacagttccaagacagctcggaagggagacagccacgcctaagagtgattccttgagcagttctttcaaagaagcactgaactctgtaaggacgcttagctgcaggcagaaagggcaggggccctgggagcaaaggtgcataagccaggaagttacaggagcgagtcctgcacccagggcgcgggcagagaactccggagggacttctggcaagggcttcccgcccgggtgcccagagcggcatgattagcattcgccccgcccccatctcctccaggcccgcgattggtcagcgctccttggctgcccgctcctggcggggccagagggcgccgggggaaaggccgagcccgcggggcagtgggcggggacgcgcggagagcttggcgaggcggcccaccaaccgcgcccgggcctgagggggcggagccggggcggggcttcccggcgggcattagaagcaggtgacccgggcggggcgggagagggcagccagcctgcggccgtgagtccgctgtggtcgccgccgcgcgcggttccgtgctcgccagaggtgggcgaaagggtgcgagagcgcgggggaggagccgagcagggcacgtcccgagagcgtcgccaccgcccccaggagtccactggagcgcggagccccctgcaggggaggaggcgagcggcgggcgggacgcggcggccggcgctcaccatgcagtcccggcctggccagcgccggctgctcgcggtgctgtgaggcggcggggtcccacggcccccgcctcccgccttcctcccgcccaggtgctgccaggcgcgctcgccctccgtccggctcccggccccggggagaacgcacggcctgcccctgcccggctccgtctggatcatgcggggggctcccgaggaggagagggcgagtgaccggcctgcgccgcccctgttctgggggcgccccccactctgagtcgcccccacctgctgccatgtgccgctgccacgggtacccagcctgtcgctaaactttccgggcgccagcccggctctgagtcgcgcttctcagcggagtgacccagggacggaggacccaggctggctggggactgtctgctcttctcggcgggatccgtggaggtgagaaccttccctttctccctgttcttctcccgtttcctgtgcccttttccgggaagctgagggttctggtctccgggcactgcctgaagggcccagcttggaaagagagggtgggggagtcggtagtttggttacaggaggcggagcggggaggaaaggaaaggggttaacttaagagatttggagacagctcgcggggaccgaactgttgacgcctctccaacagggagtggttgcaatctttcttctcccccttcttttttaaagagtcctttccctggaatccgagccctaaccgtctctccccagccctatccggcgaggagcggagcgctgccagcggaggcagcgccttcccgaagcagtttatctttggacggttttctttaaaggaaaaagcaaccaacaggttgccagccccggcgccacacacgagacgccggagggagaagccccggcccggattcctctgcctgtgtgcgtccctcgcgggctgctggaggcgaggggagggagggggcgatggctcggcctgacccatccgcgccgccctcgctgttgctgctgctcctagcgcagctggtgggccgggcggccgccgcgtccaaggccccggtgtgccaggaaatcacggtgcccatgtgccgcggcatcggctacaacctgacgcacatgcccaaccagttcaaccacgacacgcaggacgaggcgggcctggaggtgcac

SEQ ID NO: 8351 - DNA, 6000 bp, Homo sapiens
ctgcaaaggcctgagtatctctctgttggctactctcccctgccagggtgtacaactatcagatatgccaaaagaacacatcagaatgggacaatgcagggctttggtaatatatcatctttccatggctgagttttgtgtggttggatgggatggaagcaaaaacaatccacttgattaacaattcagcgtcctgagaagacccctccagaaggggatactttccatccttcccatcattatgaaattcaatcatatagagaaatggggacctgcataaatttaacaatgcaatatagacacatattttcaacagcaaagggggaagtctccttttcttttttctcgttaaagacacatactaacactgcttgataaagagcccatcacaagtgttaggtggagaaaggaaaaagcttaaatgtttgtacatcttttaccaactttctggactcacaatcttttttaatctcccaaggaaaccccagcacacctgtgttccatataatagcagctctcacccagcaggtacattgagagaaaggaatctgtcagcacattaataagatcctgacaaggcagggaggaaaggctgccagtgccataagaaatactgtctccaggaaattaaaagtgttccatagtgcgcttggtgtacatctgtttatgttcttgtttcctccactggcaattgctcctgtcaatccatgaattctgtactatgaacgaaacagaaaattgcttcagtagtacacagtcccagctgggtgttaaaccagcagtgtggtgatattagactcaagcttagatgctcttgctttacacttctttgagctaaaaagaaaataaggtaatgtcaacaacaaaaaaagagacaagtggtacttaggagaaaagtgaaaaaagtaaaaaccatttgcttgattttgtatgtgtgtgtctgtctgtgtgcgtatatgtgtgtttgaaagcaggtggggagtttctagaaaaaatataggatatggagtctcaagatctctcttttaccccaaagacccaccagctaacaaggatcaagggaataggtaggaagaaacagagaaggcatggttgctaggaggttagaggcaaaaggaacaccacagacactatagcatgctgcgcctttgctggcagacaggggctatcagttactaaaactgccatcatgtattggaggacattaactgtccaccaaagtcagtcttccccttctttcattgtagctgaacacatagctgttcagcagagaacttcatttcacagcctcctgggcagctagaggtggccaagtgactaaatcctcaccagtagaacacgagggaagtgacaaatcccacttcctggtctgtgcacttctctgggtgtgcctgaccttctcacaagctgcaataccgacacacctatgaccagcatggacttgatgagagcatcacactctgagggaggtgggaacagagatggaaggaatctgtgatcctgaatggccacatggagcaaatctaatctgaactaagaaaaatacatttctatgtattttggagattatgttttgaggcctctttgtaactaacatagttttcaccctaatatacattataacattttgaaattaaagtctgagaatggaactaaaatgccctcagaatatagttgttttctctgttatcaatcatcccagatttccagaagtattcagttttagaggcaataatacaatgattatttcctgaaagttcacacaagacagctacagtgattaaaagaaggaacattacatttttttaaaaaatcatcctaaatttatcaaaagtagaatgatccataaaaaattataactgtcaaatttgtgttagccacaaatgtgttcagccaccatagccacaggtgaaagcataggtactatttggggctaaaattgttgccccccaaattcatacgttgaagtcctaactctcactatctcagcatgtggctgctggagaagggtctttaaagaaaagtaaggttagccaagtcaggcatatcacttgaggtcaggagttcaagaccagcctggccaacatggtgaaaccccgtctctactgaaaatacaaaaattagctgggcgtggtggtgtgtgcctgtaatcccagctactctggaggctgaggcaggagaatcgcttgaaccagggagtcagaggttgcagtgagccgagatcgtgccactgcactccagcctggcaacagagcgagactccgtctcaaaaaaaaaaaaaaaaaagaaagaatgataaggttcaatgaagtcataatccactatgatggtgtcgtaagaagaggaaattaggacacagacaacacagactgagggacaaccatgtgaagataggagaagacggcatctacaagccaacaagacaggcctcagatggaatcagtcctgctaacatcttaatcccagacttctatccttcacaactgtggaaaaatacatttctgttgtttcaggccacttgctatggttctttgtgtggcagcctgagtagataaatacaaacaataaatgttaaatacttttcttttgtatcagaaccaaggagggattctctgggttggttctctgacaaaaaggaaggaagaaagagaaggaaagcagggagggagggagggaagggaggggggaaggggggaggggggaggagggagggagggagggaaatattatttccagcaattaaaatctttgggtgtttacaagtcacatgctttgattatatttaaattctaaataattctacttcccttccgtttagacgcatgcttcacatcatcttcagaagtaaactccagataaagacttaaatataagaggtaaaaagctaataaaataaaatgtgggaagtcattgcagtctatgagtagacaaagacattttgaatatgaagctaaatcctcaaatcacagtgtcacaattagatgggtttaacttcatcgaaatgaaagattgtgattcaataaaggatatcctagaaaatgtgaacaaactaaagaaagtatctacaataactaaagtgaaaggagattaatatacagaatataccccacaaacacgggaaaaaaagaaacaaaactctttcaaatcaacaggaaaacaatgcaatcactaatagaaaaataaataaaggaacaggtaaagcccaattgtctaacaggtatatgaaggaaagttcaacaccattagccacagaaaaactaaaagattaaacatcagtgagattctacattattcattagaatggcaaacattagaacactagataataccaagtgttggagaggagatggaaatgacagaaacaattgatatgttggagtgaatactcttggagtgaacaatagatactgttagagggaatataaactagtccagcagttttggaaagcaatctaacaacattggggaaattaagtacagaatctcatatgatccagcaattgactgctgggtgtatgtctcagggatactcacacagattcataaaagcacatgttccaagaatattatttgtagtatggaagttagaaacaatgtccatcattaggggaaaggattagtaaaataagatagaggcatactatgaaaatatacaattaccatcctgccttgcttaacaacagtaatatttaattgcttaaagactgtgagtgggataaatggatagcctttaatcattaaagaaaaaataattgataaaatgtctctcgttttccttttctctcttgtgagttgctccttcaaacacccatcttttaaaacatgagagatatccagcttaagactcaccatgggcctcggctaaatcttcatgaatttgatgaggttaagaaagcaactacatttcctaagaaagcaactattttaaaagagcaaacctgggtgtggggagggattaggagtagagtttgggatggcagcctcagaaggacaaacttaggccaaggagggagggagttggggtggagactgagcttctccagttggaggtctggagctaggactcttcattgaaaccggagagaaggaaaaggagagagtgaggctgactttttaactgaactccaaaattctctgagcaatagaatgggcctaatatgtaccaggtgggatttaattttaaatgaaagaaaaatgtttcagatagcagggactgttaaaacattgaaattgaatgttgtggatctcctgctgtgttggttttcagtattttttagagctttgttatccagtattatagtccaatttaggctaaggaacagaataaatttcctaagagctgtaatttgtgttttcatgtgctttccccaaagtattatcaactgctatttgatatcctgtcctttgggcatatttttgttgttgttgttgttaatgatggtggtgcttttttgtttgtttgttttaagaaatgaaaagaaaagattggcaagtccctggagagacattatccccccaccccccgccaaattttatctattgcgaacagcagaaataccagcatgttcagatctaaaagcagtctgtttcttctccaggttaaaaaaatatatacttcttatgactctggacttaaatttgactttttaaaaataagaaaaattaaagaagggtaggaaatattggtcacatctccgcgtgattctaggtcctcacttctgctacccagtaattaaaataccctgcgttatcctttagaaattacacgcctgtgtctttaacaaactgtaagagagaagggggcgggtctcgggaacggcgaaggctctgattggccctcctggcaggaactgggcggtaaaatagcccttctgttactgtccggggctgcggggtgagaggccagggccgagaagggcttcaggacgcgggaggcgcacttgcttcaagtcgcgggcgtgggaacggggttgcaaaacggggcctctttgtccgggtgggttaagggccctggcagctttttcgcgaaggcgccatgtcctagcagttgggccgcagtgggcccgaggtccactcggaccgccgagacggctcgatggccctggagctggaggaagggggatacctgggcgccgccgccgccctcgcaactcggccgaggcccctatctcaacctagtttctgtttttcccctgttctgcaggcttgcttccggcgtcatggctcaaagggccttcccgaatccttatgctgattataacaaatccctggccgaaggctactttgatgctgccgggagggtgagtttaggatatgtctgcctgcatccctgcctctccccacggtgttcggaaaggtgctcatttttgcctgagagagttgagcatccccctttaaaaaaatacatgattcgacgataaatacgtaaattatttaaaaatacatgttaatatatacaaattgagctctaacataatgttaaatgtgtcattgttaacattattaattgaaataaactcaattattgatagtataaattttaaaaattggcaaatatgtagtttactatgtaattggcattttttaatgtattttggtttgcttcttaaaaagaggtgaagaatcctaacggtattcacatgtgccgtgttactcctttgtgattatacacaagtgcgttcagggtaatgatgagagcaaacggtggtgtatggtaaggacgtctttaaactgttagtgcttagagaatttggggacctaggaaacctgaagttctttgtaccggtgtcactccacagggcatatccacagctggaaaacaaaaaaaaagaaacttgtaaattaaactggttagcatgtcacaaatcactgtgcaaaagagaacctggatgtaaaatactaggggcctgtgttttctcatgcctcattgggtgaacataattgttaagagggaatacagatatttttaagaatacctacttttggctgggtgcagtggct

SEQ ID NO: 8352 - DNA, 6000 bp, Homo sapiens
atcataagagcctgggcaacatagcaagaccctcatctctacaaaagtgttttaattatctggttgtggtggcacacacctatagtcccagctacatgggaggctgaggcaagaggatcgcttgagcccaggagttcaaggctgcagtgagctatgatcactccactgcactccagcctgggagacagagtgatgtcctgtcctgaaagaaagaaaaataaaggaaagtgggcatctgagcactcatttgaaggaaatcctccggaatcgattcagaaatcctcatgaagtacccagaattccctgctttggagccagccagaccaggatgaactaaaagtgactgaacacttattatctgccaaccactttacatatattaactaattgatcctgatgccaatcctataaactaggtcctacttttattatccttttgcaggtgagaaaactgaggcacagagtgagcatctaagctgcccaagggcacacatctagccagggacagagttgggatttgtaccagctggtttggagctcaagccttccatcatcacaacagcttggagaggtaagtattattatccccgtttttatagataaggatattttgataaatgttaagagatgccacaatttgccagttgactggcattcaggctgcacctgtcacggctttcttcgtggcactgggtgttctgcatagaatagaaaaatgctttcctatcaccacccaagatcacaaactagtaaagaagagccagtatttccatcctggtctgtctgacttcaaagcaaggaattctgggtccttcatgcggattttctgaatccattccggagcgtttccttcagatgagtgctcagacgctcactttccttttttaatttttctttctttcaggacagtacatcactctgtcttccaggctggagtgcagtggagtgatcgtagctcactgcagcctcgaactcctgggctcaagcgaccctcttgcctcagctttccatgtagctgggactataggtgtgtgctagtacatccagataattaaaacatttttgtagagatgggtgtcactacgttgcccaggctcactttatttatttatttagagacaggatctcacttcatcacccaggctggagtgcagtggtgtgatcatagctcattgtagccttgacctttctggcttaagtgatcctcctgcctcaccctccctaatagctgggactacaggcacacaccaccatgcccagctaatttttacttttactttttatttttagagagataggtcttgctatgttgcccaggcttgtcttgaactcctgaactcaagcaatcctcccacattggcctctcaaagtgttgggattacaggcataagccaccatgcctggcctatttatttatttgttaatttttttaaaaaaaattgagattgcaggaaataatttttaaatttaattttagttttaaaacggagattgcaggaaacaaatatgctcacttttcaaggtccttctctggcttcctctggagactggagatcagggctgggaggtctgcacctggctaggtcacgtgtctgtcaatgcccctgtatctttaccactgcagccttgacccagtgtctcactgacactactccctgctcctctcatcctagaccacatttggtttccagaactctcacagttgggcatgttttggttgctggtaacagaaaagtcaacttaaactggtcttaacaataaagacaatttattggctcatggaaccgaagaaagtacagagagaagatggcctctgggcatggtttgttcaggactcttggtctgtttctctgattctctcaactctgccttcttctgtgtgttggttttttccttggactgtttttgccatttatggtagcaaaatggctgctgactgcaacaagactatatacttgcttttccacattcattgagcaaacatctgaactttgctctgactggatcatcttgggtcacagactcactccctgagcctgttgctgtggttacgaggacgtcactggggagagaggagaaacctccctctacccctttcctctactttgatcccagatccaagtggattcttctggaggaatgagaagagatgctgaagctggcataaggctgatgcagggacaaaatagatgttcttacagccacattgtgctgttcacatggtctgtgcagaagtcatcatgtttaaaacagagtggtaagaagatgtcacccaaagagatactacattttgccagttgactggcattcgggctgcacctgtcacagctttctttgtggcattaggagctctacatggaatggaaaaatgcttctcagcaggaacattctaggccattttaagagggcacagttataagtgggaagtgaggtatagaagataggttgggtgggctgacttgctggaacattttgaagtgggtaaaattttattctaaactcatctatatgtgctttctccctccttcagtgaaatgctcgtcctactgcgaagtgaaaggttctttccacccttgtcctccagatgcaacttctcctggagaccccagcattgctgttgccctcaccacactcatgcagcagggctgctccccttcactcctcgggctccaggagaccagcctcttccctaacccctcagtgattccttgaaatagactggaatagtgaaccgacttactgagggtttaggaaaagcagaagggaactatacaccaagaagaacttaacatacggtgttaaatatacctgctcttggccctggtctttctcaagggggtgtctcacaggggattccctgtctagcaactgctgcccccttgtggcaaaaactatccttctcccggcctcagggtctttcttgagtataggcaggtgttttgcagtctaggcccccgtcttttttctcctgtgtccccagtgactattttctgcccttggggctgattttccctagatgattaatagagggagtctcccacctcctgggactaccccatctttgactcctttctagtctaggcgttagagcacaatagtccaacatcagtaaaagcaaagcatgagtggctattgtccccttacacttcctgttaccatctatgaatgataaaagagcccaggaggaaagcacaacttagcttaaaaaataggcttgccggctgggcatggtggcttatgcctgtaatcccagtgctttgggaggcaaaggcaggaggatcactagaggctaggagttcaagataagcctgggcagtatatcaggaccctttctctacaaataaataaataactaaataaaaaataaaaataaaaatataatataaaaaaagaaagccagatgtagtggctcttgcctgtagtcccagctattcaggaggttgaggtgggaggattgcttgagcccaggcatttgaggttacactgagctatgatcacaccactgcattctagccttggcaacacagtgagagcctgtctcttaaaaaaagaaaaaaattctttccagtgcagaactgtaggaatccatggcatggtaaatttggcatttgtggtagggcaggatttatacttgcacagactggcattagctccaaacattagaggaaggttggaaagaagcaatgccaggcagaccaactgggctgtgtggaagtgaagctatcaggcataccagtgactttagtgtgtagccaaaagcaatagacactgaatcgtggtggtgacttatggtccatgaatcacaggagaaatgtctcccttcatttattccacaaccattgattgagcacctactatattccctgaaagagaacataaacatgaattgaagaaggttcttgctgtctcatggctcccaagctagaagagggctgacttgtaaatgcctcacagcagggttcatgttatatggagaagtgacgaaggtgccagaagactcaagctaggggacagccattagctgctggaggcagctaaggtgggttcccagagaagccattctccgttactgagatgggggctgcagtgaccttgaccacagctcttccattcatggactgccccagctctgtggtctctctgctaaccagccagactctgggagtggcctatgccgtcagcctcagggccatttaaaccaactggtcattggcagtgattgtgcgaaagagtggctggcggcaaaggagggtttgtgttccattcaaataccctcaaaaagcctgaaaaataagtagagattgaggccaggccttggagttgtggaaggtggagaacactgggaagccaacctccaaagaagaccaggttggaggcaaaggaggaaggggagctctcgttggcaaaccaacagggaagccaaggatatcccagtaactgctctcacatccttgatgagaatgccttgaatccgagctaggccacctcaaagaagcctgcaaaataagtagagattgagtgcctgctgttcaaacacaactcaagcgcagtcctcctcctctttcccactggattgcccccaagtccctcctatgggggactccttctgaagtctctgctgtaagtcaaatccttcgccctttatacttggtcaggaagttgcaagcttccacaggtgatatactagggaatttaggaataaacaaatggaaataaattcaagaaaaggaaaataataaaaatgatcatccatagagtggagaattcagataatggaccctcaaccccagcttcacacctgggacccccacttggtcatatggaccctggcagtctctaatcacaagtctgtgatcccttgacttaaactgttcttccccaaatgtagacatgggtggggctcagaagggaggtgtcatctgatgtggtttccttatttccgtttattcatcaagtgccctctagctgttaagtcactctgatctctgactgcagctcctactgttggacacacctggccggtgcttcaggtaggaagccacctctgtttgctaggactttctgtggggtagggctgcttggcttgactttattttggaaaatgtattcatttctgtgggagctgaggatttctgctgcccgcttcctctcttgtgaccaccactcatacatggagttagcaggtgaagaggacagcctcctcatcccctctttttataccttgcccttttgtgggaagaggctgaccattccccaatttgatgtttattgcttcaccttaagactttgtcttcagtgaaaatgcaaatactggtagggagggaacacactaaaatgtgtggatctgagtggactcatcatacaccctcaggcctggcagcaaatgagaggtggatgattctgtcttcctcgatttgcagatgagaagactgaaatctataggggtacgagaccccactcaaggtcatgagacttatttatttatttatttatttattttgagatggagtctcactctgtcgcctaggctgtagtactgtggcacgatctcggctcactgcaacctccatttcccgggttcaagtgattctcctgcctcagcctcctgagtagttgggattacaggtgcacgccaccacacccagctaatttttttgtatttttagtagagacggggtttcatcattttggtcaggctggtctcgaactcctgacttcatgatctgcctgccttggcctcccaaagggctgggattacacacgaaacttattaatggtagaatcaggatggaatgaagactggatgctaggtgtctttacaaccaacctcggtgactttccaaaggctttcagacttctctggagagtcctggagctttgaggggctctttaggggccatctgggttcggagattagcacactctgccccacagtggctcagcttttatctgcttcacatactgggcttctgggaagatcttatttcagtaaactatttc

SEQ ID NO: 8353 - DNA, 6000 bp, Homo sapiens
tctgctcacactcctatccccgtgtccctgagaaataaacaagtgtagctcagtagctgtgacctggtggcctggacagggagctgctgggaggccagagggggtactcagaggtgagcagaatcccctcattccttgactcctggccccaaggcccaggtgggaggcgggggggtcctggctgcccggcgggagtggagggaatgctgggaagctgttgccagggtttagcccaggactctgctcccttgagcgccaaacctcaggagggcctcaggaggacctggatgagacagagccagaggtgttcacttggaagcatttgtttaatgttcacaagacattcagtggctccatgtgccaggggagccatgggacagggtgggcttccagaattctctcctcccctgcatttggcagcaggggaaacttgggacgtacagagacctgtgctctctgtaaacttcgtagtaaagggcctcctctggatgccgtgggctttcggtgataagacaaccattgcatttgaagaccacctttgtccaacttctgcacattctgggggctccaagccccatcagggccatcaacagccatgggcaggatgactgcagggagaagcttggtggctctaaaagaattggctggatcatgacaagaacagaaggcacagatatctgagcatctgcaaccttctcctgtaaccttgatgttacatttccagtgagtgacagaggggcacgtggggtgacatgggaggggaaggctgcattctggacagttgctgcccccttgcgtgttttactcccttctgccttgacattaagcatcactgacctcagccaccatgggcccactttcaaggagacatcttcaattgctaagggggattatcagggccccgagttggggggcttgggggcacgcaccttcctgtctttgtgagcacctagggggcagggtgtcagtcctcagggacttggcaaaggctccaggaacgggcttcgtgtggtatagcacccagctgaccgtgcaggggagtcatccgggctcaatgtttaagtggggcttggtggccggatgcagtggttcacaccagtaatcccagcactttgggaggccgaggtgggggatcgcttgagtccaggagtccgagaccagcctgggcaacatggcaaaaccccatctctatttttacaaaaaataaaataaaataaagaagtggggcttgggaacagaagtgttcccggcagaatgggaggggagaggccagatggggagccataggatggggcctggggcaagtccctgcctagcccagctcttggagctcaaccctttgagtctgtctccaggccgcacctggagggttggagcagagggtgggggcaggtgctgctcatcttcctctctttgcctcttcttcctgagttcccctgccttcctctctctgttggggcttcctctgatttttaggaccccttttccttggatcatgagggtctcattatcaatgttcctcctttttttttcttttccttcaaatagacccagcaggggagacaaaggcaggcataaatcaacgaggaatgggggcctcagtcactgcttgagtaccaggcacttcctgggtacacttacccctgttaccatgccgactcctaaaacaacgttttctgagacaggtactgtcatctgtcttcaccaccactgcctggtccctaggagatgatccacaaacattttttgattgaatggatgtgtaactccaatttgcggctggggaaatgggctcagagaggttaggcaaccagcccaagctgacagagctgctttgtggggagtggcggccagagacctgctgaggctatcttcagagtccggctgcctcagatgccctggatccttctttcagacactctgacgcccccactcctgccctcattccttcttgttgctgctggtgccctcatcccaacccaacccctgctgccccagtgggtctgtcacatgctgcccctgtgccaagcgtgtgttccctgggaccccggggcggcccgtgcccctggttcctgcctggccagcttccagcctcggctcctgccattccccccttaccctggtgcagagggtgcccgggccctcaccaaccccgtgcccctcctgcctgtgcctgcacctgggctgccctcctccagcatcctcctccctccccgtgtctcttagggttcagctcttgcccctgcccctgttccctgaccagctctctggggcaggcttgggagcacttcttgcacagctctgggccaagtggtcaccctgcaaaccccctggtgggcaggtttccccccttggagggaaaggatgccccacgagggcagggccaggcctctggctgctgaaggagcgaatttcaccagcgtcaggggaggatgtggtgagcgcccagctatcctggacccgctctttgataaacacagtcagattcacttgttccttgccctagaagaagctggttcctgaagctccgaagctgctccactggtgaagtcgaaggtgtgtgcccccaaaccccccaactcggggctcccagcctggaagacaggcagggacctgcccaggctcccaaaacctccaagtgattctggatggtgagagggtgggcaggactagggggagaagtttcaggaggcttaagggaaattttctgagaaaggtcttcctatttatgactccccaggcctgtggcaaggggaggcgaaaagctcgagggacaggcctgagccttaggacggggccttgggcgagtccctgcctagccttgctcttaggagctcaaacctttgagtctctctggagacgtatcttggcaagggatcccccatataccttggatatcccccaaggtatccaagggatacccacaggagagggaggtggacaatgccttctactgcagagcagctcgtgtggtctctagcttctgtgtcaaaagagggagaaaataagagctcaggtgtacacgggcgggcacagaaactctggaagaaacttaacagtggtgccctggggggtaggtgagagctggatttaggagtgggacagatattttcctatatgtgtttacatatgtatttgaatcatgtgcatgttttcaaaaatttaaaaatttaaaaattttaatattgcaacagcaataaagtagaaatattcatttcttaaaagaaggtagccagggccgggagcggtggctcacatctgtaatcctaacactttgggaggccgaggtgggtgaatcacgaggtcgggagttcaagaccagcctgaccaacatggtgaaaccttgtctctactaaaaatacgaaaaaagttagtcgggcctggtggcacaagcctgtaatcccagctactcaggaggctgaggcaggagaatcacttgaacccgggaagtggaggttgcagtgagccaagatagtgccactgcactgcagcctgggcaacagagcgagactctgtatcaaaaaaaaaaaaaaaaaaaaaaaaagaaggtagccagaatgggagtagacaaggctccctttgagaaggggctgagcagagacactgctccctgcaggccactcagtgtggatgccttcctggggcctcacattgcaggctctgggtatggaggtgggtgccagacaccggtgtgtttcctccctgctactgtcccagcaggctcctggcctcctcccgcacccagggtgcgggcctggctgcccccccttgcccagtagccagcctttggcttagattgggctggtggcccagtaggggggcctcgctgggggcaggactgccctgtgccctgtcttggcacccaggccagcttggggctccacggcctggagcaggcagtggacttggcactgcccatcgcacaagcccaggtgagagcttaaaagttgtcatggttccatcaacctcttcaccagacagtgggaagacccagctccagagggccaggtggttcccctgcagtgacttgcaaggtgttatttacagaggggacccatgtgttggatgaatcatccaaaaaacccaggagtagtttctattcctgtagacacctgaaagtcccagcacgcatagcttttaaaaattgcttgtgtttggtcctccgacagggcctcccagcacctccagggcatgagagctgcatctgccggggtagtttcagcccagactttcctgatgggctggaatctatgagggctcccagctaagagccacccaggcccacgggtgagtctcagccctcccagccctgaaggtgggagatgccagggaaatctctgcttgcagggccctaggaagccacaggcccaaggctgccccaaatctctgtgcaggcctgggacagagaagccgaggctggggaacctgtggggccccactgaccattcttgcagacacacatgcagtggctgaggtctcctccgacgctaggcacgcaagtcctaacctgcaagtactaaatagcaccaccttcctttcctttctgtgggcagcagtttcaaatcctaaacccccaaagtgctggaagccacgacggcccttggcaggtgctgagaatggctgcccctgtgtggtgcccctgttagggtgtctggggtgcgtaggaggcttcctcctccagaggcttcccagggcttgacacatgcagtgtgatttttggctttttggttttttgttttgttttttggagctgcgggaggggggcgtgcagatcttccaagagggcgggagagtgtagaccctcctcctggaaactgctccccatgtccacactctagttccacacagcctctctgtagaccccagagcaagagcccctaagccagacagggtgacactggagcggctcaaagagcatctggtcccacccctttatttcactcacaaggaagtcgagacccagagaggggaagtgactctccccagaacaggctgacagccaggcctggaggagaaatgacatctctcagccctctcagctgcaccggaccaccaacaggtaacagcctctgggccatttagagaaactaaggcacggagcctccaacctgaccttgctcttgtggactgcaggtaactctcctaagatcagtggggcttgtgtgggcctgggctttgtgcacacctgtcccaactcagcgagcagtcccaggtgtcagggcagcggcagcctccaggcagcctccgtgacagcagcagcggcaggcagacctggtttgtccccgattacgagtgacatttttctacgaaccctcaacttcctcctgatctgactcagggttgcagcatcatgtcgggtcgggaaacctccccataggcagcctgggagccttcccggggcatgtagctcacgtgccaccgccctccaccaagcccgccgcccattccccagaatcttgttgggaaaccaccaagcgcccgagatgacacactctcagggatcatcctgcagccctgagcaagtgcttactggggaccagaaggagcctgggagcccaggctcacccactcaccagctgcgtaatttctctagcctccgtttacctctctggggcatgaggcaatacacggtttcttcctcacggggcgctcaagggcagtaaatgatggagaggaaagccctggttgctatcctacattatagctgcattgttctctaaccctagccaagtgtctcttggagaggctgggcgggaagacacagcagcacttagaaccctgaacattctagattcttccctgagagtgagaacacaaagtcaggacatgtctggctggcctggcttcacctgggctttgtgctgcccgaggcagtggggatgagaggacagggcagggcaaagtgccgcccacagctctgtggaaggcaaggtttgcctttggttctgagcggctgtcccagctgtaaagggagcaccagtcactgtggagctgcagcag

SEQ ID NO: 8354 - DNA, 6000 bp, Homo sapiens
ataaagacacaaactgaaagtcaagggttggaaaaagatatttgatgcaactagaaacaaacaaatatcagtagtagccatacttagataacataggctacaaataaaagactgtaaaaagagacaaacaatgttactatataatgataaagaggtcaattcagaaagaggatataacaagtttaaatagctatgcacccaatactgaagcttccaagtatataaagcaaacattaaacagatctaaagggatagcaggggacttcaacactccactttcagcaatgaacagatcattcagacagaaaatcaacaaagaaatgtgggagttaaactatgcactggaccaaataggcctaactgacatttatagaacacatcagccagctgctgcagaaatacatattcttttcagcacatggaacattctccagaataggccacatcttaagccataaaacaaatctcaacaagttcaaaaaagtataaatcacttcaagtaccttttctgatcataatggaataaaactagaaatcaataacaagaggaatctcagaaaatacacgaacacatgaaaactaaataacatgcttctgaacaaccaatggatcaatgaagaaattaataaggaaatttaaaaaataattgaaacaaataaaaatgaaaatataccaaaatctatgggatatagcaaaagggaattttataccaataaatgcctatttcaaaaacgtagaaagatttctaataaacaacttactgatacacatcaaggaactagaatagcaaaaacaaaccaaagccaaaactggtggaaggaaagaaataataaagatcagagcagaaagtaaattgagacttaaaaaataatacagaagatcaattaaacaaaaagttgtgtattgaaaagataaacaaaataacaagtctttagctagactaagaaaaaaagagagaagacccaaataaataaaatcacaaactaaagaggaaacaacaaccgagaccacagaaatacaaagaattattagagactggtatgaagaaccatacaccaataagttagaaaccttggaagaaatagataaattcctagacacatacaacctatcaagagtaaactatgaagaaatagaaaaccttaacaaaccaataaaaaaataactagattgaagatgtaataaaaggtctcccatcaaagaaaagcccaggacccagtagcttcagcgatgaattataccatgcatttaaaaaactaataacaatggtactcaaaccttcaaaatattgaagaggagagaatactttcaaactcattccatgaggccagcattacccttgtaccaaaaccaggcaagcacacaacaagaaaagaaaactacaggtcaatatccctgattaacacaaatgcaaaaattctcaacaaaatactagtaaattgaattcaacacgttaaaatgatcattcaccatgatccagtaggattgatcccagggatgaaagaatggttcaccatacgcaaattggcacatgtaatacatcacattaaaagaaccaagaaaaaagactgcgatcatatcaacagatactgaaaaagcatttgacaaaattcaacatttgtttgtgataaaaaactgggtttagaaggaacatacctcaaaataataaaggcgatatatgacaaacccacagttaacatcatattgaattgggaaaatttcagaaccttccctttaaggtttggaactaaacaaggatgcccattttcaccacttttattcaagcatagtactggaagtcctagccagagcaatcaggcaagagaaagaaataaaaggcatccaaattgggaaggaggaagttatattagtcttgtttgcagacaacatgatctgatagttagaaaaacctaagaactccaccaaaaaaaaaaatgtttagaactaataaacgaattcagtaaagttgcaggatacaaaatcaacatgcaaaagtcagtactatttatatatgccaacagtgaacgatctaaaaaaaaattaaaaagcaaacccatgtataatagctatgaagaatataaaatacctaggactcaatttatctaaagaagtgaaagatctgtaagatgaaaactatgaaacactaatgaaaaaaattgaagacgacacagaaaatggaaagatacttcatgcttattagttggaaggattaatattgttaaaatgacaatacttcccaaaggaatttgcagattaaatgtaatctctatcaaaataccagtgatattcttcaaagaaatagaaaaaaaatcctaaaatttatatggaatcacaaaagacccctaataaccaaagcaatcctgaacaaaaagaacaaaggtggaggcctcacacgacgtgacttcaagatatactataaagctaccgtaaccaaaccagcatgttactagcatagaaacagacacatagaccaatggaacaggatagagaacccagatataaatccacacatttacagtgaactccttttcaacaaaggtgccaaagacatatgatgaggaaaggatagtctcgtcaataaatcgtgctgggaaaactggatatccatatgcagaagaatgaaactagacccccatctctcaccacatacaaaaattcaatccaaatggattaaagacttaaatctaagactcaaaactataaaaccactagaagaaaacattgcggaaacactccaggacattggtctgggcaaagaatgatcttgtgtaagacctggaaagaacaggcaaccaaagcaaaaacagagaaataagattacatcaaactaaaaagtttctacacaacaaaggaaacaatcaacagagtgaagagacgacccacagaaaatgtttacaaactatctatctgacaagggattaataaccagaatatataaggagctcaaacaactcagtggcaaaaaaaaagcaaaaaacccaaatgatctcatttaaaaatgggcaaaagatctgaatatatatttctcaaaagaatacatacaaatggcaaacaggtttgtaaaaaaatgctcaacatcactaataatcacagaaatgtgaatcaaaaccacagtgagatgccatctcatcccatttaaaatggcttttattttaaaaaagacagggaataatagtttttggtgagaatgtagagaaagcagaaccctcattcattgttgatgaatatacattatttttggtggagttcttaggtttttcaaactatcagatcatgttgtctgcaaacaagactaatataatttcctcctttccaatttggatgccttttatttctttctcttgcctgattgctctgactaggacttccagtactacgattgaacaaaagtggtgaaagtgggcatcagtacagccactataggcaacacaatggcggtttctcaaaaaaataaacatagaactaccataaaatccaacctttccactactgtgtatatctccaaaagaaagcaaatcaatacattgaagaaatatctgcactcccatgtttattgcagccctattcacaatagccaaaatatggaatcaatctaagtgtccacctcaatggatgaatggattaaaaaaagtggtactatatgcagtggaatattattcagccataaaaagaatgaaatcttgttatttgcagcaacatggatggaactggaggtcattatgttaagtgaaataagccaggcacaaagacaaatatcgcatgttctcactcatatgtgggagcttaaaaagtggatctcatggaaatagtagattggtggttatgagaggctgggaagggtataggggactgcgggatgaagcgaggttgattaatggatacagatgtatagtttgatagaagaaataagactgagcattagagatcagtaaggtgactatagttttcagtaatctattgcatatttcaaaatagtcataagagaaataatttgaatgtttctggtataaagaaaagacaaatatttcaggtgatgaatagcccatttacactgatttgatatttacaaattataattgcattcaattatcatatgtactccaaaaacatattcatctattatgcataaatttgaaaataataaacactcatataaggagacacacagaagagatctgacacacagatcatgggaggtgacgtgacctgagatgcagagatcaaagtgttggtgccacagaccctgaagccaggagcccccagaagctgggagaggccagacagggtttctcccctggcagctgggagaggccagagagggtttctccctttcctcatctggcaggggaggaaaaaggaatgtcctggctgggtgtgggattgtaggaagtgagggagggggcgggctgatgcggaaggagaacattccagagggcacagtgagtcccaaagccccaagcggggtggcaggagccagcctatctgaggagcacctggggccatggaattagagtggcgagaacaggggaggtcggaaaaattggaccagagaggaaacagaggtcaggtgggacaaattcttccctcagagggtgcgggctgtgcaggaacaagggtggcccatggacagcagctcctccagtagggagtgtgggagatagatagccactgaggagggcgaagggcccaaacagggagccaggagcgggctcaacagcctctgcttgggtgccctcagccaggcaggggccagcctggccccagaggcacaggctcacctaattggcagtgtgggcctttccatcatcagggggataattggaccctggagtccctatgctcatcagaaaaagccacagtggtttctccccagtgcctcaggcagcccacttctcaagagcatgttcaaggctcgtctggtcactgtggccagactgggagttgctggacacaggcagaagccactcttcactcctgcaggcagctgcagccgtttgcagtgaggcttccagacgccccaggtaggatccagcactttccatgttgccgatgggctcctttcgctgtgattttagggtacgttgtattccttgcatggggagagagctcttcttttatgtgtgtgattgacaatccccactccacatgccccccacatacagtctggagcagggactcccctctgcagtctcacggccagcaccaagcaggatggctcatggatgctccataaatggcccttgcatttttgagtactgtgctgggtacatattcacaggcattgggttatgccctgatgtctaacatcatacccagaatcagccagcagcctcaggtggctgaatggggcagacagcatttgctcactcatcattgacgaggactggttctgggtggctctgccaggcaccagggaaggcatcagagtaaatggctgcaggctgatggtaggtgcagccgggaggagctactgcagtacccgtctcacggaccaccccaaaatacatccgttctgtggtacggaaagcttcactttcctctctcagattggagacctaggtttgaatttgtgactgggcaaaaacagtctttgtaacatattggagaaccttgtttacgatgagaggatgccagcctccctcggcagcgtccgcttggactttcagtctgtccacagaaaccagggaggtacagccaagttaaaaaggcagccatgcccgcagcgatggggtaccctggaacagaaacgggcattcgagggaaaaaaagatgaaagccaaagtctggagtttagtccacagtaataccaatatcaatcccttactgtgacaaatataccctcttcatgtaggaagttagccttggaggaagctgaatggaggatctcccagagctctctgcactctctttgtaacttttctgtaaatctaaaattattccaaaataaaaagtttatttaaaagaaaatgcagccattgtctaacaagttcaggggatgga

SEQ ID NO: 8355 - DNA, 6000 bp, Homo sapiens
aaaattgaagcaacggcaaacatgaaatttatggtgaagcttgggtggaagaatggtgaaatcactgatactttacgaagagctttttgtgggcaatgacccaaagatatcagcggtttacaagtggatactcatttcaggaagggacgagaggatgttgaagatgaagtctgcagcagcagaccatccacataatttgtgagaaaaaaattaaccttattcatgccctaattgaagaggactgatgattaacagcataaacataaccaacaccacagacacctcagttggttgaacttactcatttctgactggcagattaaagttgagcacactttccacttgatgggtgccaaaattgttgtgaccagatcagctgtagacaagaatagagctttcaatggaaatacgaaacaagcgggatcaagatcatgaaagatttctttgaagaactgtaataacagaaaaaacaggctttacaagtgtgatccagaagacaaagcacaatcaaagcaatggctaccaagaggtggaagtggttcagacaaagcaaaagcaaactaatcaagagcaaaggtcatagcaatagtttttgggggatgctcacagtattttgcatgtgattttctgtagagggccaaagaatgaaatatctgcttattatgagggtattttgagaaattagccaaagctttagcagaaaaaatgcctgaaaaagctccaccaaagagtccttctccaccatgacaatactactgctcattcctctaattgaacaagggcaattattagccatccttcttaccatcctgatttggctctttctgacttcatttcctaatcttaaaaagtctttaaggagcagctatttttcttacgttaataatgtaaaaaaaaagggcttcattgacatggttaagttcccaggacccatgccaggcctggtggctcatgcttgtaatcccagcattttgggaggctgaggtgagaggattgcttgaggccaggagtttgagaccagcctgagcaacctagccagaccctgttttaacaaaaaaataaaaataaataaataaaatagaaaaattcccaggatccttagtcctttagagatggactaaatgtctgccatcattacaaaagcatcttgaacgtgatggagcttatgctgagagctaaagtttatgtatttttatcttttaattccattttcccacaaacttttggaagttcccatgtgagtgtatgtgtgtatgtggagcattttgtttgtcccttcatcattgatggacatttggattgtttccatgttttcgctatggtgaataatgctgctatgaacatggatgtacaaacatgcctttgagaccctgtgtattagttcacttgcacactgctgataaagacataccggaaactgggaacaaaaggaggtttaattggacttacagttccacatgactggggaggcctcagaatcaaggcaggaggtgaaaggcattccttacgtggtagcatcaagaggaaactgagggagaagcaaaagtggaaacccctgataaacccacaggatctcgtcaggcttattcactatcacgagaatagcatgggaaaaacaggctcccatgattcaattaccttcccctgggtccctcccacaatacgtgggaattctgggagatacaattcaagttgagatttgggtggggacacagccaaaccgtatcaccctgcttttaattttttgggttagacacccggaagtggaaacactcgatcatatggtaattgtattttttaactttttgaggaaaccctatactgttttctacagtggcttcaccattttactttcctaccgacagtgcacagggttccagtttctccacattctcaccaacacttgttatcatttctttttacagctggataatattctattgcatgtatatactatatgtattttgttaatccacttagctgatggacatttgggttgtttctgtcttttggctactgtgaatagtgctgccatgaacatcagtgtatgtgtgtccctgctttcaatagtttggggttacataccttggagtgggattgcgggactatatgcctcacgttttgaggaatctatgggcttgtaaaggtagactgtgctctgtaagtcagcgctgtccgtcccagccttctaagcagacatccctgggcgggggtccttcctctctccagtgtgctaccccgcccccttgtttgctctccagaaagcacttctctgagcctcttttacggagaggtagggcagctggcaacaaagatggccctggtgtccgttcaggctggcccaggggaccaggttggggccggcccctgagtgtcccctgaggaggtgtgtgagcagcgggggaggctcctcggtcctttgcaagctcgcggctgagcggggccgtgtccgtccactccgacggcgctgggctgccaaggtgagccgccgaggagccccgtgccccgaggcgggcacagccgccctgcatgggtgcccccggcgcgggattgacgcagagccctgcccggagccccagcgaccccgttcctgccccaggcggccgttccgaagcctgagccgggcaacgcgcagcccgcctggcccggctccctcccgcgcgtcctcgtcgcgagctgccgcctgggagctccagacgctcccgcccagggcgatccggacgctcccgcccagggcgatcccggcctctgcagcccagctggcgacacgcctcgccaagagcccgcacctcggcgcctcacggccaccggaggcggggacagggagtccggcgcgggccgggtcgggggatctgcagcggcggcgcgaaggtaactcccccgccagagccgggaaagagccccgagcagaggaggaagggagcggggacctgcccttcgcctgccggcttctggaagaagcgtctcctgatccggccccggaataagaaacccggaccttgcctgccgggctccgcgatgccgcaggtacagagcgcgccctcccggggaggatgctccagggaccccgcgctgcactggctgcggccgtggggtgcggcggcttctgagtgaagaggggactttgccagggattcactcctgtgagtttcttcaggagagccaggcttcccctcctctgtccttaggggaagctgcccaggctccagggagaaagttgggagcaggcgggggacttgccagcaggggtttgtgagagaggcttctagcgatcgagaggtcaccaggtgggggtaggattggggttcccctctgaacggtgagaataaaggagaaaagacctctggacaatcatccttaatctcgtgacgccctcctctccacccccgaagcttctgtattctttgcttttaaacactactttgacccttcaggtagcatgcttgtaggggtacccctccaggagtggcatgcctctgcgacccacgggacctgcaaggagtggggcttgtcccgcctgggttccaagcctgcccccctccttcttttcagctgagttctgcctctcctccctgagtgggcagagggcaagggctgagccagacagaattgagagctcggaggaaggaaaaaatcagggtaaggagttaggacagagaggcagcaatggggctgagcctcactggggcgcagagggactttaaacttggccccaagaagacaggctccagatgttttgcctcggaggaatatggagagcaggctttcctgggggtggggaggtggggtcctgggcatcttcctcatcttcctttcccaggaaaactctggcttgcattcttccctctgttctcctgacatttgttttagggtgctctccagacctcagccctccttctacgtcccactccctggtctgatgtcttcagggtttgggagggactgcagggagagagcaggggacagggggactctggctgcctccctgtccccaccagggcagctgacacccccctagacccctcaccccagccccattatgtggtgtggtggagtccctgtatcaggatttcgctccccttccttgcagctgacagaggaggcctgagagcgcagtagtaactccttgcagttctagggtgtaacactctcctccagggagctccaggctgtgcagacattattgatctcctgcctggcagaagttgaacctctgagtgtttaagctatttacccctggacactcaaccagccaaggaaaaattttgctctagcgtccccattctcatcacttggttagtcacaggctgtgactttaccctacagcctctgtctggggacaggccttcataaatgctgttcccagcttctagggtcatagcaggttctaatgtgggaacaggaagtccagcaaatagtgaggaaggtggctgctctatggctctgtgattttagagccatgttctgccagaagagcaaggagagcagacaggcttgtctgaaagccctccctcttaaatagcatttaaagaaatttctttctcttcagcctccccacactcccaacttttgtccttgagaaaaggtgcaacacttctgagtcttcagtggaacagaaataaactgagccagtgcttgattgtctctatagcaatccacccttccctaattgagtatgtggttttcattcattttctctcattggttcctttatttccactccatcaccctatgttcactctgggcagggagctaataggtctgcttaggttacagggtggttttgaatttggccagctttactgcaacatatagccaactgtttgtatgtctttcaaaggtttagaatggagctcagataccataccccaaagatgctggcagagacattctgactcattaagggagagctggctgatagcagagaggggtgacatcagccttgcagacattgccctggggaattctgagcagtgttgctcacagcaccacctggccagatggagaccaccatggggttcatggatgacaatgccaccaacacttccaccagcttcctttctgtgctcaaccctcatggagcccatgccacttccttcccattcaacttcagctacagcgactatgatatgcctttggatgaagatgaggatgtgaccaattccaggacgttctttgctgccaagattgtcattgggatggccctggtgggcatcatgctggtctgcggcattggaaacttcatctttatcgctgccctggtccgctacaagaaactgcgcaacctcaccaacctgctcatcgccaacctggccatctctgacttcctggtggccattgtctgctgcccctttgagatggactactatgtggtgcgccagctctcctgggagcacggccacgtcctgtgcacctctgtcaactacctgcgcactgtctctctctatgtctccaccaatgccctgctggccatcgccattgacaggtgagtgcagcagcagtggggacaacaaaggcggtcagggaggaaggggcattggaattgccccctcctgtactgcagttgcagattgatgagaggtgtctctattccccctagatgtggttgcatgggggactcaaaagcttgcccattgactgacagtgagaagagttctccttttccagctttgttcagacagaagacagcagagccctctagagttgggtgatgggaagcttttgatctcccttgctatggatgttttcctagatattacacctttcaaggtctagagtagacaggtaagaggagatatcgagggaaactttaagcgtcaggcagttacctcttgagtcaatgtggaaatcttgaaggaggtttctatctcatcaagacttcctctactaaaatatgaccttctagcatcatctgtttttaaataagattcaaggatttatgactggctgtggtaaacagttcaagcctataatcccagcaatttgggaggccgagatagg

SEQ ID NO: 8356 - DNA, 6000 bp, Homo sapiens
cgcacctgggcgcagcctcgatcccacagggtccaggtgcagaggcaccgggatgcacgcaacacctttcgacgcagagctggggaaggggccaataggaatggatgctccgacagacgaagccacgtgggaacaaggacgagcccagggcagcttttgctggaggtacaggggcagtgtcacagggggcaagtggagttgctggggaggatacgatagcatgtgggatttgaaggtggggaagattccgttattttcctgaacacctaacagtgatgctgcaggctttctggacgggacgggacctcagacacaataatccattccgccgtcgccacgcagtgcctttcgaccattcagtttcagcgctgggaggaaggagaggcgtgcgctcttgctgaaggtcgcgcggggctcaccgaccggttgccaggaagtctacctcctccacgtggcaatcgccgctgctgctcggctccctgccacggggctgccccgactgtgcctccgcaggtctctctggttctgcccgcctttgtcccctcgcaaggcattatccctccccgcttcaatcagggtccggcggatcgtcttcacgcctgatcttgaggatgggaaagggagacaggatcgtcttcacgcctgatcttgaggatgggaaagggagacaggcatttcttaccttctccttcctgaccacttaaagccaaacatattcccagccgaagatgagagttgctacctgaaacgccaagtttgcgagcagaaggccactcgaatccccgcttgaccaggccttaggaggacggtagagtcctggagagctgccctggcgccgctgcagggacctccgctgtgtcccccagtccctcaaagctctcctgggccgcattttcccctctcatgtctgtctcacgaggccactcacagcctggcctcctctccccaagaaaacctggcaggatctccctactgcactggaaacaaaagcctggacgggaggtgtatgtggaccaggaagtgccagcttaaatggaaggaaacggagggaacacagctcaaaagcgtagccaagtggtgctttgctatactatgttatctctttttgcatgtttgaaatttaacataataaaaagacttttaaagttggcaaaagaaaaaggggaagagaacaaagaaagataaaagaaagaaatgagagagaaaaagaaggaaggaaaaaagagagaagtaaggaaggaaaaaaggaaggaaggaaggaaggaagggagggaggcaggaatggagggagggaggcaggaagggagggagggagggaggaagaaaggctttggcaggccagacactgatacttcctagcctcccgaggctgccccagcgcgccccctggtggtcgcacatagagttgtcctatttggagagcaaagacaaaggttctttccctcatcctcactaagttctttttttttttttttttttttttttttttttttttttgagacggagtctcgctccgtcgcccaggctggagtgcggtggcgcgatctcggctcactgcaagctccgcctcccaggttcacgccattctcctgcctcagcctcccgagtagctgggactacaggcgccggccaccacggctggctaattttttgtatttttagtacaggcggggtttcaccatgttagccaggatggtctcgatctcctgacctcgtgatccgcctgcctcggcctcccaacatgttgggattacaggcgtgagccaccgcgccccgctgaaggtcagtttttagaagcccattctttatctactgggaaaggagaacagagtgggattttgtttgaaatttgtctgtacctcaactggtgtagcttgggggtgggaggatggtttttcttttccctatgcttgtcagtgtcacagacgtgaagtcatcctccccaagccaccgtcctcaccacagaaccatctttctgttggagtctcagcttccagtctcggctccactggtcactactttgctgaactggggcttgtcgtgactgtatctgagcttccctttcataatttccctgccttcttgccaggcgtgaggatgcagagggaaggctttagaaaaccttgcagtaaacacaatgcatgggtggcctcgtgtccgctttgctgaaagcgccttctatcttttgcgtggacacagctcactgaagcctctgccagagcacagctagccacaccatggcacacagcagcacacagcctggtcacactttccttagttgattaatcacacttcagtcagagatgaagatttacctcctgacacttgcacagcctcccagttccagggtgagatcatttggaaaggaactaaaacaaataccttgaaacggttcagttcccagctcgcttctttcacagctttaaattcatattgtggcacccatttctcatcgtgaaagtcgctggagacggtgagtgctgttactccaagaacaccagcagaatatttcttgttcacttgttaccttttacttagatcttagtgccctagtcccttgtaataaaagcactgttgattcagatattaacaacaggactgtgaccaaaatgctaaattaaaatacctaagacaggttgttgtccagaagccaaaagaattttaatcagattcaaccacaagacatatacattaaaaaaaataccttgcactatttgttcctttaattaagcatgaaatcactctctgtaactatcattgtggggaaaatctaagtttatagcatggagaggaatgcagatgaaggattcactatcggctaagattgacaggcacatggatgcacgatactgtgttttttctcagtggtcctttattctgtgctccaagaggagcttaatccattagggcttcctacatgcatgtcatggttcctgccatgaacaaatttgcagtttaatccaagagacagaaacccctaaacttgaaacagtgagggagatggagttaatttattaatgcccttcttttaccagacattgcacattatatttaccaactctggaggtaaatatgtaattacctccatttcacagatcagaaaattgagatgaagaagggtcataattttggtctgaatgagagataattcccacttataaattaacacaccaggtttctgatttttatagctcagaaaaagtttggatactggtgcccaccactgagagatgaacccattctgggtgtgtttgggaaggaagaccaaggattggttgggtctaaactgaagtatagcatcaccaagacactgccactcccaggtcctctaagcctgctctgaggcctcctggcttcttacattgcccacattcctctcagtgtgagttatctgtaacaatgaccacaaggaatttagaaaagagaaatttcttacaagaagaggtgcatccaacagccagatgtccagggtggataaatggcgcaggctggatttcccccagcccaggcgatgtgacttcagacctgagctactgaacacactcttgccacatcagtgagacaaaattaaaattatatttatctttttgaaagtgaaagcaagtttatcaagaatgtaaggaataaaagctcatttcatttactttttttttaagagacagggtctcactctgttacccaggctggagtacagtgacaccttcttagctcacgacagcctcgaacttctgtgcttgagcaatcctcctgcctcggcctcctgagtagcagggactatagatggaagcctggctcatttttttgtgtgtgtagagatgggatctctctatgttgcccaggcaggtcttgaactcctggcctcaagcaatcctcctgtctctgcctctcaaagtgctgggattataggcatgagccactgcacccagctaacattgtattttaaaaggccttacctttggggaaagttcccttctcccagtctgtgcttccagaagtaatagtatagcagccccacagttatccaagatgttaccattagggaaaactgggtgaaggacacacagaatttcaccatagtatttattattataactccatgtgaatttacacttatccatgtgaatttacacttatcaaataaagttaaacaaacagacttacaatttcttttaaaaaattaaaacttaaaaatgtatacttaaaatttgctaagagggcagatcttaggtgaagtattcttaccaccaaaacaaaatgataatactagaaaaatggcaggagagagctttggcagggggagtgggatatgtttttggccttggtggtgatgggtttctggtatattgagatgtaaatttgtacagcttttgacatgtcagtcattcctcgatgaagtggggttttttaaagctaaacaaatattatagcagcagcatcaactatcacttattcatctactcaacaagcatccaagtgtcctcaacaaggacacttactgcatgccagccactgttgtcagtactgggagatagcagagaatgaaacaagcaaaacctttctcttgtggagcaggattctaacgttagttggctagaccaaggcttcattccgacaggttgctgaaaactcaagttattacataaacactaactacaaagtgtacttcctcagtttcctcagaagatagctgattaggtttttctgggctgcttgacaagactcagacagtatttgtgaatatcaagctttgtcccacgtggtaaataaacttgtttagaaacacctgtaaagcttaaacgcgtgctttcttcaacgcgtttggaaactctaacccccttctcttttgtacttttgcttgctgtccactacagagggtccaagcacgaagctgtgcacagagtcgctctccacagagatgcttaggatgtgatccatgaatcgcaaatcccagctagtgctcacaaagacggacatttctccccaagaccattccagtgccccagaggtccacagacatccaggaagatgcagccagcagacaaagaatggcagccacccaagtgctgaggggagccctcccggccatttctgtcccagctccaagggtctctccacgatggcctgcaacagcacgtcccttgaggcttacacatacctgctgctgaacaccagcaacgcctcagactcggggtccacccagttgcccgcacccctcaggatctccttggccatagtgatgctgctgatgaccgtggtggggttcctgggcaacactgtggtctgcatcatcgtgtaccagaggccggctatgcgctcggccatcaacctgctgctggccaccctggccttctccgacatcatgctgtccctctgctgcatgcccttcaccgccgtcaccctcatcaccgtgcgctggcactttggggaccacttctgccgcctctcagccacgctctactggttttttgtcctggagggcgtggccatcctgctcatcatcagcgtggaccgcttcctcatcatcgtccagcgccaggacaagctgaacccgcgcagggccaaggtgatcatcgcggtctcctgggtgctgtccttctgcatcgcggggccctcgctcacgggctggacgctggtggaggtgccggcgcgggccccacagtgcgtgctgggctacacggagctccccgctgaccgcgcctacgtggtcaccttggtggtggccgtgttcttcgcgccctttggcgtcatgctgtgcgcctacatgtgcatcctcaacacggtccgcaagaacgccgtgcgcgtgcacaaccagtcggacagcctggacctgcggcagctcaccagggcgggcctgcggcgcctgcagcggcagcaacaggtcagcgtggacttgagcttcaagaccaaggccttcaccaccatcctgatcctcttcgtgggcttctccctctgctggctgccccactccgtctacagcctcctgtctgtgtttagccagcg

SEQ ID NO: 8357 - DNA, 6000 bp, Homo sapiens
gcagaggggactgacacctctgtgaatgccctggggtcagcagaccctacccctcctctaaggcactgatggtaaccttgtgagtcaccatcccctcccagtctggcctccccctcggcagcctcagccccaggagtcaggtgccagcctggtgctgcggcatggtgggccctcataggcagaggcggccctgcctgtccacgtggggcctcctgcaggcaccccctgcaagcctgggatcactgagcagcaccttgcattcccccagggatctgcatgtgaggatgagggctgggggctggggcctgcatcagggcaggaccgcatggcctcccacccaagccgccacccaaggcacagcttccggacacagcgctggccaggtcatcaggggaggtggtgggctcactgttcccagtgtacccatgagaacatgagagcccaccacccggtgggggcactccaggtgacccagtgctcacacctgaggaactcttcagctccgtgtctgcacagggctgtccatgcagcgggttctgtcatccacaacccccaggcactctggacagactgcccccaaggttttctcctgaccttggagtctcttagaatgccagcagggggaagaggagaggtgggcacagctacccaaccgtgtgtgtgcactcgggtctcctggctcccgtgggcaggctggggtccctggctgagcacagggaggggcagtacccctgaggaagggcctcgttgggagccagccacccgccctgggctgggagtgtggaggagctttagggctcttaccatgaccctgagctggggcaccccccaacctgaggccacgtgtccaccagcctggctcacctccacgtgccactgcttgcccagcgcgttgaccactcggccctcgatgggccggcggcaggccccgcagatggggacgcccatcttgtcatggcagggcaggcagtagagctcacccttcagctcgcgggcctcggctgtcagctccttcctggaagacagcgtgcagcccccaggtgccacccctgcccttctgcagggtcatgccagcagcgcctccaccccagggcacggctccccgaggggcccattctgtccctgcagagccgaggcggcagcgccttctgatctctgggcactttgaagacttcctgtgccccagacaggccctggagcacagacttcctgcacagcccagaagagtgggctgtgttctgcacccaggcctctgagaagcaggtctgttcttgggcccccctcctcctccaaaccagagggggtgtctggataggcacggagaggactggaggggacggtgggggtgggcgaggacgggggctgaggggctgcctatgcaactcctctctccaacaccagcaccaagcccactcccggtctcttgccctgccccctcaggtcccttccactgctccatctcaaccctcgtctgcagtctaggggtccagcccacccgcctcctgagtctcaagtgccccccaaacagagccctggagagagaagcttcctgccatggctgcttcccagcccccagcccacctctgccctgcagccttgctctcgggacccctctgtctgcccaccctgctcccctctccctcctcaacacttccccaggtggaggccccaccgcccttaccctgggccagccctggctccccgcccccacaactgcagggccgggctgcgcacctacccacagtgggtgcagttgaagtggtcagggtggtaggcgtcgctcctgaacatgaggggctgctcgtcgatgaccaggtggcaccgctggcagatgtacttgcccaggcccttggccttctcacggttgtggcaaggccggcagagatgcctgcgggaggcgggggcattaggggcagagcccccactcccacacagcctggccacctccaggagaagagaggccagacccctgcaacttcactgagcagctgggggcttcaaaggggctcagcccagggtatgggaaagcagactgccctgtcacaaggcccagaaggtcacaagtgtgtcctgggaatgggacgcatgctcagcaggaaagatgccagaatgctcgaggttactgtctctggatggtattttcctctttctactttctctaagcctggggcatgctgcagaatacagtagacatttaattgatatctgctgaaagcattattttcccaatgtatttaacacacacgagttataatgagtgtcactgtgcccagcagagtggccagtgagtgtcccgggaggcccactcacccccttccttcggggtttgccagatgaagaagggcccaaacacgtacaggcgatttctgtctccaaagacaagcactgctatgtcagatggaggcccccaaacccaggaactgtcactacagagtctttttgtgaagacctcagaataatttctgatgctactcgctgtgttggacgacagctgtgttctcaacggagagacaaatcaacatggtttctgtttccttggacctcaaaggtggcaggaatctagattcagagtccccaggcaaagatacacaaaggccccaatccaacctccctggcccccgtctccacctgccacccgaatctctctctggtgctcctgctgcatccaggcctcccttcccaggccccccagccccaggggccctctccactcctcacgagcctccacggctgcccgacgcccagtgttggcccctctgacaggctggtcagggaggatacggaagagatccaatcgcagacccaagatccccacccaggttatggtgggcagaccccagatgccagggccacccattcagcatccctccctggaccccaggacctgctactgctgggtgtctggactccatcctgcacagcactgtgctccatctgccctggggtgtctcatcatcagctgtgtgcagggcaaggggcccaaacaaaggcccagcagtcactggctaagctgccgactggctctctgtgcctccccaagaccctatgtgcccagcagggggcaacagctcagggtcagctgaccgaatgcctcggtgaatgaatgactctacaagagaggaagggagcctcggtgggcatcatctcccctcgactactggccagagccctggctcttacaccccagcgacgggaagcagttgtggcctgtggcttcagtcttcatcaccacaatccctgaagcccacccttgcccagacacctgtgccccagccccaaccccaggccacctcctcagcaggtctggggctgagctgccccacctggcgcctatggcggccagcccatgccccctgcggtgcctctgtcccagactcagcatgtaggccccatgaccccactccacattctggtgactcctcctgagcgtcaggacaacactcaacccacgaggaattatttctgtctcaaagatgcaggaatcagctcaacgcctcaaaactccatcaccacggtcaatgcccttgaagccatcgacagtgatcaccccaataacagaaggtctgtgagcccagaaatgccctgctcagggtggttagcttcaagccaccacctttccaaccagcctgggccagttcttccagacagccgcctgcgggcacaacaggaaagagacctgcgccccggctcagacacctcacacccagctggctctcaggccagacaaactgggaagcccatctctcttgaaggaagtccagatgggaaacagcttctcaacagaccagatcacagcatcagatctaaaggtggccttcagaattctttttcaggttgaattaggatcaaatctaagaattctaaattcaaaatgcagcagaaaaacaaaacacacacacacacggagcctaagttctggagtgacatgtgcttgggttcaaatcctggctctgttgcttcctactgtttgttgatgggtgagtttcttcatttgcctgagcctcagtttccttgtctgtaaaatggggcaataatcccagctgcacagggtgatgtgaagagacaaatttaagacactgccccttaaatgctagccacatacatacagttttcaatgtttaaacaacaaaatgtaaagtcttttgaaaccaggaagggtgatttggtttcccatgttgctggatgtatcattttcagaaagacagagagaaatgaactttgttcactcagtctcagaggcggccgccggcagcattcaaaggcaccccagcccggagccaccccagggaggagccccaggccagcggtcagattcatgggcttccgtgcagaaggggagctgcaccggcgagcacccggcctctgagctgagccgcatcctcacggacaggacagcgccccattatgaggctcctgcagctgttcctcgctccagataaaggccatgatttattctgtgtgcccaaatggggcctcattatacagggcaggacacaaggaccctacagcaagtgtcctcaaagagtcgcctctcactccgtgagcaagactcctcggcctcccaccctccgttcacaggccccctccgccgtctgcgggcgcaggcctgggagcgccgcctgttgccatgacagccggcccctccctgccccccatcagtaggaaatcatccccttctgaaacgtcctgttgtgtccctcagctccagcccaagccccccacccagcccccgcctgctctgagtctctgagacagtcacacactcagactatgtggccaagctgggggcggggggcatgggctagggacacactagaatattcacgctccggtggcagcagcagcagcagccagaggagcagcccgacacaacaagggacccctcaggaatgaagcagcctttcagggccagaggggctgtggtctcccttcctctccttaaatagccagcgttccacccacagcggcaaggagccccctgccaccaccgacacccacgggcggagatcacctgctgccccgcagacccctgtcccttcctcccggaccagcagctagaggtaaggggcaggctgggtggggtggactgggagcccagggctaagcagaggaaacactcagcggggagccctgcccagggagacaggcagcagcctgtctcgtcccatctctttggtgatggtctgacctgtgcatcgaaggctgaccacagtctgaattcacagcagcccacaaagcggtgtttcgtccctctgatgggggcttgcagaggggaagtggcttgccggcagtccaggctgcaatgacagcaccgctgcccctaaccattaggcagccttgacccatagaggagccagatgcctgggagagggctcgggccagggatggagtggcgctaatgcaaaggaaactgccaccacctggccatggcgctgccaccacaggccctccccgaggccacacatgcccacctgccacctccacagaggcctatgacctgtcctagatgctcgactcacccacagccacgggacccaacactgcccaggccccggcccatgccacgccctttcctcttacggacaccggctcggtggccgtctgaccagtgagtcgtgaggaaccagcgagtctagactgaagtttgtgtttctaaagggcaacagagagtgaagcggggcccatctcagaccaaactgcaacaatcagtatcagaactcctcaaacgggggacagaaagggagaagaaacctcagcaaacctgaaaccaaccagaaagctgtttaaaatggagtctcagtcccagagagagcgaggggcacgcccttcggcccgggcaggaagtggagggcagtgcccaggctgaggcccccgggctggaggcaggaggcaccacaggcccacctggtgccatgagatatgccacccctgccgtcactcagggccctgagcccagtaacactctgccgtcactgtcctgaaactcttcctttttgagca

SEQ ID NO: 8358 - DNA, 6000 bp, Homo sapiens
cagaactgtgagccaaaatgaaactattttctttataaattacccagcctcaggtatttcttcatggcaatgtaagaatgtgctaacacagatgggctgctgtagggcttgtgcattaagaccaagattttggtttttatctatcttaagagtgatgagaaatcagtggggagtttgatttaatatgggataatcaccatcacaacatgatatgatggtggtgatgataatggtgaagaggaggatgatgatggtgatgatggtagtgatgatggtgctgatgatagtgatgtaatgatggtgatgatggtgctgacagtgatgatggagttgatgatagtgatggtgatgatgataatgatggtggtgatggtgctgatgatagtgatgatggtgttgatgataatgatggtaatgaagtgctaatgatagtgatgatgatgatgatgttgacagtgatgatggtgctgatagtgatgatgataatagtgatggatggtgctgatgaagatagtgatgataatgatggtggtaataacaaaagtggtggtgatgatatggctgctacggtttggacgtgtttcttaaagttcatgtattggaaacttaatccctaatgcaacagtgttgagaggtgggacctctaagtggtgattaggtaatggaggctctttcctcatgaatgaattaatggtgttataatggaagtgaaagtgggttagttatcttgggagtgggttcttgataaaaggatgagtttggcctccttcccttctctttctcacatgtgctgtcttgcccttccaccttccatcatggcatgacgagcaagaagaccctcacaagacactggcaccttgaacttgaacttcacagcctcaaaaactgtaagaaataaatctctgttttttataaattacccagtctcaggtattctgttatagtagcattaaacagatcatgacaatggtgatggtgatggtggtaatgtgatgatggtgatggtgatgatgatgagataagggtgagggtgatggtaatagtgatgaagacatgaagataataaagatatgttgactgatattgatggagactatgataatgatgaagagtccagtaccaatgccagccaggaaggtagaggtagaaagatcatccagggaacagatggagcgaggatggaaataacacaggatttggagtgagacatgcctattctctgccacttatttgctaggtggccttgggaaaattaattggcctcatatgcatgtcaatttcctgatcctcatcagggttctggaggatgaaaggaaatgtaaaatggtacccagaatttgccacgtcagttctttgtgtattacctctgccacacatgcatgtacccaggtgcaatgatgagggcccgggggcgggggggctggagattttctctgctcctgcagctaggtcaggtgacatggccagttgctgagggacattgcattgctgccaggaaaccaagaacccctgtttagataatccttttcaacctggctgccagctgcctttgggagctgctgtgtgatgggaggcccagctgggagtctcagtcacctctgccagtgcccactgcccaccctctgactccccgagccttgacctgacaccacggtgagtaactcctgtcctgctgccaccattgggggccatagcaacagggtctgcatgtctcaggaaagagagcttttttttttttttttttttttttttatggagttttgctcttcttgcccagactggagtgcaatggtgtgatcttggctcactgcaaccttcgcctcctgggttcaagagattctcctgcctcagcctcctgagtagctgggattacaggcatgtgccaccacgcccagctaatttttgtatttttagtagagacagggtttctccatgttgatcaggctggtttcaaactcctgacctcaggtgatctgcctgtctcggcctcccaaagtgcaaagtgctgggattacaggcgtgagccaccgctccccgccaaaagatggcttcttactaacactgaactctctcaaaaggtgaccttaggcagggcacttaacctccctgggcttcagtttcccacagagcagcatgtcatttctgtgagtgtgctcagtgcctgcacagaaggtgctccacgatgaggctgtgggtggtcactgttacctcatctcagccggaggacccaggagcatgtccattctgtggtttaaacatgtttgcattaggcacgcctacagcctcagtttacctccaccttcctagagggcagggacactccagcatccccaggctcttgaagggccacggatggctgagattcaacttccaaagttatgttcagattcactagcctgtgctgcacacccaccccgcgtctgcacccaaggccagcaggcccgtcctgacccataatgattacaggaacggggcaaaggagttaaaggctgcagggtcctaaccagggaggccagctctgtgaccccagagctggcactgggtgaccccacatctggggttgattacagtgtagaaactaagggtggttctgagaaagcccatcttccctttcggagaaaccgcgatgccatagggcggaccccgcctccctgtccccgcgccctgggctgcactccctagggccccggactgcattttcccaggagggcagcctggatagggaacctcggcaagtgagaccaaactgatgttcccttaggggcagcacccgctcggtgctctgagattgttgtatgggctatttaattcctaagatgattctcagcaggaggcaggctctgtatcatcccagcggctttttcaccttgggagtttcgcgctttccgattccatgaagttgctgcttgtcaccccgtcaccggctataaggatttagctcacaaccacatttttactgagggattgtcatttaacgagtttccctctcccagggaatctgcattctaagaccccaaaggccggcgagggtcgttgtgctgggctggacagcagagagaggctcggccttggccctcagccctgcagcacacagggcacccgcgcagagagcgtggcctgcgaatggctctgctgcctctcccggcctggggccgattagaccggtcagagcatctgtaaagtacaaggggcccctagggagtgcaggccagggcagctggggcagggaggcggggtccgccccatggcatcgcggtttctctggaaggggtgatgggctttctcagaaccacctttagtttctgtaccgtaatcggccaaaaaggcgcaggcgctgctgctcctggcagctgcgtaacaggctctcagaggaggacgcggttccgggctgcggcgggcgtggtccggggctgttctgggcgtggtctttggctgtgatgggcgtggccttgggctatggagggcgtggtcccagggctgcgatgatggtggtccggggctgtggtgggcgtggccccgggctgcggcgggcgtggtccccgggctgcggcggacgtggtcaggggcggttctgggcgtggtccctgggctgcggtggacgtggtctcgggctgtgacgagcatggtccctgggcagcagtggacgtggtctcacacccagagtctgaaatttctgcctcttcctggccctaaaaatatcctgcctgttcccacgcggctcctgccttctggagcagtctgccaggccggcggtgggtgttgggcaggggtctcaggctgccagcagccaagtgcagcccgttctgcagtgatgacagggatctgtgggcagaggggaccgagcctcggaggatgctgtaggtgggagagctaacattgactcagcatttacttcaggctatgcactgtgctgagtcccttacctctgggcttccgcaacgtttccctgaggtcagtgtggttggcattcgtgtttcacagataaggaaactggaacaaagcttttcaaggccacgcagccaacacctcgagagagcgggagagcttgttcacttgaactggatccccaaacaccaacagccaccctggccactggctctgactgagctcaccccacccccgacaagccaggtgcctggggaacctgccttccattcctccccactagctcctatgaggtctctgcctgccaggcctcctcctccccagaggaagggacgtttctaccacacagcgaccccacaagtcagctgagattttgggggcaccgaatactcacatggagccctgagtggaaggggtgtaggagtcacactcacacgcatgcacagggtcaccctgagctggagaccatacccaaggctctgtgaggaaatgtgagtgcgcccaggcccctccagcctggtccaatttgctgagcctctagctcgacagaggtcagaccaggtctacagcccagcgatcctagttccagacagctgctccttcctttctaggagggcagcccggaatataatccagtgtggtgagaatccattgcacactccctgtgagccaagcagacaggtttgggggccactgagataggggacacttctggaggggtcagtgactgcaaaatggtggcagtgggatgatctgttatgtctacccacgcacatgcagctgcacagttgcagagatgtgaatgcaggaagccaggtgtgagtctgaattcacattggtttttttatctttattaagcagtcattcctaaggcctgcccgagcctggcatctctacagaggagtggtgccatcaggacccctgtggggcagatcaacactcaaggcaggtgcagaatcaacaacctgtgacaaagccagccatccctgccaggaagcatgggggatgagctggcaccttgccctgtgggcactacagcttggccggccctgatccagctcatcagcaagacaccctgcatgccccaagcagccagcaacacttccttgggcctgggggacctcagggtgcccagctccatgctgtactggcttttccttccctcaagcctgctggctgcagccacactggctgtcagccccctgctgctggtgaccatcctgcggaaccaacggctgcgacaggagccccactacctgctcccggctaacatcctgctctcagacctggcctacattctcctccacatgctcatctcctccagcagcctgggtggctgggagctgggccgcatggcctgtggcattctcactgatgctgtcttcgccgcctgcaccagcaccatcctgtccttcaccgccattgtgctgcacacctacctggcagtcatccatccactgcgctacctctccttcatgtcccatggggctgcctggaaggcagtggccctcatctggctggtggcctgctgcttccccacattccttatttggctcagcaagtggcaggatgcccagctggaggagcaaggagcttcatacatcctaccaccaagcatgggcacccagccgggatgtggcctcctggtcattgttacctacacctccattctgtgcgttctgttcctctgcacagctctcattgccaactgtttctggaggatctatgcagaggccaagacttcaggcatctgggggcagggctattcccgggccaggggcaccctgctgatccactcagtgctgatcacattgtacgtgagcacaggggtggtgttctccctggacatggtgctgaccaggtaccaccacattgactctgggactcacacatggctcctggcagctaacagtgaggtactcatgatgcttccccgtgccatgctcccatacctgtacctgctccgctaccggcagctgttgggcatggtccggggccacctcccatccaggaggcaccaggccatctttaccatttcctagagttcttgagtccacagtctggcaagctgaggttaaaaatcatatgttgaatgcagcagtgtccacttatgac

SEQ ID NO: 8359 - DNA, 6000 bp, Homo sapiens
gggggtcggggtttcccctttctcatgttgtgtcaaaattcaaggggcttatgagatgcccagaaaatgaggcattgggtctgttgttcaaagttcttcctattgccaattctgctctatgattttgctgccagggctgaccagagcactagggccagccagccaaagggctggcctttatattttatcttcaatcctcatagtatcattagcatgaaggtatcgttatcctcactttgcagaactgcctgaggtcatcaaacattgagattggagctgggatctggcatgttttgcagtccacgttctttacatgagcagagggtgagtctctcaaaagaaaacgctctgtagtctctcaaaagagaatactcttcagtgggggaacttgttttggatggtcagtgtcagggaggcaagaaattatgatgccaagtctggtggatgtttatcttgcttttaggctacccagcagcttttggctgctttttatctctgggaaatttccatctttttgagtcctgcttcctcaagatagtggtcagaagcttgctttcccagcatccctcacagccagagtgcagcatgtggcctgggctgcgccagtcacgtgcactggcatgagagtctcatttggaagagaaggatgggaaagagcagtagccacatggactctctttggggttaaagccagtgtgtgacaaatggggttaaaagagtgtaaaggagcctttagagagagcaaagacagaaaagctaaagacagcatcctaagccagatgtttgcagcacctctacattggtgcattctgatgggataaccttatgtgattctctggccctcctaggggttatatgaaataactaatagcctcatttctggatgaaactggaatgggctctgctgtttgtcctaagaactctgcatgtccagaaagtaggtaatagaatgattggactggagtagggaaatctagaaggtagcagtgatgaatttagactgaaaagtagactgagttaaatatggaggaagttgatagctaggctaatggattcagactatgtattggaggccatgggagccatggaaagcttttgagaagaggagtggcaggaaggagtgcaaaaacactgatgtggccatgtggccaaggtgtgtgttgctggcagagagaggcagtgtgaggggcacaggtgtggaagtgatcatgggttctgatgacggtttgtggttaggtttagtcatgaaggggtggtagttatcaaccctgctaaacattacaatcacctgtggaactattaaaaatgccctactccagtctatttatatcaaaacctttgtgggtggagccctggacattggcattatttaagccttcaggtgactccaatgtgtagccagggttgagaatgggagaagaaggagctggaaaggcaggctgggggtggctggggagaccttgactttagtaactgtgccaaggttctttgactagaggccaccaaaccggattcttcttatttagcaagtaagaaggaatttattggaagtatgggaggtagctcactgagtcaaagggaaggctaaataaagaaccagatttatcagggacctagggagtagaaattcatggaccaccagcttgggctctaccatcaagaaggtatcagcttcaggcatcatcccatctttgttgccactccatccagggatgagaaccttgttggactggctagggctgctcatccagcccctgtgaggctgagatgagggcaggtgatggacagtgccgtcaagactgcatgcagtgagaggcgtggtccccaaaggagacccatgttctacccaggagagcgggttacagagccagggagcagaaacaacagacaccccctgtggggaccttcgtaagcttagtgatgtgctctgacattgttgagttccttctttgttccatgcagactttccccagattctattctctcttatatccctggacttccccttccccctggctgagtcctgggtgatatttcccagggatctggtcatcttagtgcatgagcagtttagaggggtggggaggaggggtcagcagcagagcctcctgcttctgaaatgctgctgccagaagctggttggtgccaaatccccagggcatgtctcctgccttgtaagctgactcactcactcacctaggtcactcactgaccaagtatcaggttgtggctgctcattaccatgaaatcaggttgtatttgaaacttggcctggaaaacaaagatctctggctgtgcttcagcatcagatgcaacacctatttctagaattgggcattttctagttatgtcttaatatgatattggccttaagccaggactccttatttcagatgtaagatcctacctttgatgtcaagcatattgaccatggaaaataggaaacatatgagttgcattcattgccttctggaaatctaaaaagttatttaagaaagaaaaactagtaaaatttattaaagttttgttcataaaatgttttagtttcacattggaatgctgattgatctttgattttgatgtcagtcacattctgtctctagggcagttactgttttctctccctgcaaattgagaggccaggaggctgctctccaaggcagcttctcagagtcttcacttctcttggtgatgtttttttgaacgagagtcaccatacgccaggtgagccttccccgtggaacttggcagtgagctgtgtgcattgagaatatgtggagggagtgtggtgtgtgtggacttcacattcagtgggtagggcctaagtatgtgactactgtatcttaagtggtggggatgatggcaaatggggagtatattagtttcctgtggctgctgtaacaagttactacacatttgacggcttaaaacagtagacatttattttctcacagttctggaggccagaagtccaaaataagtttctctgggccaaaatcaaggtgtcagcaggaccttagagcttaggctttaggagagaattcactctttcaaccttccagttgctggtgactgctggtgttccttggcttgtggttgtgttaccccagtctccaaggccaacatcttcagatttctccctgctctgtcttcaagtcatcttcttgtttgtcttgctccatttgggctgttatatcgaaataccataaactgggtggtttgtaagcaacagacattattttctcagggttctagaggctgggaagtccaagatcaaggtattagcagatttggtgtctggtgatggcctgctttcaggttgcaaactgctgacttctcgctgtgtcctcacatggtggaaggggcaaggcagctctctgggacctcatttataaggacacaaaccccatgagggatgtactatcatgatgcaatcacttcccaaaggccacacctaataccatcacattggtgactaggtttccaacatacagatttgaaggacacaaaaattcagaccatagcatcctctgtgtgtgtcaaatctccctctgcctccctcttctgagaatgcatctgatgaaatctagggcctactctgataatgcaggatcatctctctacctcaaaatccttcgcttaatcacatctgccaagattctttttcttataaagtgacatttactgtatccagagattaggacctggtattctcggaggacatttttcagcctactgcagggagcaaagggataccagaaagtacaaaaatttaatgtggtacatgagcatagccttcccacctacagagagacactgctgtgcataggtatatgtcccaatctcctttccatcacctactagtgtgtgtgacttgacaaattactcaggacctcagttttatcatctctgcattagacataaactggtctaaggttgatttgagcatgcagtgagaagtatatggaggccacctgtgcagtgcctagcatatggtaggtcgtcattgaaaactacatttgacccttgaacaacatggatttgaactacttgggtcttcttatacatgattttttcccaataaacgtattataatactttttggagatttgtgacaatttgaacaaacaaatggtaaagcttagaagtagaaaaaagttaagaaaaagatatgtcatgaatgcataaaatatatgtagattcttgcctattttattatttactatcataaaatatacacaaatcttttataaaaccttaaaatttatcaaaacttacatacacacaaatacagattgtacatggtgccatttgcagttgagaaatataaacaaatgtaaacatgcagtattaaatcataactgcataaaaattagctacagtaattttttgtagctacctcctgttgctatcgaggtaagcttaagtgttcctagtgtccacttgcaactctgtgtgacgctaatcatctcagcatgagcagtttgtctctccagtaaaatattgcagtaaaaaagtgatctcgtgggcttctcacataaatttcatcatgtttagtgcaaataccataaaccttgactaacatcatgggactcatacaaagtgccactagtggtgctggaagtgctgccaagaagtaaagtcatgatatcacaagaaaaagctgaattttgacatgtactatacattgaagtctgcaactgcagttgccctccatttcaagataaatgactccagtgtaaggaccattaaaaaaaaaaattcatgaagccgtcacttgcaagaagtattttgcaaaaagtgtgaggttgtcatgcctgctattactacagctatgccagcaggcatgacaacctcatactttttgcagaatagttttttatattgtattggaaatgcagcttttatgttggtgcaggattgctattagaaatagcaattgctatagactctaatatgattcaagaaaaagcgaagtcattatatgacaacttaaagcacaatgaaggtgaagggcctaaagctggagactttaatgtcagcaaaggatggtttaataattttagacatttggcttaagaaatgacaagataacaggagaagcagcttctgatgatcaagaggcagcagatgagttcctgtacaccattaagaaaatcattgaggagaaaggatatctgcctggagaggtatttaatgcagatgagagtgctctattctgaaaaaaaatgccatgaaggacgtttattagtaagaaagagaagtgagcatcaagatttaaggcaggaagggataggctaactctactgttttgttcaaatgctgttgggtttataatcaggaactcctttatttataaagctgctaactcctgagtcttgaagggaaaagataaacaccagttgctaagtcttttggttgtacagcaagaaggcctggacaataagaacactttttctggattggttatgttgatgctttgtccttgaagtcaggaggtaccttaccagtaaggaactgccttttaaaattcttttaatattggacagtgcccttggccactcagagccccatgaggtcaacactgaaggtgttgaagtggtctacttgcccccaaacagaacatctctaattcagcctctagattggggccataaagacctttaagtctcattacacgtggtactctatggaaaggattgtcagcattatggaagaaaaccccaagtctggaaggatgacactattgaagatgccatcattgttacagaaaaagtcatgaaagccaccaagcccaaaacaataaattcctggtggagaaaactgtccagatatgcatgacttcacaggatttacaatagagccgattcagaaaattataaaagagattgtggatatggcaaaacatcaggtgggggtgaagggtttcaagatatgggtcttagagacatacaagagctaagacaccacaccagaggaaataacagaagatgacttgac

SEQ ID NO: 8360 - DNA, 6000 bp, Homo sapiens
ttggtctgcactctgagtttattagagcaaaataggtgttgagtgtccctatggaccaaatgtgggacacacagaagagaacgatcctggagcccctttaaatcctgctcaagaagacagctggggtgtgggtggaagataaattgggagtcctacggagggaggaaatttggagggggactcaggaaatccagtgacacttgcttatgtggggggcccagcagcaggggcacctaagaaaaaatgaaggcacccacaagataaagagcaggtttgacattagccaggtttggaaaagacaatgccatcttacaactgtcccagtaaagtaagaactttcttgccccttcttttctctcttcccttccctactctgattctggaagggtcaaaaccagcagctttcatggtggtctgggatgaggaaggaaaggagaagctgaccacgtcttctctcctaaaggctgagacctgcctgtgaccagctgtaggttggggaggagggcagagttcttttctttgaaatgaagattgaaatatgtagtgatatattggtttgggcattctaatagaaagaatctggtactttctattacctataagtgaccaaacaagctatatccagtggcaggggtagaattgccttcactgagcaagtttaaaaggacagtgagataaaacattaaaattgcttttatgatttcaccgaaggaatactgcgtcttcattgaattggttatatcaccagcaggagtgatagatgtgtttttataacctaccttccaatgaggtacctaaaacatggtgaatcagatttttccccatatacggatatgagtgaatgcccaatctatgatagaatttcctggagaatttctatgggtttctcaggagacccatccctcatatcctttatagccaaaacttgcaatttatagatgtcgaagccctttagcataagtgatctcgacagcttatcaccaccaggtccctgtgaaatgcagagagcacctagtattatttgcactatatggagaataatagctaagagttattgaacactcactatgtgcttggcacttatgctaaatatcttacaaataccaaattcatgtataatactattaatttctccactctacagatgatgaaacggagtcttaggctaagtagttaatttaaggccaaacatttagtagaagatatggctgcaatttgaacttggctgcctgccttcaaattcctaactttgaacctctgctcagatgaacaaaatggaaatcagacattttagcaactcattcgaggatctacatagcattaacagatattggtcttgtctcatccttgtctcatggagatcttcagtagagatcttagttctctagtagagaaagaattcactaaactataggaaggagattaaacagataataccttttccaagtgaaaaaacaagtctcaaaagatagtgtaagtaaattataactgtacactagaatatttggtggccaggaaaaaatgtttaaggattttttaaggaaagtaaagcatttttccattccaatagaaaaagtagcctataaactattaatgctttcaagtctgtttgaatacatgtatctatacacatacatatatgcacacatatacatacacatagctagttatatgtatgtgtttgtgggtacatgtatgatcatatcacttctaatttttaatttttttttaatttttgtagagatggggggggtctcactatgttgccctggctggtcttgaactcctggcctcaagcaatcctcctgccttgtcctccgaaattgttgggactacagatgtgagccactgtgcttggccttgattgtatcttttcataatagaaaagtttagaattaaatgcactaaaatattaacagtattacctctatgttatggaattatgggtaatttttactttttctcctatatttttctctgtttccccccaaaagatcaatcatattatttttcctctccatataggtttattaatattttatttacttaacatttttattgagataatttgcatactgtaaaattcactcattttaactataccatttgatgattgttattaaatttatagagttgtgtatccatcaccacagttcaattttagatcatttctagaagatttctcaggcccatctgcagtcatcccttattcccacctcccagccttaggcaatccctaatctattttccatctctatagattcgctttttctggaagtttcacataaataggatcatacaacatatgctcttttgggactgacatatattgtgttcttttaaagagagggaaatgaataaatattctttggttctttgcctttcccatccaatccaagcaaaagcctgttttcttcctcttaatactataataactaattatcaacagagtttcctttactcctgtagttcttgaccagcaatcaaatccctttcagatcacaagataatctataggacagtaaagctattcctgatgttttaaggatctctgttttttaattcctcacacatttctctatttttacattaaaaaactgatttataactattttgttcttaccctctggacagtcattgtagacatgccctatactcccattctattggcagaaacagggacaccatcactgatgtggaagggtttggaatcagacagacccaaattccactccggggccccatctcctgtagctgggttatggacccttcctgagttcagtgtcttagtgagtatcttggagttacttgtacctacctccagggctggatgaagacatgagcatgctctggacaagctagtgattgttggttctccttcgaaaggatgttctttaaataagtcttcaacttctctttagagaagaggcagggcccccacacagcaaaacaaaggccttgcagttcatcagagctacactccttaaaatgcactgtggactcctcgagggtctcactctcactcccagcagctcatcagtgtcttccttccaatccaattaacactctccctgaaagtactgatacatatcattttcaatatttcactacattttcaaggatatttattgctgtttgtggagtagtgtctttctggctctgcctcatagagtgttctgaagattaaatgggatcacacatgtaaggagtactgcacagggtctaacactcagtggatgttcaataaatggcgactattattagtatcataaccaaagctatggcaactctgagcctctgtgtgatgacaggtgatgtgcagctcctttctcctctagctccttacctggaaaccttctttgcagaaaggcattttcagaaagcttttggtgaccttgaaacattctcaggtgctctctgatgtctttataaatgaaacttaatatatataggagatacagttcctccttcatacctgtatagtaaaaaagccacaacataaatacctttggttaatctttctatagtatattattttaaatattagcataaacatgatagaaattaacagaatgaaggttaactgggggaaaagccctgagcagggagggaggagttgctgtgggaacactgtggcaggtctgaaactagatcctggctatccagcagagggaaatggcacatatttggaggcttttatatcatggtaataattgttttattaggatcaaagcatcccagaaagcacttgctctttccttctctccagtccccctgactctcccctgagcagggttggataggaggtttggtggggggaggaggcagggaacagtagaagaaagcaatgctatgtccctttcccccattgtctggccccaaatgtagtgccataaatatcaaaacagtgcttggtaatagtccaaaacatttaacttgtccgcaaattcctaaacaaccattggcgtgtaatttggttcttggcagagtgtaactgaataacttgtagacatgacatttgtgtgaacatctacaagagacaggccgttatcaccacccattcaacactccagccagaggaagaacagcaagggggccagccatacaagttcacctgcgcgtccggggtctcggttctgctgtggcccggctactccccattctcaactgtgttttcttcaccatgcaggtgatggaagcccaggcaggcccagggttcaaggccagtgacttcagcctgtcaccccctcagaccacatcgggcccaccggcctcctccctccctgcccctcagccctgcccgcactgccccccattgcgcccagcccttcctcaccccgcaggagaagctggcctctcattcctcactgagagactcgacgggcgtccccacgccaagccttcctcgccctcccctccagccttttctgaaggggagacagcaaaggtgagcaagcaaccgccggcaagtttcgacagctgctgaggaagactcatgggtttctaaggaaacagagaggcagcagccattttagtagcatttgctgtatgaaaaatatatagacactggcagccctctccccactctgccttggcgcctgccctcccgccccgcctcagaggccccggggtgagggtggggccccagtctccgagggacgcagcggacacctgtcgcaggtggccggccaccggggtcgccacccccagtgtcccccagcagcgggaccgcggggtccccaccccggggcggaatccccacccacgggcgccgcagtgcagcggcgggcgggcgggcgactcggccctccccgcacccgcgtcccgccccccgggtcccctccctctccccaccgccccaggccgcgggagcccgcggggagggcgggcctgtcgcagccgcgctggtcgccaggcgtccgggaggagcggggtccgcgcggcggacgaggcgggggcggaggcgcaggcagagcgagcgcgggaggtcgccgcagccagggacaccgcgcgccgccgctcaacatggtcgctgcgcacgctgcccattcttcctcctctgccgagtggatcgcctgcctggataaaaggtagctcgccgggggccgcagccgggggccgagctctgcggtgctgcccgggccctgagaccgccgcagctccgcacctgggcgcagcgcggccgggctgcgggtggccggggtccccgagcgggggaaggggttgaggtcctcgtccgggagacaggaggacaaggatccccgcctctcgtggggtgccagcggcatgagattattacacgtggtggagaaaatgcagcgcagtaaggggagagagcacccacctctccaaccccctgccctgccgcgactccaggctccgctcctgggtgggggtttattttctcttggcatcacgggacagaagaatcgatgcataccctttccggctattcagaccttgcggggtatgaagttttaaagaggggtgggggcaccggcaggtgcagagtaacattctttttttgttcttgaaagcaaagtgtgagggacccggtggagctgtcgaatcccttgctgaaattcacagctctctgcccccgcagtcgctcgctcaaggtctgtgttagagaaggtcatttgggaggctgctttcgtcttaatacctgcttctcgggaaaagatctttacgctaaaaataattaaaaccataaagcatgtaactcccgacgacagctctctctaaggaggatgtgtgtgttaacagtggattgcagttgtttccaggctgtgacagcataattttctgtttgtccagattgcaggtttaaacgttacacagtatgttagcaattatagcttattaccctgattaaaaggtgatgcatctgaacttttaagaactgagcaagaaatcttgcagagtgaactgcctctgaatttcggagtttgatgcagaagggcaatgatgcacgtcttgcagctatctgcatgacatctc

SEQ ID NO: 8361 - DNA, 6000 bp, Homo sapiens
accccgtctctactgaaaatacaaaaaattagccgggcgtggtggcgggcacctgtaatcccagctacttgggaggctgaggcaggagaatggcgtgaacccgggaggcggagcttgcagtgagcagagatcgcgccactgcactccagcctgggcgaaagagcaagactctgtctcaaaaaaaaaaaaaaaaaaaaaattacaacctcagcaaagagccaaagccccaaaatatgcagctaacttggccttttatttgatccctaagatttgtatccatataactagaccaggattctgccctgatgattttttgcctatggatcacacagcatttcgtaaatattacctcacaaattctcccaacatcctgggggagcaagagatgttaagtgacttgcctgaggcaggacaagaaatcaatagtgaaaggcagaactaaaccagtctgtatcaaccacctctgcaatccttcctagacatcagtactgtgcagacccacattggagacatgggtagcaattaccaaaggtgctttttacatcataacccagatacccgaagtcgctttctacagactatggtccatatgctctgacctttgagtacagatttgactccccagaatggccagcgctctacatttggacattttttccagaactgttcatggtcttttattaatcaacttcctccatgttttctctcccagggacatgtgtttggaaaactggttggccagagttagggttctgttctgactctaacatctgcaagtggcaacataaccagtcaacactgtatttttatctgtgaccctttctctggactccccaaggacagagctccaagagtcgtttctctctgttgcctcatcttcataatactctggaaatgaataaatgaataatccttgtagtaagcagcctctcaaatggctccctatgatcccccaatggttttgcacactctatgtataatccctgctaccccttgagtgtgggaagatctggtgacttgcttctagtgaatagtatatggcaaaagtggtaggatgtcacttcccagattaggttacagaaagactgtgacttctatcttgatcgtcattttttcctgctctctctctctccctccttctttccctccctctctcagagggagagactctctgagcctttgctgtgagggaagcaaggtgccatattacgagtggccttatgagaggtccacattgcaaggaactgatgtctctggccaacagctagtgacagcctgaggcctgccaacagccacatgagtgagcttggaagtggctcctccaattgagccttgaggccatcacagccctgatcaacaccctgattatacaatagtcaacgtataaaactctcaactagcccagtgtggtgacgctcacctgtagtcccagcttttctggaagctgaggtagaaggatcacttaagaccaggagttcgaggctgcagtgagctatgatcactctacctcactccagcctgagtggcagggtgagattctgtctcaaaaaacaaaaacagaaacacaaaaacccctctcaatcgacaagggaagtgttggtcagactcagtgactgaatttaccatataaatcatctctacaagatgcggcctgcacatctaacatgattattgcatggtcctcctcttctgcaacttagatatctctaactttcataacccttgaaagggttttagggataagaatatccccatttttggaatgatccaacaccccaacaaaaatgaacacaagtcaatgacaacctgacaactggaaattccaagttctccatgttattacgtcaaaattgtctagtaaaagagaggccagaaaggaaagcatgtgctaaaatttgccctttctagtcttgcatgagtaattcttgcagcaggagcttcattacaaccgcaggactggggcacacgaagacggccattttcaaatctggcctgacatcagaatgtaattcaactagataaacctgggacttggccaaaataagtagcatttgcaaaactggagccaatgaatagcatcacttttctgtgggaccatatgactacatgtgaagaaataaaggcctttgttattttaaagggcagggacaattggaaattttgcagcagatagtcacaaaattttccacccttggctctcccaagaagataccagttagtggctttgggagttgggtgtggaaggggttgcttaggaagcaaaattaaaatgatcctggacagaatataaacagatgtcactacatttgtcatagaacctaaaacatgattagacccttacattgtgaacttactttttctgatcttctatgacttggctccttaaaatcatagcattctataccaggcaaggcttggaaagccagagctccccctctcacagcaaattcttattttggagaataattttggattgattttttaaaaatctttaaaaacaaaacaatctgttttaaaaattggctttgcttctctgctttttggacttgtctgcctgggacagagcaagaggactcacatctgtaacactttccatctgggatgggttttctgcatcttaggcatagactgcttttcattcgtcccttgtatttaagggttttttttttctaaattattatccctattgcctaacatcggagctgtctggggttataatatggagagtagaagctcatcagctaaattggttttagttgcagttgagacagtattttatcctgtcagttttcattttatttgatgacagtgcttggtatttcttcctcaataagcaaagatgacttagatcagtggcctgatgaataagcatgaaattttgatttagaaaaggaggatatcctgaagctcatggagagaaaaaaggaatctaaccccccaccacacatactttaaatgacaaagcaaagcagcagcattgtctttaagcaacatatttcaaccgaagatcaacactccccgatgttaggtaatagaaataataatttagaaagaaaaggggggcccttttaaaaacacaaagaaggaatgaaacatttttaaagcaggtatcgtattaccttcagcacatgtcccaaagaaaaggaaaaaaagggtgggggggtccgggagggagggcgaaactgatgcttgggaggaagaaggcgactcccgctgagggccggatggaggatgtgatcagtctaacactctgccttggcccaaaggcttccttccgccctttcgacctattaacaggagtggggaaggacaaagaaccgtgaatcggaaagaacgattcccagcaatcttcagtgatcgaaaataaataaagaaaaacagagaaagccaaagtctcccatggaagggaacccaattaattgtcttcgatttcagaatgagtttttttcctgctgtagaagaagcgcacgggaggcagcagagacagcaacttctgccaaggttcaacctgatcagaaatcgctcagagctccagcacccgggactgaggcagaagggctccgccaggaataacgttttttaaagcacaggattgctgtgtgtgtgtgtgtgtgtgtgtgtgtgtgagagagagagagagagagacagaggaaagaggaggaggaggagagattgattgattgatttttttcttttccttctcaacatgtcactttcctgcatgggaattcctgatattcctggcagcccggagagaggggagaggccccctggtgacttatgacccccgcaggagtaaccagagagcgcgcgcgagcgcccagcgcctggctcaagacgaagatttaaccgagaacaaaagaacgtttgccaatcagaaaacgctacccgagaacgaggataaccccgctttgtgttttgaaaactctttaattagcctggtttctaagacgcattaaaacattcctacgcagattctaaatggaggatcaaatggttgcttctgcaacgaagatgggatcccgaaagggcacacgccgcagaaccaaggcacacggggccactgagacgcccggcgcgtcgtacagagtgttcctgggcgctcggtctcaggttacttctagaaccagtctccccaacgccgtcttcgtttccttaaaacctcgctagagtcaccccagttccccagactccaggccgtgcgcgcgggcggggtggcctgagcccgggttccccgctctccctgcttcgggcccttcctccgaggggtccttcctcccgccgtcactcggccccctccgcccgactcgggtttctcctcggaggcggcccctcctcctttttataactcgggggaggggagaggggactgtggcctcgcgtggactctttgggtccggggggaaagaggcgatccgcaaggcgcacccccttctcgtcccgtcccaaaccccacattgaggacccggcgacccgaaagccccgccagagccagcctttgcagtcctaacgcgactcctggtcacgtctctccccgaaggggcgctgcgcggtcctcgctcccctcaaacgccgctggcgaaggcgcccctgctcaggaatgcgcatctgagtgcaccaggaagaggaacaaatctttgaagcaaattccctttctgcgcgttttcgtccctgagcgaattcagggtaaaagtttttccgaacttttccctcccagtcccccgcccctcccctcaggaatccgcccagagcgccgcggacaccgcctccgccactcccgcgcccgccccttccgacttccgcccaatccgaaggcggccaccgaaaaaacaaaggccgccattgggccgccggggcctggggccgcccccggagtggtttgtgaatggggggggaggggaggggaggggaggggacgggaggggacgggagggggcgggccggcccggaaccccgcgagcccgacgcttcttctggcgaccagcgcgactccgaggcgttagtcggcgctcactcccggcgggcggcggcggcggcggcggcggcgggcgccaggactcgctgctggggctgcgaggggctggaggggccggggccaggccgcgggcacgagcgcctcgcggtttcggacgcagtgtgactgggtttccaaaaagaactcgccgtgctcccgactccggggccgagatcggactcagcaagagccggccgtttggctgaaacttggggccgagcttttggggctgaagaaggagcggggtgtggaggaggaggcgaaggaggcggcgacgagcggagcctcgaggccaggaggcggggcagcaccgcggaggcggcggccggggcgagcgagcggcggcggcaggggttctcctagcggggaccggaccaggcgcggggggcgtgcgcgctgcggtgcgccgggggtccagagtcttgggcaaactttgaagggtgccggagccgcttgttgctcctcgcggcggagggagccgcaccgttacgtccccgcggggagagcgaggcggccctcctcggcgcccccaacccaggctgacgagttttgggcccccggcggccctgcgagtgcagggcggcggcgtctgcggcgccttcgcggcgcgggcacccaggcggcagcgccctttgctccacgccgcccacggcccggccccggcgccgtgaggactctcatgcgtcgggcgcggcggcgcctccccgcatccaagcctctcccaaccgcctcgtcgcactcctcaggctgagagcaccgctgcactcgcggccggcgatgcgggaccccggcgcggccgctccgctttcgtccctgggcctctgtgccctggtgctggcgctgctgggcgcactgtccgcgggcgccggggcgcagccgtaccacggagagaagggcatctccgtgccggaccacggcttctgccagcccatctccatcccgctgtgcacggacatcgcctacaaccagaccatcctgcccaacct

SEQ ID NO: 8362 - DNA, 6000 bp, Homo sapiens
ccaacagaacactttttcctacaaaaacatttttgtatcacagccatttggtggcacatgactggctaccataccattcattgcaatgccatgtcttagccaggctttgagggaccccagttcctgctactcctcactttcctatttttaccaacaaggcagttttcttcctgtttttgcacattatataagtcacccagtttcttggtgtgcttttgccattcaaaacacttaaaaatgccctttccctttgtcatagcttctgagaagctttgcagattttctcactatcctggaagacttcttcaagtaaccttagcctcaaagtaatcagtccctccctctgcagcctgtagctatttttatattatgttattttgtccatgttgatattttgctttgtcatataaattctttaggagaaaaccagtatgttccattttttgttgtttttatcaatatttactttttacagtggtctttcttgtctagaaagtacctagtataaattgctaacaaaatgtcatagctccctacatcttaaaaagtcctcaatcaaattttatttttcaaggtttcttgtacttattttaagtgataaagaaacaactagattgacattttcaatgttccttcctaatccatctccaaattaaagggttgttacttatctaggtgaaatttctctttcttgtggtatttggtacattcttgggagcatatgccttcgtgtgctgaaagactcaacataaattgctcatagatatgtcatactgcctgtaatgttgagtgatcctttggtttaacaaggattaaaaatgtaattctattgggaacttatctctgtggggaaatgagaaaatgaatgagaaggtgcttagtacatctgtgaagttctatggaaatgctaaagcgcattctataggggcacggtagaatagtagaaaaagtgataaatgtggaaacagaagacctaagctgaagtcttcactggctgccgtgtgtccttctgcacatcatttagcttctttctgagttatagtttcctcatctaaataggtactacccctaaaatggatattttagtttatgtatctctaaggcttgtttggggaatcaggatattttgctggatgcaaatattttgcagaatgtagatttatgaaagaaattggttaaaatatgttaaaaatatgagctattgttatagccagcaaattatagccatttaatccatgatattggctagttcagtcagacgttttccatggaggcagtaagattttcatgattagaatttttttattgaggaaatatgctatacatatgtagggatgatttaagtattgggaagaagttaaatgattttttcacatactaaaatcctatgggatttctagagaagacttgcagctctcctaaattcttgacagaagagtgtgtcaactctgagaaagccatttaattttagaaagacaaaatggaggtacaaaaagcagaaggggctatttgtccagttagcatttggacaggattaaatcctggtgctaactgatctaacaattaatgaaatcacattgctctcacatcagatgctagcagctagatttcacactgcaagcacgggagttcaatgacaggatggtgttcagttattattggtgtgtagcaagctacccccaatcttaatgacttaaagtaagtacaaccacttacatagctcagaaatctgtaatttggacaggctcttctctgcttaagttggtatcaactgaggcagctgagcttgggttagaggattcagttccaacatggctcattcatagggctgatgagttgccactggttgttgcctggaacagtggttaggattgagacctgagatcttcagttgcctgcactgggcttctctatgggcgtctcagacttcctcacagcatggtggctaaattccaagactgaaaggaagtcctagagcctagaagtagaagctgccagtttcttaaggccagagtttatttccactatattctataggtcaagcagtcatagagcccataatcatgggaaggagacataggccctcacctctcaatgaaaagtgtgtgtccaagagttttgggggcatattttaaaacctctacagtcagagagtgtaaggggagaacagagagaagaagaacattaagtcttaggaggacaagcttgagttggggctgttagttggctactgagaagaaagttctcatctaattatttgagaaacaaagacagaacattggtaatttaacaagtagggcagtgtagatttaagagagaggaaatggcatggtaccaagcacataagtccaacttcttaattttcttcaggctttatcttgactgaggtgggccttgaatttaacaattttctttaatcctcagtagggaaactttaagattggcgattgcttccttttcattattttcccttaagctacaaattaattactgagtatttccataataggctttgcatattaataattataaatggaatgtaatagtgtatatgaaagtattttgcaaataccaagcttactgtcatttgtataactgtacagctgataaaagtttcctcgacattgtcattatctcatttaattgttacacgggccttatgaggcaacttgttattagtaataacaacctttcctaattaaacagagagaaagacacttgcacacgagccactgcacatcagtttggagtcaagacaaaaaccctcgccttggggagtaccttttctcttcagatgtaccccgagaagtacccgtgtttgaatggccagacttccctgttgttatctgcctacttcctgagttccagtgagaaagccctcaggactgagcttcagagggctaagttctttccaaatttaacagtcaggcactcagagaaaagactgccaaccatttgatggaggtgtttcacatctgagtttgatgaatggtattccaccctggataaactggagagatgctctatttaattgattgcaaaccctactttgatttctaagcctcttctatcagagcagccttacatggagctaaagttgtgatttcagaggcattagcaaacttttgtcctccacctcccttcaaaatatctttcccattaaaaagatggattctttaataagtgatgttgcattaactggttaggtacttggagaaattgttacattacctaaaaaattgatactttaaaacattaaattatttatttaatgtttgaaacagtaaaattatgaaacggtagaaaagaactagaaaaaagatctgatgaaaagattttctaatttttagtatgcaattcctttctcgcataaaagctaaggaagaaattataaaagaaaagactgctagatttagatacataaatttaaaaaaccctccgcactgatcaagatattataaattaggccaaaaacaaagttgaaaaacattttggtatttatgtcagaaaaatattttatattgtaaacatagacagtgcttttctacataaatagggaatactcaaacttaccacagccctttgcccattcacagactatgatcacaataataataataatattcatcatcaccaaacaatgctaacgatactagctaatacttattgagcatttccttggactttatgtttgtttactcacttaacttttccaacaaaattttgagggacagcagtgggctgaatgtttatgttcccccaaaatacatatgttgaagttctagtccttaaggtgatggcttattaggcatggactttgagaggtgatttggtcatgagggctctgagatcagtgcccttataaaagagacctcagaaaaatccctcatcccttctgccatgtgaggttgcaatgagaagacagcagtggtcaatgaggaagcgggcttttatcagacactgaatctgccagcactttgatcttggacttcccagcctccagactgtgagaaataaatctctgaagtttataagccacccagtttatggtattttgttatagcatccagagctgattaaaggaggttctcgcatttctcccatcttacaattgaggagattaagacaaagagaggccagtatgtaatttgctcagggttatgcagctagcacatggcagagccagaattcaaaggctttcttccttcaagaggcaagaacaagagattttaaaaggttgtaatacaattggccaatgaatgtctaaaatagtcaaacttaaaaataaactaaaaaaaaagaatattagttgtctttttttaatgccaggattcaaagcacaataccacacaaagaacttttgacccacaagaaatatatacattatttctacttaacacacaccgagtattattataatggttaggagaaaatgaatcagagcattttagagagctttaggactgtccagcgaacagcccagacgcagggcctacctggcctcgggagcctttagccatcttatcgctgtcctcggggccgatggtcagcgcacgcaggacaggaagaaacttctggatcactcctggaagacccagggcgcccctagagacagggccctggaacccgggacagagtggagggaagcagaaacattgcgaatcgggggtggcggcagcagcgacatgagatcctttgccctccgccccctgggctgcgggacccagtgacttcgaggaggagcgcgagcgcagccgcgcggggcgcacccggatccgcctggggcgggagccgcccccttcccgccgcaggcggcgcggggctgcgagtcaagtccaggactcgggccagtctctccggaagacaagaccaacctcgcgccgcggcgcagcagcacgcgggttctgagaagcgcgtggctccggcgacaagaccccaagcaccctcggccggtggcccgggcccgaccaccccagctgcgcgtcgttactggccacaagtttgctctgggccagccaagttggcaacttggaagcttctcccgggctctggaggagggtccctgcttcttcctacagccgttccgggcatggccgggctgggggcgtcgctccacgtctggggttggctaatgctcggcagctgcctcctggccagagcccaggtaagagccagtgctccgcgacacctgttttcgcggagcctccggcggggactcagctttagcgacacggaggccaggtgcgcgcgagagctcattcatgttcacacgtccacaaacgccccggcacgcaccgaggcgtacccggcaggtgctggcaggcaattagtggagggagcttcaaagatctgctttagtggagtgatgtcctggggccggcactgtttagaccagcatcctggcatccgcaaagtaaggggatatttccgaacagcggagtcgtggatcaagagtgtgaggctgggaaggtgaaggaacttttcttactcttaaactccgtggtccccatttaattaatcgaaatgacttttgtctgctggtaatttaccatcgcttttgagaatttaaatttacaggatcgattgtgaccactatctgaaagaataattggctgtctgtgatacagaatcacatacattcaagttaggagacagaataaaaataccaaaatacagctcatttgttaatgttaagcggtggctgtcacttttgtactgctaatatcatttagagattttctgggcgatctttcacaatgaagcctctttaatgtgcaaggcacaattcatacgcacttttttttttgagtcaaatcaaatgtagggtttacagtcagcttttcagatgagctagagagatgcgtgtagtggtggatgttatgcagttcaagagccctgtgaatttaaaccgaatcaaggtatttctctccggttcggtagggggtgcacctagaccgtcaaatgaaggcccaataaaaaattatttcaccgtgagaattc

SEQ ID NO: 8363 - DNA, 6000 bp, Homo sapiens
acctgccactatgtccagctgagtttttgctttcttccttagtagaacataactaatgttggagctcactgtactcttttgccagtagtaggaatccgatttctggtaagtactgtaggtgacagaaccaaggttgcttagaagatatggagttaggagaaaaatgaaaaggcataaatattttctacagcagtaaatcctaaggaagtaactagttccaagacactgtcaacattaaaaatccatagtgcaggctgagcacagtggctcacacctgtaatcgtagcactttgtgaggatgaggaaggaggattgcttgatcccgggagtttgagaccagcctgggtaacggtgagactccttctccatctctataaaaataaatctggctgggcacggtggctcacgcctgtaatcccagcactttgggaggccaatgcgggtggatcacctgaggtcaggagtttgagaccagcctggccaacatggtgaaaccccatctctactaaaaaaaaattagctgggcatggtggcgggtgcctgtaatcccagctactcgggaggcggaggcaggagaatcacttgaacccaggaggcggaggttgcagtgagccaagatacgccattgcactccagcctggacaacaagagcgaaactctgtctcaaaaataaataaatgtgtagtgcagcctggacaacatggcaagaccctgcctctacaaaaaataaaaatcggctggatgtggtggtgcatgcctgtggtcccagctactcaagaggctgaggcaggaggattgcttgagccctgaaggtcaaggctgcaatgagctgtgtcgtgccactccactccagcctgggcaacagagtgagaccctgtcccagaaaaaagaaaaatccatactggtgtaaacccgtatccagattgactcttctcttaacaaggacacacttggcgttagtatggatctagcctcaaagaccctcgtcacagatgaagcagcccatcgtgaccagtcgaggccttaggaccgcaggaggaatgtctcaggatgagggtcaagcacactgagggtgtgggctggaaaaaagggatctagttgtttcttcctagtctcaggaagccagtgccccaagggttcacacctggtaagtgtaggcgtccttggatatgggctgtagaggaacagtttgaatccaggtgccgccatctaatagctatgtgacagcaaatttcttaatctgagccctggtagcctcatttaaattggacataatgccacctacctgaggatttgtaaaaggaaaagagaataaatgtctgttacatcataagcattatgatgcctgtaattataatgtcaatgaatcttagttccctttatacactcaaggggatcagaagtgacaggctgttgccccagcaaagtcccacagaagccaacccttattcggtgcttggggtttcccaggctttccccaaggtagttggtattttggtattttcccctgcttaaatggcccttactgccgaggccaggcaggtaagaatctccatgtctggaaaaagtggaacctggggcaaactgcaagctaaggataaggagcttggcaggaaagacgctaagactctaacaggaagtggaagggtggacttggagggggaattgaaatcaagaaaaggaaatagccctagctgctgcctcagcctccttgaggggagctgatacttggagttggttgccgttaggttaccctcatttggagtagtactgatgagtgctcgaccgaaacctgggtctactctggtggcgattttgagttcaagcagtgctgccccctactgggggttgctaaaagcactgccatttcagtgggcggggggtgttggttctttttggtttttggttggttggttggttggttggttggttggttggttttgagacagagtctcactcttcgcccaggctggagtgcagtggtgcgatcttggctcactgcaacctccgcttcccgggttcaagcaattctcctgcctcagcctccggagtacctgggaccacaggcctgcaccgccacacccagctaattttgtatttttagtagaggcagggtttttccatattggccaggctggtctcgaactcctgacaggtgatccacccaccttggcctcccaaagtgctgggaaaacaggcgtgagccactgtgcccagcccaccctaaccttttttttttttttttttaacagatgagcgaattaaaaggttaggcgattttttttttttattattggagacttgctctgttgtgcagtggcgcaatctcggctcactgcaacctccccctcctggattcaagcgattctcctgcctcagcctcctgagcagctaggattacaggtgctcaccaccacacctggctaatttttgtatttttagtagagatggggtttcaccatgttggccagactgctctcaaactcctgacttcaggtgatctgtccacctcggcctcccaaagtgctgggattacaaggatgaaccaccgcgcctggctctgattttttttaatcatctttattttgaggcagggtctcactctgtcgcccaggctgcagtgcagtggcgccatgaaggctcacggcagcctcaacctcctggactcgagcaatcttcacacctcagcctcctgagtagctggaaccacacaacatgtaccactgtgcccagctaatctttattttttgtagagacggagtctcaccacgttgcccaggcctcagcctcttaaagtgctaggattacaggcattgagtgtgaagtgttgaacagcggctcagggaggccaaccagggtccagcaaaccccgtccctgctgcctccattggtccagagctggtacccgcagccagcatgacactcacccagtcccagacattgtgggtcaacagagagaaattcagatagctaagagaatggaagcggacaaaggaggcacaggaggattccatgccagagtctgaattggtcacccccattcaggctctgcctgaggaaaggagaatggggtccgggcacagtcagctggatggagcgtctgaagacggcttgcaccagagccctccgtggctgaagggagaagctagggggtgagtcagccccagggcttgatggaacagacaggaactagatgatctaggaagggagaaatgaggctgagcaggagacagcccaggctccctggctgccactacctaatctgtcccccttcacacacatcccacacacagtgtttagacagagcagcagagaagaaacagacatcctggatcccacagggagcaggctggggctgggaacaggaggtctgtttattcctggaagtcacatatcagaagggtcccacacccacttctgtccaggccccaggctgaactctcccagagcctgtgacttctgcccgaccagatcccgtggttctgaggaccggccctggaaccctgcgtccttccgacccaccagctccctcgaggatggacttgaggctggatgctttcctcttcccactttttgtcccaacagaagtccctgatctccaggatccctgactggctgtgcagagctggcacagccacactccacgggcttccagcccttcaggcccagctctcccggagagcaccagagtccctttgctccatttacttgcgctcttcagccagcaagtgtttcctaatgtctcacccccagtcccagctttcctgctgcaatttccgcctgttccctcccatttcaggccttaagggagtgtggctgggcttctctcctccccctcactccaaagccgcacttgatacaaggtggaaatcaaagcaccacttctggcttcccagccttgaacttgcccttccctctcaatgtatctggtttcctcagcttccctgtgcagcaagagtgtcactcccctcttgcttttcccaagctccccatgcgcccctctcagcagatctgtcttagaggggccaggtgcagagaaaggcagaaatcctaataatgttcccagcgatcgctgcctgtcgcggagtgctgaagggccaagtgttgatctgagtcctcatcacacgggacttcatttagtctcacgataggtgagtacaactatgggccccatttgacagatgaggaaactaaggcaagggaactttagtcatttgcccaagttcactggcttttttaaaaaaggatccagacagctctgattccagcgccagctcatgcctcttcatcatgggggaggaaagagagggagccatttgttggggcaaacccccacccatcaagggccatgcactggggtatatgccgccatatgtgttatcctgtgatattccccaccacgaccttaattagaggtggtttttcttgttcccattttaacacaggcaaaaaccgaggcccagtagtaccttacccatggtcacatccccagagccatttgtccctcatagttcagaacttgactcagaaagcagttgagaaaagtgtggaatgaccccagattcaggaaggcaagtctggccttagaaactgaaaggcccatcaggtgatgggatgggggagtgaagatcctcaggccccaaacacctgccactgccaccatcacacacggaagtgtggagggagcctggtgtgctgtcagctggctggccagtccaggggcttaaatgtaaatgcatcagctgaggcgggaagtcgggaggggtaagtcaatcattattattcattaactggaatgcatttctcagattactccgagctggagtagggaaactgccacctaggtggcagggggagaggggaactgggtgggagggggaggcaggcctcccagttgctgcagtttggaatatgtcaggtcccaccctcccagaggcggggccagggctgagtcctgccagcctcatttctctatccctctgagaacccagacgggcagagcctgggtaggagagcctggccccgctgtccccactgggtggagacaccatgcacttggtccacttgtgctcttcagccaggacaccagacatggtccaaaccgctgcagggctggctgcagcaactccctgacactcaggaaggcccaggctgggcaggcaatacctgctcccaacagccatgtgagtagctactcccccaaacccccaaaccccagatcctggagaggctactacacccagcccaagccaccagaccctcgggggtgtgcaggtggtacagcctgcaccctgctgggaaatcacccctgggggctgctccctgcctttgtcgctgttctagtggaggtgggttggggggaatcattccgattagggctgggagctccagctcaggccaggtttggggtaatggaccctgagtctcacgggacttaagagagttgatgatgccctgggaaagggaacagaaactgcaaggcctctagagaggaaaagacatcctgggtggagggcactggaagagattgagaaagagaaaacatgcttaggggaggggaaagggggcataaggccttggaggcccaggctcagggtgctgggggaacctgggaaggaaggggagcatcttccttcctctcagctcagggcagccatggggccctgatcccctgtcctggaggaggggagaggtatgaatcctttccttattgacttggatcctagcaacagcagctgctcccctgttgacagaagcaggagttcccacaggacccaggacccctccccctgtccccaggatgtggcagcagagccatgacactggaggactgagaccagggaatgacgggaaggacagggacagatgagagccacagagaagccagactctgcccagactcctcttccctctcctctgggctcagcctcaggcctgggggtgtgggggagtccctctccttgctgctggcatctccacgttcactgccacacgtgccct

SEQ ID NO: 8364 - DNA, 6000 bp, Homo sapiens
tcagtttcctcaattacaaaagtgggacaaagacagtgccacctttatggctgctgtgaagataaaatgaaagaagataggcaacatacttaacagaaagatgggaaaacatgaacactcagatttacctatgactataaaacctttctaaacttcatcagagagttcaaaaatgttgtcaagccttggaacgtatatctgttgcattcctttaaaactgtatgctatcactggaatttggctggggacagaggagagaagcggaagagaaatagccattctagatacctgcaagaaaccactcatgtgcatcctctcgtttaatcctgacaagcacccagctagaatagaaggctctattataattataaagataggaacctaacattcaaagaggctgttatctgaggagacatggtgttgaagaggttaaaatatgcgattccagcgtattgactaagttcaacactttaaaaacagcaggtgcaacaagatgactttgaccttcctgctgtttcttaaaagcagagggtgaaattcctatgtgaaagatgccctccctagatgatgcaacatttttatatagtcaaagtcgaaactgggagagttctgtacagatcttgttaaaaataactcttatcttttaagcctctccatataatttagtggcttcttcacaactaactcttctctgtccaatccactacataattaactgactttagctacttctttggggtcttcatttctttatgagggctcctgtgctgcgtgaagtttgtattaagtttttctcctgttaatctatcttatgtggattaaattcttggactcagctgggaccctaagaggagggaggtagacttttcccacccctacagtgtgtatatatcagggttccaagccaggttgtctggacagaggaacccaattcccttgagttgaggggctgtctttgcttttaagccgttgccctgcagaaggggcttggtgttgcggttattctgggggagcgtccagtcccaggtgaaatgactcctgccatgcccagctaccagataatgaagcttcttcccagggtcacaactccaagaatgaggaacgcctcgtcctcaggccagcggcgcagctgagcctctctgggctcatatcacagtcaccataactgcactgtctccactctaacggggctcccagatcacagaccctaccggccgccgctctggcccgccaggatcctcacgcttttaagtcaggtgcggtttctggaagaagcctggtggtgccacatctacaggcgaatcagatcccagagcagacagagctgaccacctgccctgtggggcgtgcaaccccaggtgcagattacagacagggaaggagggaggagcttagctgaaaccccttcctgacccctttccaataagcactcaggggtagcaaaacatccaggaacttttagttctgggtcagctgggacagcggtagggacagcgtcctgttcgtgccttctctgagttttctattaggtgccaccaaacacattcccacccaaaagaaccattatattggaccttactgaaaaggttaaaatatgcattctggcatggtaactgtttcagtgaaaggcacttgaaaaacagcaggtgcaagatcactctccccatagcagaaggaagacagcatccttatccttaggactagaagctgccagctaaagaatactgcagagcgtcactctaatctttttagtcacattttcaaagtttattcttctctgtttaatccagtatttaagtagtggacgcgaactgcttgctcgggtctgtccctctttccttcctttccttcccttccttccttccttccttccttccttccttccttccttccttccttttctttgctagggcctgcctttctctgttgctttctttcttgctttctttgttcgggtcgtcatctctttcctctttctttctttcttttctttctttctctctctgtcttttcttcctttctctctctgtctctccctctttctttctttccccaaggaggatttgcctgcctgcctgcctgccttccttccttccttccttctttccttccttcctaccttccttccttccttcccccttcccttctttttcttttgacagagtctcactctgtcacccaggctggattgcaatggtgcaatcccggctcactacaacctccgcctcccgggttcaagcgattctcctgcctcccgagtagctgggattacagacgcgcgccaccgcgctgggctaattttttgtattttttagtagagatggggtttcaccatgttggcctggctggtctcgaactcccgacctcgcgatccgcccgcctcggcctcccaaagtgctgggattacaggcctgagccaccgcgcccggccgggtctgcatttctgtatgagggctcccatgccgcgtgaaacttgcactatgctttcctcctattcatctatcttatgtcaatttaattctcggacccagccgggacccctagaggatggaggtggagttctgcccttacactgaaagcacaatcttccaaaagcagagacactcttcaaaactttgaaaagagacttttaggtcctagggcaatggaatctcgttttctcaaaaagccctgcttgcttaccctctcgttttcccccaggcctgttttctgggacagggtgggaggcccaaggagacagccaagttcaggccccaagcacccagctcctcctcccagggtgggagcctggccagagttcccgacccaccccgccccattccccgctggcgcttggtccgcccctccccgtctggaagcctccagcagccccgcccggcggaactaggggacgggtgggggacgtcgaagggcgagggcggtgaccccggggccagaattctcgcaggcgcctgggccgggtgcccggccgtgcgtgagtgcggaacaagtctgggcgcggggaagggcgtgggtgcgggccgtgggtgggtgcggggcagggcgcggggctgtgggagggcgcgaggccgtgtgtgggtgcggggctgggtgcaggccgtgggtgggcgcggggccggggctggcggggcagggcgcaggctgctgcaaggcggcctcgtggattctggccccggacgcacgaagcgggttctactttttaaaaaaactgcgttgccttttccttcctctacgttagcatcctgtccggggtccccggcccatgtggcctttcttccagcgacagtacacttagctcagaacggattgacacccactctgtgtttccaccgggcgcgcaggctctgcaatgcggagcgcgttctctgaaggacaggccccggagtcacggctacagccacagaaagcggaaaccgagctgcagtccagaggggatccccgtacatttccagcgggctcagacacagggtcccccacaagaaagaaacaggacagaaaaagtcaggacacgtatgctgtggagagtcgaggtctcgcctagatcttgggtgtgggtagacgcagccgctggcagttttcctttccagcgtctctggggagcctggagatgtccttggtgccgatgtgacacgaagagtgattgcgccgccctgcagaggcggtggcgggacgctgcgctcgggctgggaaaggccggccccagggcgacccctccggaggcccccggagagcaggtgtgcacctcgcctcccgctgggcagccagttcaggagaaaaatgtgaagcttttagctaaacaaaatatttctttcgttaagggctttctccacacggagactttctagccacgtgagactttgacctcccagtcccccagattcagcgctgggaccgagcgtctgctgttatttttagtagaagtataaaaagaatctcgaaaagttttagctctggagaaggcgtgaatacagctggtgccttcatacactccacttgagccgctctttaagaactccaggagatcagaaagcaatacgaaagccagagcattgcacatgggatgggctggcgggtggcctttgggtccctatcttatggacgatttttgtaaatggggcattggagatgagtatcacctggatcacatttttaggttgaattcctccgtggggggaactttagcaatacgcatccaaataagaatgtagattgcaataattgtagtaaagtgtttgccagactcatctcagaaaaagacattatcaaaaggcatttattatcttcctaatgcgtgtctggcactgggcagacactgtagaatactatcttgattagagtctcaaggattttgtacttaaagtcctttacaaataaaagtattcaagtataatctattataaagactcttttctccactttggggatatacggtgtggcatcgattcattggtcataccaaaactgttacttctgttttggaggaattaacaaggaaaacccaggcttagtaaatcaacatcgaagttcagaagttcagagtaatttgtcttgggaacaaagtcctccctagagcgaagaggcattcacaggagctcttggtgttaatgggattattcaagatatacctgagaccagataaatatttgatgattttgccaagcactagggtttctttgcagtttgtctttggctgacgttttccccccgtggggtttggactttgtggcttcaccagattttgcaaatgaaagaaggctggggtttcccaagagtacacttgtgcaggaaacaacagactagtgaggtttacaagaggggggtgtgtgtgtgtgtgtgtctgcctgtgggatgggggtggcacgggggagagagagatgtgggttacaaagctgccatctagaggctagaggctcctttctgcagtgtatataatgcaagtctgcagccagcagagctcacagttgttgcaaagtgctcagcactaagggagccagcgcacagcacagccaggaaggcgagcgagcccagccagcccagccagcccagccagcccggaggtaaggaaacggtgctcgggcagcagctctgctcggaaagaaggcacggcttctgctcttaagccaagtggtcttttcaaaggccttctttaaaatcgctcagatgggtgcttttgagtctgcgggtctggtttctgaaaacccaggctgcacgcagctgcattgcaaagtgcttttgctaattcggagggcttcacctttctcttcagaaagcaaagggcagttttcttaagtcacttgcagaaggaaatttccatgtgtatttaggaatctggtgtttatttgctgtgtggctatttaagctccagtaagcaggggaactttgcaagaacacagactatccattctgcctgaccaatttggcatggggattagcttggcacccactgtttacctgttttgcttctagtatatcagtttggaaacagataaaattggcagtaaatacgtaattccagaatgatgaacactttattaagaggcatccttaaatggagcagaaaactgctgagaatctttgtgagtccaagatgtatttgaattcagtactttgggggatttaccagagtctgtaagtccggaagctataaacgtgaatgttaaacacagcccggtcttctcttctcttgatggcacgcttgctaatctaatttgagtattgttctcttagaaggtgttaagtccaacttcaattggggttgggggaagcacacacacaaatctactattttgcaatttaaatatactcttcaggtaaaatgtggattttgttcaattttgttggcatgtgcaaagattcaaggagtgactgagagaactttggagtgaggtcagggatgggtggttagccaagacttgtaacttccagggagaatgagaagttgtaaaagtcagactggctgtctctctttctctcttcctctttctttctttctttctttcc

SEQ ID NO: 8365 - DNA, 6000 bp, Homo sapiens
tttagaaacgaagacctggtcaggaggtttgcttgttgctgttggagttggtcttaggctctctcggtagatatagctgggaaatatgtgcgtgtgtattaatccaagcaaacagacacacttgtattttgtccctgtatttacagctagtcatcagcaccatatatctgtgtgtgttcatactgatactttgaatttctgtcccttatttctaccttataccaatagtgagaaaactggctcacgttattcacaatttatttatgtatttatttgctcaatcctactatacacgtaaagtcattacagcgttgctaaaccatggccctgtaagaaacagatttactaactggagtacgtcatttgtgtacagttcttttgtcttttgctcttttgtctaaatgtgcttaggttatgtcttttattcctgatccacccagggtggctatgttacacatttgtaatatagtctcctagaggttaggggttccttcagtttgtatgtctgacatttcatgtcccggttttctgcagtagctctagatggacttgtctcttgtttgtctctatggtattggggtattttaaatttttcacgtctagagtgttaagagttcgtctttctggagattgtttcatatcacccgtaggcctgttcatcagcctccctcttggctccacgatttttctcagtctgcctttgctcacactaagcatgtggctggctgagggtagtataggagtgtgagttgtgtagtgggatttggtgggaattttttccctgttactcagctcctttgcagttggaaaattctccaagtaatgctgaggacagttttatatagaatttatttttcacttcttgttttttgtttgttttgtttcttgggggaataggggagataggcaacttctgttctcagctacttgcaagtgtgttggttttaacagtgggacttcctgcaggacttgaaaaattgatagttgatgaacctgagttccctgagatactgctgtttttgttagtgtttatccagcaattgcacgatttaaacaactcacagaactaagttgttattgcttataagcatgttatcttcagaaccactgattcattattgataatgattgaagttcagcctttaaattgcaggcctgatagtgaggacaccagtggagtcttccccttcatatcagcaagttattgaaaaactatctgtagaatatttgatgcttttttccttccagtacttaaaaacgttccattgtattctggtggcattatatcccatgagaactcttctgtcacccttacctgtgttttgtacatcagcagtccctagcctttttggcaccagggactggttttgtggaagacaatttttccatggggtgagagggggatggtttagggatgaaacggttccacctcagatcatcattctcataagaagtgcaacctagatcccttgcatgaacagttcacggtagggttagatcagctactgctgatctaacaagatgcggacctcagcttcactagctcacccgctgctcacctcctgctgtgaggccaggttcctaacaggccatgatctggtactcctgtggggttgggggacccctgctatacgtaatgtcttctctctctggctgcttttaaggttttctctttattactggctttaggcaatttgatcgtgatgtgctttcacatatttttctaaatgatttttgtgcttggagtttggggatgttcttggctcatgggttaatagaaaatgttccacatagtggtttttcacatatttcccacccatcttcctccaggggctccagttacaccttagagttgccacctggagttgcctcatggctctctgatgctttgttcttttattgtttttaagttacgggatgtaatagctacttggaaatcatttgctcctgttagttcttgcttttaagttttgttaggcagcaccagaatagcctttgtaatttttactgactacagagagggacttgcccttctaattatgctctgatgttctgtgtatttcaagatttttccactatggttggtgggaactggaactattcccagctgggtgtgggctcttaggctcttttcccttgggtagtgtccttagatgtgtgggctgagactcaagtgggaccctctgtgatctcgcaagcgcattctttgcgcagctctttcctctctggtactatgccctgccagcgttaactgcctggcttccccagactctctttgggtttcctttctccatctgtggtctgcaaactccaggcagtgagcagttgtagcactcaccttatttgtttccctgctctcaggggtccctgcacttcttgtggtccactgtgacaactgttgtttcatacattttgtccagttttttagtttaagatgggaaggtgagtccagtccctgtaacttcatctcggctggaagcaggaatcttatgttaatagtgaatttttagcagtgttgaccaggctttgattgtatctttagccctactgtgtatgcagtaaagcacttggccattttctaatctcttctattgtttaacctaatgcccctctagattgaggtaccctgggagaggaatgattttccatgctacctatgaccaattagaaatacagatacatcagactacaacttttgaagacgggaagcccatagtagttgctaaggaatgtcttacttagacccaaggtacagacaggaaaatcattaggagagaacatgcctctaggtgtgtgccttacttcagcattctccagagaactgtgaatttctaaagcatgtgaacttgagaaataggctttgtcttcttaggaaaatgtatcctttagggggtgttgagaaaacagcagtgacaggggcctctggccttgcctccttgcagtcaagcttcaaagagaaaacgttgggaagaaagactcctgctgagcctgatgaaagaggagtcccagttgccaaccaaaaacatgcagccaaagtccacaagctacaagtagaaagggtggctcaagccagagtccctggatatggagggcgagtgatggctgcagaaagatgcaggttcttctcccccactatgactggccatcgcctagtgcaggatgtacggtggccctgtcccagggctgtgctggcagccacccttccccactagctgtgctgctctcacatggcacggcctctggctgccaggcctgtgctcgggcctgcatttcccttgtgcccttctctccacccagccctcaggactgcctgggctgcattttgtccagaatcctttgtctccttacttgcactgcagctgaggcgagtgtcccttgttccgggtggctcctgtattgtggcgctcatgttattgagagtcttagaggtcaccccctagattcaccaattgaagggcagggcttgtcgatctaacagtgtcttgcacatagggacacaaatgtctgttaaatgaagaaagtagggatgccaggccacccaatggggtgtatctcctagggttcaagaacaagggctaatcaagtcaagagaatgtgtgccctcccccaccatctcacccctcactctcagaacacttggggcccctgcacaggtggtaggcatgctggccctgagtgccctcccagcctgtgttagaagaaccagtggatgacctcgctgtcagctgtctccccttctctgagcttactgcaggtggcagcagcctctcagccacagactgttccctttcctaggagaaaacgatggtcactcagcaatgctgtgcgcttgcagcttccaccacaaaagagacagctgtggccgcagcaccagggtggtgattcttccccctccaagggcagtggtgcattccttagcacaagtataaatttactgttgctaagagttctcggaacaggataatacaagaaggaaccactgcaagtgaaatccagccaccagtaatgccgagaggccaggcctgtgcctcccaaaacctgctcctccgcaggcttccccggcccatctccagagcgccctcctctcaccactttacataaacgaatgtacccaagatcccccatcagttttccatgcagctgccagagtgccaccaaagcaaacctcatctcaagactctgtggccaggccctcacaacctcctgccaggctctcgctacctacccatcaacagcaagactcccaggccatctcaatccccccaaagagccctgttcctccagccccacggcttctgttcacctgccgtgctgtccccgcctctgcccacccactcatcctgcagatctggagcagcattccagggcctggtaagtgtgcgccattttgggttactacgggtctcgccaggcgcggtggcgagttttgccccccacgctccccagcgcctgcacctgggcggagaggtagataaggctgggagatcttagccttttgcaaggcaaacaccaggcaggaacgcccagaacctcggaggaggaggaggggaagatccccaggtggagaccaaggtgcccctcacgctgagtcgtctaggagaccctccctagtttaaaaagtgtttatttgctcggagaacatttcaggaggccttcctgggaccccaagtgtgccgccccccgggaggggcctggagacgcccgcgcggcccccctgcaaagttttaccggccctgggcgcccccggccctggcacccacgcggggagccgcagtgggccgggccgcgcggccgccgcctcccaccgctcccgcgcccgctcccgcccccggcgcgtctcctccgggcccgcgccgcggcgggctcagtcctcagcggggcgcgtggcgagcggactcgactcggcaccgctgtgcaccatggcccgggccctgtgccgcctcccgcggcgcggcctctggctgctcctgggtgagtaggtccaggggtcccggccgagctcccttcccctggccagccggtgtcctctaggggagaggaggggagcgggtgggagcgggtgggagcgggtgggggcgggcgccgcgggcgcacagatccgctgcccttgaacgcgggccgccccggttccaggcgggaggccccagggcacaggggaggcggagggcgcggaccggtgttgcgcttctcgccggggaagggacggctttggggacgtcggagagcgggcattctggaaagcgtggggtgagtcagccctgcacactggagaactagttttcagaaggaaaaacaggacgcggggttccccagccccgcacctcgtttctcaggctgtgcgccgcggtgactgccagcgcaggctcccttccctaggccgtcccgcgttgcaaaacctgcagacgggcaccttgcagaagacgcagtgttcgggaatcagaaccacagccggtttgtatggaaattagtcaacactgacaatctgtcgcctgcagcagttgcttgtttgcaaatcacgtcttttgcagaaatgaggccagcccttttcgggacacttccatcgctttttttcttttttcttttggtttgcttgttaacttggcacttttggctaatagaaatttaaagaaggacgggtcccttggtgaagtggtggaacacgtttggctttccacttggagggagaagtggagattagcggcagcctcatggccacaggaactggccacacactcggcaagaaacggtgctgttcacttcccttgtctgtaatgtgttcctaaaatgctaactcaagccccttctaaaccgctttggctattgcattattccgtgtatttagctaccttttaacggaaactgtgaataggttactggcgtgggagaacccagtgtccctgggaaggccggagcagttgtttctggtatgtgtggcctttccccggaaacagtgatgttggtcagaggcacctgccgcacaagacctctttggcgctggca

SEQ ID NO: 8366 - DNA, 6000 bp, Homo sapiens
ccatgtcccagctcatcacttcccctccatctctccccagtctctgggaattcttgctctttttctgttttctcccaagtgctttgattatcccagcatacctcttcatcccccagaggcctttggaaacctaagccaggaagttttcctgcctttctctgtgacttcaatctgaggaggaaggagagagaaaaggcaaaaaacaaacaaacaaacaaaaaaaacaggagaagaaaaaagaagagattgatggatcagaaagtattccaccgcacccacatatcatttaattctctcaaaaatcctgggaaatattactgtgcccattttatagatgaggaaactgaggctcacagaggttaagtgtcatacccaaagtaggcttgggtccaaagcccattctatctccaccataccacctccctcaacctggtatcccatgctgtcctcctgggccacgggcactggggcaggcaacccctcctccccaggtggtggcattgtcttctcttgtttccccacttaaacttcccagccttccatcccatcccctccagccagacaattggtggcggaggtggccatcagagacgacagaggcgtgggaagccctgctcttcacatgctttggatctgcctgcccacacagctaatgtatattccttctagccctggctctcctggggcggtgacccctccctcgtggctcagtaagtgtggccctattgacaaagctcccccatcccctatctcaatgaatgccgcttacccccaagtcaggcagtgagctgtgctgctctggaactaaaactgcccaggatgaccctagtcctgggctgtgtcccttccctgccagggctccctgggaaggccagagccaggacaggtatccgaagctaagctgggagcgctctcccctgcctcccattcctgcttggcttgggggactggggagtcccggagtggagtctgagatgctgcattcaaagcctggggaccgtgcaaggcagcctccacaagcactgaggaggccacagggactgtccagctcccccaagccacattccctccagcctggctagagccacgcacctcctgtgctatgatttccttcatatgttttcctttcaatcaatggacttttaaaaaacttagcctcatcctaaacaatagtagctataaaatcacagatgtgatatgctagttttataatgtttctaatacacattttctttaaaaaagtgcaactatgaaaaaatgttcaaccatgtaccagccaaaagcacaggccaccagtgagtggtgagctcatcgcacgctgggaaaccctgggtctgttctgtgccttctgtgcccagacgctggagccagggctgggagagaacaaggcagtgtcactcgtgttcaggaaacgatcaacactgtggggggctagcagccaggtctgctgccaccaaggccagcctggaggaggcagcctgtcccaggctggggagatgggaaggctgagtgggatcccagctccattatcaccagctctgtcacccacacttctcacttccccctcttggaacctcagcttcctcatctccgccgtggggcagtgaccctactcacccttgagctgctgtcaacctcagctccaggatgtctgatgtgcatccagcacaggcctggcatggcctgtccccaggcatccctgggggccctgcctgacgtgacccaagttaggaagcctctcagacgtgctggcaccgtccacatctgtctggccaaccagccaggcattgtccagcctcatggcctggagcctgcggctggtaccctggctgacctggccagtccagccagcactgaatctgtttttccacaagtgaggcaaaaggctcctgcctttttccatgctctggaaatgccccagctgcttccaatgcaagagaggctgacccgagctggcaggggagctgcaacttgaaacgaggcatcctgctgcaaccctgagacggccgcacagggaaagagggctctgggtcacccttggcctcctgagactccaggtgccaggctaggtcagcacggagacacagagtgggctgtccgtaaagggtcctcaggaccaagtccccatcccacaggcatctgggtaggcccagggttacccggcaggcctgctgagttcccgagaccctgctcaggcccagccagcagcgtccacagctggaatgtagacgggcagcctcgggatagtggcggagccgtccctggggagtgcacagcagagagaagctccggctcctcctcttgcaggtgaagcttctggaacatccaaggagttcctcatctcccatatgcctccaaggacacagacccctgccccttggcctcatagatgcttccactgtcctgtgaaagctccgcccacacactgccttctgtgtccctctacaattctacgacacccttgctcatggttgcagcctgcccttgtggctcctgggactgccccgcctccaaagcccccacaggcgtcctgatttcaggactgggttcctctctgggccctcccacttcccctctcctgctaggggctgggcctctcttcagggagaaacaggccacacctgccccgctctaggccagcatcccccctaacccaggccctggcccggcccaccctaccgttccctaccccttctgtccctctccagttcccagagcctggcttgaacaaggagggcacttggcagctggggccggtgtcacctggagactggtcaggtgggtggagggctgggtggagacagctttcatcccctccatgtcctggctgtgtggcctgggaagccacttctggctctgcttgattgctgcgtttataaagtgggggtagagccaggcacatcgggaactgggggcaccgccatgggattacaggagctcaagtgtgggacgcacagggctcctccccatcagcacagcaccagagctggcaggccctggatgcagaatgtagaagtcaactgggtgtcaaggtgaaagcccgtttatgagggatgcctggcgggactggtgtgggaggcagtggttccagctggcgtcccttcatttgttcatctgctgtgtttgctgagcacttgtgctatgcctggcccatcgtaggcacaggggcgtgctctcctgggctctctgcctggtggtgggggaggcatctgtacccaggtaccaaggtgaagacacagctggtagtgacccccactggtgggtctgtgactgcctgtctcactctctgtgaattgctcctgggagccaggggtagggctaagcctagaaatgaggaaccctcagctgtgaggagcagggagactcagagtggaaattctcaaagcaagccctggaaccacttcagcggcatttttggggaattcttaaaatgcagattcctgggtctggtctcacaaggaggatctggggcctagagatctgcatatctctgacaggcacccagctcattctgatgtaggctggagggtcacacttctgcaatgggacaggtcaccagggagatttcacttagaggggatgaaggggtcaaggacactatggatgctttgggtctggtcagattgatgcctaaaaacaggttcttgctccttaaaaaagctgagcatttgccatctgggtactcccgcaatgtctgcacaccgcatccatcgcccagtccccagagctaagaattgccattcaggggacccagcctagtccaacctcctgaatccagatgaaaaaggaacaggcctggggaggccagcgggaaaggggttgccagtcccagtgcctgctctgggcaggcttttcagttgggctttgagctcttcctctggatagcctcaggagggaggtgccggtcctcccacaagagataagcaagtgagcagggcagctggcaaggtgggggaggcctggaggccgggtcggccgacttgagtcctggctctttctttttgggctctgccctgcaccatgttccccaaacgggaggagcgctgactgcggctcgcctcatgggtgtccctcagctcatttctagccccttccaagcctgaccccagcgatgacctctcagagggcacgggttccagaagtctgttgcaggaagcagtttccctgtgtggctgcccttggatcaactttgggagaattggtgagttgttatgtgaaatgatgtcttaaaagacagtacagtcacagctcacacacaaatataaaatgaatacctgccgaacagcttgtttaatttgtgagggactcagtaagatcttatcactggttcatagcattcaaagtaactgatatggtttggctatgtccccactcaaatctcatcttgaattgtagctctcagaattcccatgtgtcatgggagggacctggtggaaggtaatagaattgtgggggcaggtttctcccatgctgttctcgtgatagtgaataagtctcatgagatctggtggtttcataaacgggagtttccctgcatgtgtcctcctgcccaccgccatgtaagaagtccctttgctctttcttcgtcttccaccatgattgtgagacctctcagctatgtgaaactgtgagtccgttaaacctctttccttcataattacccagtctcaggtatgtctttatcagcagcatgaaaacagactaatacagtaccatacctataaggcagaatgataacatgaatttacaaatagatgcaaagctgactgaatacacagggagggaagtgaaattaattgtatttcaactggacaataattattgtgcctatggacgagaatcatttgcattgctaccaatcatctagaacttacagagttgcagtgtagctcgaagacaataaaagacctgacaccccattgaatcagataatccagaaggctgtgcttagacaatgcctagttttgcattgaaaacacctagtaattttttttattcatcttaaaatctttcagttttcagaagtgggccacgcatctggctctgagcttcctagcagccaaatcaaagaggaaaccagcttcaaatgtagtgtctatgtatactagtcgttcacaataagttcagcttctcactgcattgagacctggttctccttccagaggggcctcatcaagggaactcaagtgatgtagaaagcaacatcctcaataatattcttgcagcaaatacagtggtgacacttgtggagctgtgtccataggccagggcagtggctctgagtgtggtcccaggacaaacagcatcagcatcacttgggaacttgttagaaatgcagatactcaggccccaccccagacttactgagcaatctgtgttttaataatccctctgggtgactctgatgcaagctgaagtttgagaatcatgggacaagagttctcaaccctgcagtcaaacgttagaattacctgtaaggctttcaaaggacatgatgcctgggcccacccaaaccaattcatgcaggatccctgtgtgccacgccggctaggtctatttctaaagctccccaggtagtcgtaccatgaagctagaagggagacccattgctgcttagttgtttaatgcaaactgattggccaacagatgtgccatctgctccagagaaatccagacctttacttgcaaagcttataggagagggcgccttccttctttccttcttcccttcctccctccctttcttacttccttctatcttcaacactgagcactaccgtgtacatggcagagtccaagggtgcattagacaggataggttcctgatcctgaggagtcagcacctaatgagagctttgaaagtagtctagtgggaattccaggcaggcaagggtgtcggtgatgtggacaggatggtagggcagccctcggtccatcccccatccttgtctgatgctgcttttcttggcaggttgtgaggggatgtgggacaacataagc

SEQ ID NO: 8367 - DNA, 6000 bp, Homo sapiens
gtgtggtgtgacaagcctgtagtcctagctgctcaggaggccgagatgggaggatcacttgagtccaggagctataatcacaccactgtattccagcctgggcaacagagtgagaccctatctctaaaaaaaaaaaagaaaagaaaaaaatatcaaggaagtagttgtttaataggtataaagttttagattttcaaggtaaaaacattctaggggtctgtttcatgacaatataaaagtgaattactgaactgtacacttaaaaatggttaaggtccaggccaggcttggtggctctcgcctgtaatcccagcacttcgggaggccaaggtgggcagatcacgaggtcaagagatcgagaccatcctggccaacatggtgaaaccccgtctctactaaaaatacaaaaattagctgggtgaggtcgcgcgcgcctgtagtcctagctactcaggaggctgaggcaggagaatcacttgaacccaggaggtggagattgcagtgagccgagattgtgccactgcactccagcctgggcgacagagcgagactccatccccacccccgtaaaaaaaatggttaaggtccagacacatgccttacaactgtaaccccagcactttgggagtctgatgtgacaggatcacttaagcccaggaggtcaaggctgcagtgagccatgatcatgccactgcactccagcctgggtgacaggctgagatcctgtctaaaataataataataagaagtaaataaaaataaaagtggtcaagataagtcaggcacagtggtgtgtatctgtattcccagttacccagaaggctaaggcaagaggatcacataagcccagaagtttgagactataatgtactatgatagcacctgtgaataaccactgcacttcagtctaggcaaaatagcaagacctcctctcttttaaaaaatggttaagacagtaagatttatgtgttttttaccacagtttttttttagaaagaaaagtttctaaaaattcagtacagaggctccaacagaacagaagaaacccaatgaaccgggacatacattgataagtttgtgaaggggatcagaatatgccacccccaaatataccactttggtataaggaatattttgagctgaaggcaattaagaaatagtggacacaggaagaacttttgctgtcttcctttctgcctaaaaccagtgcataagtttccctttgtacaggtaacacaggtttccatttataaagatatgtttctctctagtaccaggagaggagaacaaatttaaccaccagactatcttatcactggagatgacactgaattgagtctgcataacaaacttgggagcttatttggaggttctaaaaggggagcacagctactcttatacccttgaccaagaccagtccttctttattggggatggtcatcctcttccaccaagtgtgcacttcgagagggatgcacatggagtggtgagggaggaaggggacacccgcctagacatccagatcagctgaatcaaccctggcaatcaatggggtgagagatgtcacaaccagaccgccctcacatcctgcataacaaactttacttaacaagccttgtctactatacatttcctagtcaccttcccacaatttactgcccctagaagcccaaaccacctcactttcctttgtctagtcacttctctacaatttatcaccctttgttaaaatggtatacaagctctgaactgcttctttgggtttttaattcttttctgtgaagcctctgtgtgctcgtgaaataaatcttttttctcctgttaatctgtcttttgtcagttcagtttgcaagccccagcttccaaatttaagagggtacacaggaactttttcctcccctacattactttgatgtctctgtgtaccattgcagtggtgtatctatgctggcatctatagtagatcaatttttagtactctctttttcaatatgaccagaataatttcagtaatatcatgaaatgaaacaaaaactgcagatggtgaggtgttttttgtttgtttgtttgttttagagtctccttctattgcccagactggagtacagtggcatgattgtggttcactgcagcctcaatgtcctgggctccgtctcacatctcagcctcccaagtagcttggactacatgcatgtgctgccacacctggctaatttttacagacagggtctcactatgttaccctggctggtcttggactcctgcactcaagcaatcctcctgtctcagcctcccaaagtgctgggatttcaagtgtgagtcaccacactgaggcatgagctaccacagaatttttttttaattgaacctcataatatataattgtgccaggaaactaaattaaaaataaatgagtaatatatatccacagtacaaaaaaagaaaaaatggacaatgatttcctcacagtttttatatctaacaaatttgaccatagagctcttggttacagtatgacataataatattttatgcaaataattgtccagcaattaataactaaattttaataaaactgaaatgtctgcagaaggtacaattcaggcaactagtaaatcacgtcattgccataatgcctttacttcttgattcagtttgtagttttaaaacagagcattaaaaaaactttaaaaaatttttttccttcctcttttttttttttttttttgagacaaggtcttgctctgtcacccaggctccggagtgcagtggcataatcacacctcactgcagtctcaaagtcccggggtcaagtgatcctcccacctcagcttcccaagtagctgggactacaggtacaagccaccatgcccagcaatttttttttttttttttgtagagacagtctcactatgttgtccagtctggtcttgaactattgggctcaagtgatcctcctgcctcagctcccaaagtgatcatttttttaaaataacttttaggccaggcatcatggctcatgcctgtaatcctagcactttgagaggccgaggcaggtgaatcatctgagatcaggagttcaagaccagcctggccaacatggcaagaccctgtctctactaaaaatacaaaaattagctgggcgtggtgatgcatccctgtaatcccagctaccggggaggctgaggcaggagaatcacttgaacccgggaggcggaagttgcagtgagccgagagcatgccactgcactccagtctgggtgacagagtgagactccgtctcaaaaaaaaaaaaaattaatgtaaaaaatatccaaattcagccaaaaatttcatctatggactaaaatttacaattgccaaaggaaaaaaaaatagtacaccttgaagcactttttgtttcactgtttaaaattttaaaaaactaaaaattccaagagagaatatggaataaagaagttgaaatgacaagttctgcttctttattttgccatggttgtgctatcattatgtattttaaatctgttgtttgaatgcaggcacatgtagatcacaatgggaaaatgcaagctgtgccagtgttttggagccattatcaacttaatctcaagagaaagcatatctgaatcaacacatggcatcggggcatctttataattgggagttttttcagttatcttcaatgtaaaatacattgtctattaaagagaagtaacaaaaattaaaataagaatacttagcttttatgtaaaatacattgtctatttaaaagtagattatacatattcataaaactacagctcattataatcacagtaattgttcacaactgaaaccaaaaccaacaagaggtctcttgaggggaggagtatttcatcattgacttgagaattgctggcacatggtgccaacaaaaagcagaagggctttagttggttttattatcgtttttaaattccctacagacagtagtccctttattgcctatacctaggtggactgctccctactacacggcctttcgtcatacttccattccatagttaagctcagcaaggttggttttgttaattccataatgctttataatgcattcaggttttactagggaaacactggggattcattttcttttaatgaacaaatctaaagctccttatgcagtaaaaataagcacccagtgacttattctgcatattcaattttcctaaatggaagaaactcaataggaaaagaattagaaaaagatacaaaaattgaaagtgtaaattgctggaggatccagacagtgtccatgagtgaggaggacagaggagaaaggtgtggagctgggatgcaatgccctgccaaaagcgggcaggtggtgctgggagtaagccactacgcagacacctcgaacagtatccctgttgggacatgggcccagtgtacccagatctgctaattttttcatgaggagccgataatctagatggctaagatttctgacttctaaatgttggaaattaattcaaactctagaaaacactgcttcacaaacaaaacacattcacagctgcagtgagcccccaggctaccaatttcctaatgaaaaatgcaaaagtagcagctgaacaagtttaaagaggttgagaaaatatgctgtcttatctgatccttttcctttcctaaaatgtggcattttggaaaaatccagatacacttacatcatagccacaattatctgcagtttaatgagaaaagtagcataattagagtaggtaattgggagtgacctgaatgtccacagcagccctttctcttaaatcagggccaacaatggtgtcacccagatgctgttgactaactgatgtacaacagatttacttaaccactggcaaaccacatttccttttccagggcaataacttaaaatattatgtatttccctttgttgcaaagagaggaaatacttcttcctagactcagggcagctgtgacccgtcctcccagagaaatcattaaaccacaaggattcagacagagcccagagccctgaaaactttggccacgcactttcccgcagcagccacaggcaccggcaacttcagagaggtgagtgcttgctttgccccccaaagcttcacaccccgcgcatgccttgtgtctgagccagtatattgtagttaagaaaaccaacctaaaaatgctttgtatctggatctcttttgaattcgtatttggcatattaaaagtgaaggtttattcaaattagagataaaacagaagctgttccccacatttctacaggtaattagaacttcggaaatcttagtggaaaagatggagaactaagtcctccgcagactttcccactaagtatcctcaagaatcactttctgcatcgggcaaaacagaattagaagcaagaatctagacaaggcttcgtcctcatttagaagcctttaagaattctctgctttaagtggatgaaaacgtccctgtatggctgggttgccatggttcctcgctgtgacccccagggctactgagcctgccatgtgagtccatttcagtctctggaaaaagctttgtgtgtctccagcctcacagtttaaccaagtaagggcctcctaagtctaatctccaatgtgactaccctgaagagccagccctaagaaaggcatttacacaagatagtcatcaccctgtatgacaggaggaaaaaaattgaagtgtctttgtttttcataaatcagcttctttgtaagaaagtgtccttttgtatatctctcttccaatgcttttgttccggatagattttttttttcaaacaacaacaaaaagattagaatgatcactgacaaaaattaatatgacttgatgatataatattctcccaaatgtctatttctaaaatttctatcatcagagtttttagatgtttgggagaaatgtgctatttaacgtcatgcaagaaagagaaagaataatgctaaccttaatgatatcaaaagatga

SEQ ID NO: 8368 - DNA, 6000 bp, Homo sapiens
gtgaaaccccgtctttactaaaaacacaaaaattagccaggcgtggtgacaggcatctgtaatcccaagtacttgggaggctgagacaggacaatcacttgaacccgggaggtggaggttgcagggagccaagatcgcaccattgcacttcagcctgggtgacaagagtgaaactccatctcaaaaaaaaaaaaaaaaaagaaagaaaaaccatatatacaaaaggccctaagagttaactgatagcaattttactttgtcccattgtttaaaatttttaaatgaaatcacaaaagcttaaaataaaggcatccaataggtggaaaaattggatgaaatccaaaacctcttaatgaccttccatttccccttagccatgctttttttctggtttaaatatactgagacctaggaaggtttatttgcttcagcagaactaataatttccttctcatttttagcccagccttcaagtgagccaagggaagttacatagtttggtcaagcccagtgtagactacgtctgccagctgaaattcccttctggcaattaccctccatgtataggtgataatcgagatctgcttgtccattggtgccatggcgcccctggggtaatctacatgctcatccaggcctataaggtactgtgtgtatttttgaaataaatttttttaaataaccaaaaatttataatttaaaattagttttatcctaatccataaaggaacaataaataaatctcttgtgggacctaagatcactttactaaatgaattataattcattctcaccatctatctgtaccatagcagccattgtttcatatcctacttttaacaacacttaggttgcaatgagatattgtttatgatccagcatattatctagcaattccactcctaggtgtgtactcgaaagaaccaaaaccaagcattcataacggcattatttataattgccacaggtgaaaataatccaagtattcatcaacagatgaattgataaaatgtcatatatacaatggaacatatcacaatgcaatggattattattctgctattaaaagaatgactttctgatacatattacaacatggatgaaccttgaaaacatgctaagtgaaataaatagatataaaaggacaaatattgtatgattccattgtagtgcataaataacactaatagaaagcatgccttcacagaactgcaatcaacgcagatttttagttgagaaaaaaaaagatatctatgaccattggtgccaaatcaacaaattacaactctgcagactatcgctgggcgctggcatctcataaataagcttttagtgtatcatattctacatttcagagaattagatatgttaataatagaaaaactttttaaactgccttatcctacttttaagaacacttaggttgcaatgagatattaaaaatatctactcagaatatttcctaagtctttgatgaagatataggaggcagtaaaagattgtaaaggtctatctctatttttctgactgcatatttaataaagaacagttgttcttctccagtgtgtaaagaaacttcctaatagtgaagagggcatcagagttacaaagaagatagcatgtgttctttggaaagtcactcatgataagagcaagttgcaagttaaataatgctgcttcctcagtaacacccacataaacatacacacatgtgcagaaaacttagactgtacatgccaaagtcatgcacagttttttttaaagccaaactagtcgattttagtaattgtcactagcaacataacacatccctctgtcactaaatcctttaccctttcttgccaagccatctccctctttccttcttatctatcaggaaggaatatcaatggaactttcttttatatcccgtataataaaatgtgtcctttgcctctgcaggtattcagagaggaaaagtatctctgtgatgcctatcagtgtgctgatgtgatctggcaatatgggttgctgaagaagggatatgggctgtgccacggttctgcagggaatgcctatgccttcctgacactctacaacctcacacaggacatgaagtacctgtatagggcctgtaaggtaggagtcagaaccaccaaatagaaagcagctcggtggctcacacctgtaaatctcagcactttgggaggctgaggcaggcggatcacctgaggtcaggagttcgagaccagcctggctaacatggtctactaaaatgacaaaaaattagccaggtgtggtggcaggcgcctataatcccagctactttggaggctgaggcacaagaatcacttgaacccgggaggcagaggttgcagtgagccaagatcacaccattgtactccagcctgggtgacaagagtgaaactccatctcaaaaaaaaaaaaaaaaaaaaaaaaagcaggtctcccaggaggttgtagaaagagttctagttcatctgatttaattcatttatccctaaaaccataggtcttggataacaaatacagttatttaaggaaaaccttgaaaagcctttcaattaaattagcattcctttaaagggacataattctactcaacagcattaatgggagaaaaaaataaagatgtagggtgattttgtgcctttcttcttgaataaccttgtagatacgtgactcagacagctcattaaattcctcccatgctgtgtactctttcaaaccatccttttctctgcattaatctcctttctctgatgtgaaggtagtgtttgatttttcagagtaatttgtatagacaacctcttaacttttggggttgtctctggaagaaatcactatactaatttaacttggtctcattttcagtttgctgaatggtgcttagagtatggagaacatggatgcagaacaccagacacccctttctctctctttgaaggtattttgtacactttatttatttgccctataatatcagcatctacttctctgcttggtaattaatgtatttaagttttagcaaaaaattttataattattcttaaactacttttttatttcctaatatgctaaatcgatattaaaaatcaattagcacatgtaataccacagtcccaatactggtagtcatcaggtgactcccttttatggagccaggcacatgttgggcattttgcagacgccctcataaatcattcagcaaaaacatacaggcactactaccttcatgtcatagccgaggagactgaggctcaggagcttatgtttggtaaatggcagggctgtgacttgaacttgtctggctccattctttctccagtcttccaccgggatataaggctgaacacctcactagtgatctcttctaatgttgaactgcagtgtatgtaaacgtagatagattcacacttcatttaaatcattgccgttaatattgtaatgttgttaatgttaaaaaatggagccatccttcgtttttgcagagttgtaactgctctcggggggtgtcagtgaggtgaggaaaaagccataggatgccgaaggaggagggccaagaggacacccccaccctccagtgcggccttgatccagaccttagggacgaggccatcactggtgggcaccctttgttgatgtttgtgtgtttgaatagactgaaatgctgtgactttttttgtcaataaagatatgggggaaaaagaaccatcctatgaaatggagtcatttggtataataacttttgcctctttctctttcttcaggaatggctggaacaatatatttcctggctgacctgctagtccccacaaaagccaggttccctgcatttgaactctgaaaggatagcatgccacctgcaactcactgcatgaccctttctgtatattcaaacccaagctaagtgcttccgttgctttccaaggaaacaaagagtcaaactgtggacttgattttgttagcttttttcagaatttatctttcattcagttcccttccattatcatttacttttacttagaagtatccaaggaagtcttttaactttaatttccatttcttcctaaagggagagtgagtgatatgtacagtgttttgagattgtatacatatattccagaacttggaggaaatcttatttaagtttatgaatataaccatctgttactgttctaaaaatgtttaaaagaaactcaatacagataaagataaatatgtgactattattgggtattacacttcacttctctttaatatttttcctccaactggagggcagacaattttctgacttgcttttctctaggtggttcattttgaaaggggacagaaatataactaaatgcttccaggagaaaaattccaagagttacaatctggacttggtacctaaatatcattttttaaattcttgatgcctatttggactagaggtaaacatactttcagattggcctgtttttgtcggtaaggcatacagccttcagaagccaacatttttaatcaaaaacttataaaacatgatgatcattgtgaaaattctgagttgaaggttagtttaagataagctaacaataacagtctgtgttttctctaaaataatctgagttttttggaactctttatttaaatatgtgtgtttttcagtattcaaataagatcaggaagccaattttctatgtatgaatatgctttaacctaggatttcagtccactctgactgactttctaaactttaacttgggtttttacagtgactatgcattagtgctgactctttggtataagccataaaatattttccttcctatcaatttatctgaactttggtcttttcactaaattgtacagtattctacttctgtttaaaaaggggagatgagaaagggaatactatctaaccaataacttgaacaaaaacactaaactaagcatttaatagaaatgctttttattgaggaggtattatccagagttcatgcttagaacaaatgcatctttgcgtatcctagacttaacaattcatcagtttctgagaccacagaatcaggttttccgtagtagataaagactctctggtgcttcaaattctgttcaagtgttttgactcatcagcttctactctttctattactgcctttgcctggcttgttttgtctctttgcaactgattttgcaaaaaaaaattgtagctttaaaataacagggtctaagtattttaaatgtgcctatttcacagctctcttggtcacaaaaacatgctatttttattggaacttcaaaccaaatccccactgagtgtgtactggttcctgcaggtagcagtctcctattatctcctgtttagcaccaaaagagctaatattattggaaactgaccttttaaaggccactggcagtaggatttaaaaagcagcccactgctcagtttccaggatcagcttcctccttctgtcacttgtgtaagttggcactaccttgtgcctctcagattgctgaagtgctgctggtaagcatgtgcatgctctgcctttcttgtgaaagttttcaatcagcgatatcagcacttacagtaagaagtaaaagtagtgcacagcaaagctaatttgcctttgcctggggtgttcagcttgaaagaataaagctcatttggtttagttaaatgtcttactctactgtgcctatgcttttagctgcgttactaagcaagggaaaaataacagtttctctgagccagagaagacttgatcacagttctccaagcatcgtgatagcaatgcttaaccccaggaagatttcaaggcagggagaagaacatttcaaataagattcttgttaacccatttatgcctagtgttccattattggaatgctaagcttgtgggagtcatttacatcctactgctcaaagtcattgccaaggtctgatttttcacacaaaaaattgcaacccccagcataaatgggttagctactgtcatcagttagcaaatt

SEQ ID NO: 8369 - DNA, 6000 bp, Homo sapiens
acccagcaccttcaaggccgccttctctggccacagggagcagcccggaactggggcagggagcactgttggaagtgggtcaggcttcccaaagggaaggatgcctccagcagggctgtgtgaactggcgactccatggcccttggagtagaaactcactgcatgcacctgggccttgtcagtctggttgttttctgtcaagctcttgaggtggacatttccctccaagggcctgggattgtaccaggaggaagtgaggtttccctgagtctccaggggcctagaggtggaggctgcttccccattgctacaggggccccttttattgtcctcctgctcctgggtctgtacctggtctttcacctccgttgcttctttgggctcttctgccctcacctccattttcgggagcctggctgggatcacctgctcatctaatgaaggaagttgaaggttaaacttgcctctgagacgagggatcctcacggggctgaggtatccaaacatcctggagttgcgagcagacagcacgggtttcttccttgagggggggctccagacaacaggaggcaggaccctctgtggggtgcccgtgttccaagggataagacacagcctcataagggtgccgtcccacctgcctggaaaagaaggcccaagatgtcgctgacggttgaagaggagtgggaaacagccaaagagtcctggggcaggcacaggtgcaggagccgcggggtgagcccggccagctgggaaggcctcacggacaagacgagcaggttgccgatggcatggccaggacctgcggcggaaccaggaacaaaatacgcttagtgagttgtccattttgagcgagttgtgcacagacgaaactaagggtcagaagcggagaggatactcctaagtcacccacttctctgtggctgggtgcacactgggcatctgggagtttatgacatcaccatggggctggtgacagagccagggtgtggaggagtgcttaggagcccagcgagggtgcctgcaagaggagtcagagggcaaagggtgagacccttccaccggtccagctggactctagcctcagggacgtcctgctcctgggggcaggtgtgtggccctggatgggccccccgtggggctgttgggggtgtggggctgatccgccagagcccttctgcctggcgcctggcccaggtgctggctggcacccagtggccctgtcttggccggccccgtcccccgggttacagggccagaacctggaagcagagcgcaggaccagccagatcccgccaggctcccccggggcctctccagtgcctctgtgccgcctggagccaggcccgccttctccatggctgctgtggcctcaagggccaccagcctcgctccgcaggtttccaaagagaggacgcggtgccctgacctgactggatgcacctcttaccacatgcctccctggcaggcagggtctccactttttacaaatttgcctgagaccattcctcaggtcattcaggtggtcatggcccagccaggctttgaacccgggctgtgcgattccacagctggcgctctggcctgtgtgcctcatgatcatggatacagcatctattcttattttttcctgtagtcctggggtacttagcaccatggcatatctgtaataagcacatgcacacctcgaaggaggtcttcacttcaacatacaagttgaccatggcatgctctgggctccagtcctctacaaagatgtagggcaggaactaccagttgtcagcacagcaccatcccacattgctcttctaatggagcctttcaccccagatgttctttctcgtctgatgggaaggatccaagtatgtaaagattatgttctagatcagctttggtctgtcctaaaagaaatttgccagtggattattccatatggataaaagtcagtttctctggtcttcctggaatgtgtctagaaagcaaatacattatttacaagttcatagtagatcaatgtattggattaaaatatgataaacataatttggttgttgtgagcatgccagcttggtcaactattcaccacacacatgatgccctaaatataactctaggttttcttatgcccaagagagggacatactcttgggtgtctggactagggaaacatgtatgaaaaaccatttggccactctacatcttgttattggagaattgaaaccatctatattcaaagatattattaaaaggcaagaagttaaaaaaaaattttcagactggaaaaaaaagggaggaccacttgactctggtcataatttggcacctccattctgaaaacctgacttctcttattccattggttgttctcagattgcatttaaccaccattttcttgctaagtgtgatgagaaaaacaaattgatgggataattcttaagagcctattgtaggatcacttctgggctgacagtatttctagaccttctttcctctttcaatttttgctaactcactaggatggtttggctgaaatacgcattctgtaacactgggtacttaaagaaaatgaggactatttattggaagtacttaaaaagagagagaaagatagagatggccccaggacagaaagttcaggcatgcttcctctctagcgagaggtagcttatgatgacagttttcatgatccttgtagtcccatggctgagctctgtggatccctgtcttagtctcaggtaaaaccaaaggaagaggattggtcatggaagactgtgcaccgaaatgattgaaatgccaacatctaccttagaggttagtcttcgaatatattctcctcactcctaccctctctcccagagagaggaaccagcttctcactggagcctgtcttccagctacagaagtggggcctggtcgctatacactcagttcctttgctttacttatggaggcaagcttaataaatgaaaacaaaatgttttctggctcacatatattttccataaaacttattaaaacaaaatttgttttgtataaactttgagcccttatgtactctattctctgaactctgaacatgtcaattgacgttgccttttttcaagagaaattattgtgttcagaagaaaatctgtagtatacgtgttttcctctgtttatcccaacccataaggtttgataatcacaagaaaaactttgagaaacatcttaattgatagattatagagaggagcagatccaagatattcaagctatttgtgaggttttgatgacatcaagggagtattacaaccaggtccgaggaatgcccaagttctatttggccagttgcttttccttcccttccttgtgaggaagatttacctcttctagcacaggaaaaataaggcttaaattttcatgatcctttatgcagggctctctggtaaagctgagccagagaatatgacttagactgaaaatcccagcagagcctttccaaaccccaccctccatccctgcccagtttgagtctgaacactgaacctttagaacagctagtcctaaagggatagctgtagtgcagagcaggtgagagagaaaacaagaggctaggttcacctatctattctaatggcaggaggttgccagctacaaaaaactaacaacagtttggccaggcctacatttggatcaatctacttggaaagaattacattctcttagggaaaagtaggagaatcagtggagagaagggacaaaaatcacttatgcccaactagaccttgtttctgagattctgattcatttggtgtgtggagcctgtgcatcagtggtatcttaaactctcccaattttagtgtcccttcaaaattaagagctactgttgtatcatcattgaacacctcagaggaaactgaggcccaaggtcacattgttaggaaacttggcttcaaatgtaggtattttcattttgggtataatgaatttttctaccatacgtattagactatgtaaagagttttgtgactgtagtaacttctcttcataagacagttgtcagaaatagtctatatttttcatcagttcttgtatgtctttctacaactccttcccagttatgtgactttctaatttagatgtgaaaatgagggtacttgaattgattaactttagtgaaaaggatggttgccatggtttgagtgtttttatctcctctaaagatttatgttgaaacttaatcctcagagcaacagtattgggaggtgggcctaatgggaggctgtttaggttatgagggctctgtgctcatgaatggataatgctgctataaaaagggattgtgaagctggatgcagtgacatgcacctgtagtcccagctacttgggaggctgaagcaggaggactgcttaagcccaggagtttaaggccagcctgggtgacgtaaggagacctcatctctaaaaaaaaggtcgggggcttggcttgtagaagtgggtttacactctttcactcttctgccatataagggcacagcattcatcctttcatgcccttccaccttccctcatgtaagaatgcagtaaggagcctcacaccagatgctggtgccttgatcttggacttcccagaccccacaactgtgagataataaatttctgttctttataaattttcaagtttgtgatattctgttatcacagctacaaaacagactatgtatttcctttataatctatattatattataatctaatgagaactcttgtaaatgacagaaggaagcctaactgaaacaacataagcgaaaatagtatggtaaagtgttttaactgtctattgctgtgaaacaagctactccaactcttagtggcttaacacaacatgatcatgtcagtgattatgattatattctgccttataattgtgtgggttggctggggtcagctgggcaattcttttatgacatgtttttggtgtcagctgggcttcattcagctgagaactcagctgaagatgaagcatctgtgatagctttactcgtgtgaatggtgcctcagcaaaggttgatggaatggctgggggctggctgggcccacctccctccctgtaccatgaagtagcctagactgagcatcttcacctgacatctgggccccaagagagtgatgtcaaagctgttagatcttttaaggcctagaactggaattgtaatttttgctgaattcttttggtcagagcaagttaccaggtctcatagggtgaagacagcagtgtgaccagttcatagagaagggcccttgaaatgttttcagtcacagaggtaatcctggcagctcactagaggagagattggaaaagaacaagataaaagacttggaggtaagggaagagattgtggcattaacaaagtgaagaaatagagaatctaaactagggcagtgactttaaggatggtaagaagtattggattataaaagtattcaggaataaaattgtaggacttcttgcttggatctggggagagagggcaagaaggagtaaaaagcttctaaatttctggctagcatgaatagatgaaatatgttggcagaaactatggcagagaactcagaggcagaatgtcagttttgacatttagagtttgaggagcatagaacattgagaaagaaatgtctggctatatgagtttgaagctcaggagtgaagttggggctagaggttaggagttttagtctttagcgttagtcagtgttaatgggattgagacaggacttttaaggtaatttgtcaccacagacattcttgccaggagcagtttggaaacagcaataaattacttgatttaaattgttctaggtggaagttctttatcttgtcccttctagtacataacactcagatggttgaggggcaggggaatggcttgtttgagaagttaaccggctattttaatagccttaataatacattcccaccacctccaaacacccaggtcaccctctaccagctccatgctc

SEQ ID NO: 8370 - DNA, 6000 bp, Homo sapiens
aaactattcacgagataatttacattctttttttcatacaaattcttagaaatctggtctgcattttatatttcagggacatttcagtttggactagccatatttcaagtgtttattagtcacacgtggctaatggctgccatgttagatagctcaggtcagtttctttgttaaggcaggtctacagcagtcttaggtctgtggctagtttagtgctaccaagatctggcccttccagggttggttcagtgaggtctcttcactattgttggttgaaactttaatgtttcacagctctgtgtgactttgggaattgtttgtcttacagcccctgaattaccccctagccctgcaagttgctctttcttcagcatattttgcctagctcttggagtttcatctgcacatgcccatttagtatttggcaaaaggctcaagaagacttctgcatagctctctggaactctttctctgtgtagtttcctccttttcagtactcttcttcgtagagtccagtagcctcctcctgaattccagtctctgactccccaactcagtgagatgactgtgctctccttggggttccttctctgccccatggtctgcaaagtgcctccacacagcaggcctgggtgatcccagggcttaccttattagcttatcttccctgagagatcacaatccatgctgtggtgtgggtctggggttgtgcacaggctgccagcctaatactcattattcttaaggccagaagcagaggtcctacttaaaaaaaaagtcttagctggctgcagtggtaaatgtctgtagtcccagctactcaggaggctgaggcagaaggatcacaagttcagcccaacctggacaaaatagcaagacccaccatctacaaaagaacacaaaacaaataaggttttgagcttacttattagttttactatctagttatttcgtaattactttgatctttattaatcgcttcttacagtcttctttaatattattctttttataacttgatgtatttttattctttcttattagaaataattagggctatgagtttttctttcagggattcctttagctatttccacaggttctgacatgcaatatttttgtggtcattattctctagataatctgcaatttgggttttgcttttctctttgacaaagaattgttccagagacttaaaaaaagtgtattttgagatggtagagttttatgtttcagttttctggttttgttattaattttagttatattgtattacaaataaagttatctacactatttataatttttgaagatgttttaagttttcgttgtagcttaataatcatgacaaacctttgtaaacaagatgttattcactttttactgtaaattgtttatcgactttaaatgagtctgttatcaatgttagtatataaaataaatttaaatttacaaaaatataatgcgtgtgtgtgtgtgtgtgtgtgtgtgtttactctgggtgccagtgtaagattatatttcaaaaatgagattttttttctaaaaaaatgtgaaaaccactaggcaatgtgacttcaaaagtcatctagaatgtgtagaatgggaatataaatttgtgcaggctctagagtagagtgagccttgagttgtgttgagatcaaaggatacccagagtatttttttctttcatttttcattcattttctttctttcctctacacaatatgctaataaaacatctagattacacagaccgaggccaggtgctataccagtctgttatcaacaagtgagagcacatgaaaccgtttttaattggccttaggaaaagcagaggtgaaatgaaaatttaattctcctggaccttttttcaaaatgtatttttccatctctactgtaaagagtgcattttaattaggttgattctcactgtttggccatgcatttgtaatctgtgttcactctttgggaaagaagaatttgatgaaaggaacctgataataatggaaatcttgtctgagcagaacaaattggaattatccaatatgatagggatgtgagaagcattgaggctggtgactgaaaaaaaaaaaacacctctccccaaaacaccactgttctgcctagcacagtcttgtcctggcacagggagacagtgcaatagcatggaatgtgcttttggtgcgtctgggcctttctggtgcatcacaatcccccatcctcaatttccccgcctgtaaaatgggggtaataatctccactttgcactattgtgaggattgagagaaatgaattatgtgaaagtgcctgacatgttataggggctcagataatgagtaagaggagaatttccaaggaaagctctatggctgggctgagggtgaggttcctagtttgtttacagctttgaaaagaaagaagtgagcaggggcaggcatttacgtgtaagtgagagtgtgtgtgtgtgtgtgtgtgtgtatgtgtgttcagggcaggggaatctgtgggtacatcctagtacagtccagtgtttctgtgtgtgccattcaggatgaatttcctgtgggatagcaaacaaccaggctctgccgtagagaagtcgattcagagtcctcatctgcaagtagaaaagccccaggagtccatgcttacccccattacgctactcctgtgagtgttgtgggacagatgaaaggtcagctaggtccttcagctgaatgcagtgcactaatgaggaaacgagttaggagtttctccaccagtgccaacaagcaggtcaagtagcacacatcgggggtggagaggccgcccacaaaacacattatttagggtgctatgccaacctgtcagagagggaaaagatacacttcttggctttggagcttgtgatttaacagaacaaagaaagagaaaacatgaaaggcacatatgaagctaattttaaagatccagtggccatacagcattttttttttctcctagacagcattaaaatcaaataatccttgaggtcatcagacaatagctccagtgcactgtgcagaaagtacagtcctggccgggcgcagtggctcacacctgtaatcccagcactttgggaagccgaggtgggcagatcacctgaggtcaggagttcaagagcagcctggccaacatggtgaaaccctgtctctactaaaaatacaaaaaattagccgggtgtagtggcacgcacctgtaatcccagctacgcaggaggctgaggcaggagaatcacttgaacccgggaggcagaggttgccagtgagccgagatggcgccattgcactccagcctgggcaaaaagagcaaaactccgtcccctcccccccccaaaaaagtacagtcccatgtttctatgtgcaccattcaggatgaatttcctaagcacctactgcattcccagaattaggagtacaaactcaggggtcagactgatctggattaatttccaagtctgtcactaaccattttttaaaaatcatatatatttaaggtgtgcagcatgatgttttgatatacaaagtgaaatgattaccacagtcaagcaaagtaaggtgtctgtcatcttccacagtgactttttgtgtgtgttgcacctaaaatggactctctctgcaaattttcaatctacattgcaacattattaactgttgtcctgtggctgtatgataaatctgtagacttattcattttgtcctttgacctacatgtccccatttcctctccctcccaggccttggtaaccacctttctactctttgtttctatgtatttaactttattttatattccacatctgagtaagaccttgctctcactcactcttttatggccttggggaagcataggtcctccagacagcagaattgcttcatctttaaaatgattgcatcgatgtggcgattgggataattcagagatgttttcagcacagagggcttgtgctaggcccctagaatgtacagataaaggggatccatgttcttcctttgaggcagaggttctgactttgactttgccactccctggcaaggggcatttagcaatgtctggagacatttggctgtccctatggatgtgtgtatgcaggtgctaaacatcctagaacgcataaggcagccttcctcccccttcattgctcattccctctgattgtggaattaaaagacgaaaatgggtccattcgagggaaaaggtcatgatccttaatgctgtttttacatgacggccttgtcagagccttcagctcctcctgctgtcttcgacgttctaggcacagctccctccggagggcatgcttcccacctggggcttgctggcggagtgccatcctcatccatatacatgtccccaattaaaagacgtcccgctgccgggaaagcggctgcaccttggagcgaaactgaaagaagagaccccggggtcttcgcgtccctccgtgggaaggcgaggcagggccctgcgcagaacaccggcaggctctggggaaaggcagggattctatagtgaatcctgcaagcctgcttggggccgacttcctggagcagcggctgcaagcagcgcagagcccagctgtccttggcaaacaccccacagaggaggcgagggcttgctggctcctctgggacgccccggtcaagccaccaccaaacgggccgtgacctcgccttcgaagggggcccccagggcagcggtggacgtgggggcagtgcgggcgagaggaagtttgtctttctcccagctcgggagggtcgccagcttccccggggctgcacctccttgggacgcttgtcgggttggagcgccgcagctgcctctgcggctgccgcctgggtgacggagggtggggcgggggtgggtcgctcgtagctcgagagccacgatctgatttcagggaccgtgcctatgtgctgagtcaaaccccgccgctgggctgggtctgcagccgggccgctgagcacaatccgctgtggttaatgattaatcgctgaccaccccgcctcccgcagctcgggagagggtgctctgggaatgtggaccggggctctcaagtgccggcagctggaaaggaagaggagtgctgcgaggcggagtgcgccctcggcgaagaggggcagaggcggagcgccaggtgctgcggtctcactcccagccagccaggagtttagaacgttcttcctccgccctctccccgcctcgccccagccacatacactcccaaacctcaacacccaggcgcctcctgggcctctcctaggttgggctgctccagcaagtttccatgaaagcacctgaaatactaagttaccttcgcgaggagaactcgagtgagataaaatcgtgcgcccacgcaggtgagtttgcagccaagaattttggacgctgctgggaggagaaagggaagttgagaaagtctttggacctggtagcctggtgctctttctcatggcttcacccagcctcccgggcagtgactgctcccaaatcattgatcacagtcatgtccccgagtttgaggtggccacctggatcaaaatcacccttattctggtgtacctgatcatcttcgtgatgggccttctggggaacagcgccaccattcgggtcacccaggtgctgcagaagaaaggatacttgcagaaggaggtgacagaccacatggtgagtttggcttgctcggacatcttggtgttcctcatcggcatgcccatggagttctacagcatcatctggaatcccctgaccacgtccagctacaccctgtcctgcaagctgcacactttcctcttcgaggcctgcagctacgctacgctgctgcacgtgctgacactcagctttgagcgctacatcgccatctgtcaccccttcaggtacaaggctgtgtcgggaccttgccaggtgaagctgctgattggcttcgtctgggtcacctccgccctggtggcactgcccttgctgtttgccatgggtactgag

SEQ ID NO: 8371 - DNA, 6000 bp, Homo sapiens
atagtcagatgtttcattatatttgcctgttcatgcaactaagtgtagagtgtgaattagatgctcaatcaatgttttaattgtctaaactgaaaatgcaataaaccccattatctagcaatctgttaatcaggacttcattaatgggcacacttgtgcacatgcagtacatgataatcctaaaaagttacacaattctaaagtaccttctgaataaaaaagattgaattctgtttattgtctattcatttattcataatatacagagtatctcctatgtgttaggtatatgtatatgtatgtatgtggatatagtcagatgttcgtatgtttatacatatatacaaatatatatgcttctgctctcaggctaggggcttctattccgctcagaggagacagaaaataaaaatcatagaatctcagagcataatatatcattaaataactttaggtgcatgatttgaatgttgatgatctatacatggcatatatagcgctaatctgcttgcaaaatatttgataaccagaacgcctattccttgatatgtcagataataggtttagtaaaattaatccatccttgttctggtaaaatccatcttgtgctgatatctgttagtaaaatttaaacccaagctcatactgtcagctgaagcctaagtcagctagatcacccaaatatcaaaagggaagaactatacggggaacaattatgtattcaggattcaggccaactcctgaatcatcactgaacagtaagagtgcagaaagaaggcatcagatggtgggaatgtaaactagtgcaaccactatggaaaacagtgtggagattccttaatgaacaaaaatagaactaccatttgatccagcaatgccaactctgggtatctacccagatgaaaataagtcattatacaaaaaagatacttgcacatgcatgtttatagcagcacaattcatgattgcaaaaatatggaaccaactcaaatgcccatcattcaatgagtggataaagaaattgtgatatatatatatatatatatatcacaattatatatatatataatatacatattacaattatatatataatgtatattatatgaattatatatatatatatacacacacaccatggaatactactcagccataaaaaggaacaaaatcatggcattcacggcaatctgggtggaattggagaccattatcctaagtgaagtaactcaggaatagaaaaccaaacatcatatgttctcactcatacgtgcgagctaagctatgaggatgcaaaggcgtaagaatgacacaatggactttggggacttgggggaaaggggagagaggggtgaaggataaaagactaccattgggtacagagtacactactcaggtgatggatgcacgaaaatctcagaagtcaccactaaaaaacttattcatgtaaccaaatgccacccattccccaaaaacctattggaattttaaaaaagagaaaaaacactaaaatatatatcatgcaaatataaaaagaaagcagcagcaaggtcaactggataaggcctccaccatcagggagctaaggtgctcagagttcaatgttcggtgacaggttccaaatagtaaaaattagagaccctgaatcagagaccctgggtctaaatttgcatgttcatctcatttgagtgtttacttttgaggaatgtcctggtgggctcatttcatggcaggcgctcttatgttgggctttgtctccttgtaggtactcttactgtcacttacaggagctgcaggctagaacactcccatcaggattctgtgttgcttctaagggaaaattatggtccctaatcactaacaggtagcacagtcaaaaagtagtcctttaataggctgagcaaatactctatatcttacacttgggactgtaatggtagcacaaagctagggaattccttttcttttccaggtcaacagcaagttttctaggcttcctcaggtatgccctcagagaaccacacgtaaggttttgaaatcctatttaattctatccccaatacctcttgctttatattgtctattctgctgtaagtcatataggcaacactcagagtattttttaaaaatcatcatcatgaatgtgattagaagcatttcctcaatagtctctataaatatatcaaataaaataaatattccctaagatataactgaggtggcagcttggcacttttttttcttttgtaccctacatctttcctaatgaaaatgacctggtttccttctccttttccctatttcaatttccaattttggtcagatctgagggtactgggttgctctatcttaaagtcaggtcttattttcttagtttaaatgaattatgttaagtttgttcagagttggtaaataatgcctctctccatttacacccctttaatattagaacttaataaaaaatattaaccagggtataaaacatctcattttccagtaacatttcaggagggaggcagagatggggagagataaatattggagacagtatgtttctgaattacatacagaagaaaatgaatttaaaagtcttagaataccatttttagttcttttttttttttttttttttttgagacggagtctcgctctgtcgcccaggctggagtgcagtggcgcgatctcggctcactgcaagctccgcctcccgggttcacgccattctcctgcctcagcctcccaagtagctgggactacaggcgcccgccactacgcccggctaattttttgtatttttagtagagacggggtttcaccgttttagccaggatggtctcgatctcctgacctcgtgatccgcccgcctcggcctcccaaagtgctgggattacaggcgtgaaccaccgcgcccggcccatttttagttcttgagacaattataatttacaatttaaactctttgacactagtggcattttctaccctcagtaaggaagttaaatggcaaagcagttaactgtaagtttgggagtttaaagcagttattatattaatagttgatctaagattatgggtattttatgattgatagtagctcttggaataaataaaaactgatctattatccaagtccatgaatttctgctcagcacagatagtataagagggtttccaatggctagaacaaaacagtgaaggttttgttgggttttcttcttgactttctgtctgatgttgtgtttgtatgaggatgatttcaggtttgtggcatgttttgacatctttacatggaatatttcaaatacatgaaattgaatgaggtgatgagtccactgtattcaggaaagtagattagagaggtgctcttggttaaatccatgaaagatgcttctgagaggcccttgaactagtggttaccacctctttacctgtagttcaattgcatgaacaccattctggaaaaatttccctgttgccatgagccatgtttgagcatattcaaaataataacacatatttatgaatatgttcttaaaaaattaaagacaataataaaattacagagccattaaaaataaaagcaatgttttcaatttgtagtctgacctgtgtcactataaaagtggtttcttagctgtgattgttatctgggagcctcttgacatgctattgtgattttattccaaccagggcaaaacgtgtcatggagagccgttgcttggatataatgattggcacattagattcactgctcaaatgtgtctgtggcctcagtaaacattgttaactgactgaaaatgtatttcatgctttatgagatacaaaactgagtggtaaaaataagaaagtgcacgtttctgtcttaagaaaagaaagtaattagtaaatagagatattaatcagaataatgaatgctgttgaagaaatatgtttatgactgtctctattccctaattttcagaatgtttatttttctataagattctaccagatatgttggcggttgtgaaactggaaagctttttagttacttccatttactgacttttttttagagtaaataggggaaaatcccttttccattaaaatctttcaagccacagtgagaataaggattgtttgaagcaacagcagcttagtctttgctgaggtgctttaaaaacactgttagaataatataccttccagaggcatctgatcttgctctaataggcttgatgtttctatctgtctgtagctgtcagaaaaatgaaagccaaatacttaaaaattaatatctcagaacacagatatcccagaagttctcaggtaaattgtatggctttatccaccatactaacaatttcaggttgtttcacttttgcattaatggtaggcttttcaggtttatatttaatgggcttgggtattgagttaggaatgcccggcccacctgcagacaaggcagccccttgcctgcctgataatgcacggggaccgagacccataccctcatcaggagcaaccagagcctccaagccaaggggcctgcattctcccaagtcaggagcccgagcttacttttggcaaccttggagcttgtactgtagggttacttctcaggccagaaatttgcatcaaaggactaagaaaaatatatccaaaaataaacatgaaagccaagacttcatgccaggaactccagccacacacatcctgttggctggttctcttgtctctctcctcacagttctgattcttttaaaccaagcggaagcctgcttcgatgacttggacttatgtctgcaccagggtctcattcctgtgtcttcaagcttttccatggagtggcaaaatgattcaaatccagaaaggaagggagtgaagttattaggagctaactaaagttaaaaaaaaaaaaaaaaaaaaaaaaggaagtgttttcttattgccttagactgcctgagctttcctggagaaccatcagcaccagtttcctttctgtggactgagagccactcagtagtagacacgaacagggaatgaacggcaatgaaggtacattttgctgatcaaataaaggatagatgctcactggatgtctgagaactttgagagaccgaaaaagaaggacgtatgctctacaaggtcagaatgaatctttttattttttagtgaagggtgggagagtggggaaatactacatgttactgtttgcattttggaattatgctcaaaaacatctctggcttttctaattatgttccaccagacccaaatatgtaccatggcagggacataatttgatttcatctttgtttgtggtgtgtgtggggccagggggtgagtggtggctcatctttctgctagtgaagcatgtttatttagcctgatgatcttaaatatgtttctagaagataaataaaagtagttgttcataactaggcagagtaacatttatcacagtgaaattacatacatgtatttttctagtgacatatttgaatgtcacatattaaaaatgaattttgttcaaggaaacagattgtgggtgatggtatttcaccctccaggcccctggaaggtattttgcctgtagctctcagactcaatgaagtccttgctgtttataggcattctgttacattattgataactaagagttctacctgctccccaagcagtgatttcagtgtttctcagaagatgatcaggggtctgagcagatcaaggcttggctggcaaatgccaggaatgcccagatgctgtatggtgggcctgccggtagggtactataaccagtagttgctttctctgagctggcgctactttgggtgttcatttcgggagtgtagagtgaatactcaggtctttgaggagctgctgttaaactagtttccgaaatgcttcccttggccgtgcactagccaggactctgttgacacctcacccccactctctcccctgcactgttctcttacactgggtctcctcacccactcagctaagctactgagcagc

SEQ ID NO: 8372 - DNA, 6000 bp, Homo sapiens
tggcaacataaccagtcaacactgtatttttatctgtgaccctttctctggactccccaaggacagagctccaagagtcgtttctctctgttgcctcatcttcataatactctggaaatgaataaatgaataatccttgtagtaagcagcctctcaaatggctccctatgatcccccaatggttttgcacactctatgtataatccctgctaccccttgagtgtgggaagatctggtgacttgcttctagtgaatagtatatggcaaaagtggtaggatgtcacttcccagattaggttacagaaagactgtgacttctatcttgatcgtcattttttcctgctctctctctctccctccttctttccctccctctctcagagggagagactctctgagcctttgctgtgagggaagcaaggtgccatattacgagtggccttatgagaggtccacattgcaaggaactgatgtctctggccaacagctagtgacagcctgaggcctgccaacagccacatgagtgagcttggaagtggctcctccaattgagccttgaggccatcacagccctgatcaacaccctgattatacaatagtcaacgtataaaactctcaactagcccagtgtggtgacgctcacctgtagtcccagcttttctggaagctgaggtagaaggatcacttaagaccaggagttcgaggctgcagtgagctatgatcactctacctcactccagcctgagtggcagggtgagattctgtctcaaaaaacaaaaacagaaacacaaaaacccctctcaatcgacaagggaagtgttggtcagactcagtgactgaatttaccatataaatcatctctacaagatgcggcctgcacatctaacatgattattgcatggtcctcctcttctgcaacttagatatctctaactttcataacccttgaaagggttttagggataagaatatccccatttttggaatgatccaacaccccaacaaaaatgaacacaagtcaatgacaacctgacaactggaaattccaagttctccatgttattacgtcaaaattgtctagtaaaagagaggccagaaaggaaagcatgtgctaaaatttgccctttctagtcttgcatgagtaattcttgcagcaggagcttcattacaaccgcaggactggggcacacgaagacggccattttcaaatctggcctgacatcagaatgtaattcaactagataaacctgggacttggccaaaataagtagcatttgcaaaactggagccaatgaatagcatcacttttctgtgggaccatatgactacatgtgaagaaataaaggcctttgttattttaaagggcagggacaattggaaattttgcagcagatagtcacaaaattttccacccttggctctcccaagaagataccagttagtggctttgggagttgggtgtggaaggggttgcttaggaagcaaaattaaaatgatcctggacagaatataaacagatgtcactacatttgtcatagaacctaaaacatgattagacccttacattgtgaacttactttttctgatcttctatgacttggctccttaaaatcatagcattctataccaggcaaggcttggaaagccagagctccccctctcacagcaaattcttattttggagaataattttggattgattttttaaaaatctttaaaaacaaaacaatctgttttaaaaattggctttgcttctctgctttttggacttgtctgcctgggacagagcaagaggactcacatctgtaacactttccatctgggatgggttttctgcatcttaggcatagactgcttttcattcgtcccttgtatttaagggttttttttttctaaattattatccctattgcctaacatcggagctgtctggggttataatatggagagtagaagctcatcagctaaattggttttagttgcagttgagacagtattttatcctgtcagttttcattttatttgatgacagtgcttggtatttcttcctcaataagcaaagatgacttagatcagtggcctgatgaataagcatgaaattttgatttagaaaaggaggatatcctgaagctcatggagagaaaaaaggaatctaaccccccaccacacatactttaaatgacaaagcaaagcagcagcattgtctttaagcaacatatttcaaccgaagatcaacactccccgatgttaggtaatagaaataataatttagaaagaaaaggggggcccttttaaaaacacaaagaaggaatgaaacatttttaaagcaggtatcgtattaccttcagcacatgtcccaaagaaaaggaaaaaaagggtgggggggtccgggagggagggcgaaactgatgcttgggaggaagaaggcgactcccgctgagggccggatggaggatgtgatcagtctaacactctgccttggcccaaaggcttccttccgccctttcgacctattaacaggagtggggaaggacaaagaaccgtgaatcggaaagaacgattcccagcaatcttcagtgatcgaaaataaataaagaaaaacagagaaagccaaagtctcccatggaagggaacccaattaattgtcttcgatttcagaatgagtttttttcctgctgtagaagaagcgcacgggaggcagcagagacagcaacttctgccaaggttcaacctgatcagaaatcgctcagagctccagcacccgggactgaggcagaagggctccgccaggaataacgttttttaaagcacaggattgctgtgtgtgtgtgtgtgtgtgtgtgtgtgtgagagagagagagagagagacagaggaaagaggaggaggaggagagattgattgattgatttttttcttttccttctcaacatgtcactttcctgcatgggaattcctgatattcctggcagcccggagagaggggagaggccccctggtgacttatgacccccgcaggagtaaccagagagcgcgcgcgagcgcccagcgcctggctcaagacgaagatttaaccgagaacaaaagaacgtttgccaatcagaaaacgctacccgagaacgaggataaccccgctttgtgttttgaaaactctttaattagcctggtttctaagacgcattaaaacattcctacgcagattctaaatggaggatcaaatggttgcttctgcaacgaagatgggatcccgaaagggcacacgccgcagaaccaaggcacacggggccactgagacgcccggcgcgtcgtacagagtgttcctgggcgctcggtctcaggttacttctagaaccagtctccccaacgccgtcttcgtttccttaaaacctcgctagagtcaccccagttccccagactccaggccgtgcgcgcgggcggggtggcctgagcccgggttccccgctctccctgcttcgggcccttcctccgaggggtccttcctcccgccgtcactcggccccctccgcccgactcgggtttctcctcggaggcggcccctcctcctttttataactcgggggaggggagaggggactgtggcctcgcgtggactctttgggtccggggggaaagaggcgatccgcaaggcgcacccccttctcgtcccgtcccaaaccccacattgaggacccggcgacccgaaagccccgccagagccagcctttgcagtcctaacgcgactcctggtcacgtctctccccgaaggggcgctgcgcggtcctcgctcccctcaaacgccgctggcgaaggcgcccctgctcaggaatgcgcatctgagtgcaccaggaagaggaacaaatctttgaagcaaattccctttctgcgcgttttcgtccctgagcgaattcagggtaaaagtttttccgaacttttccctcccagtcccccgcccctcccctcaggaatccgcccagagcgccgcggacaccgcctccgccactcccgcgcccgccccttccgacttccgcccaatccgaaggcggccaccgaaaaaacaaaggccgccattgggccgccggggcctggggccgcccccggagtggtttgtgaatggggggggaggggaggggaggggaggggacgggaggggacgggagggggcgggccggcccggaaccccgcgagcccgacgcttcttctggcgaccagcgcgactccgaggcgttagtcggcgctcactcccggcgggcggcggcggcggcggcggcggcgggcgccaggactcgctgctggggctgcgaggggctggaggggccggggccaggccgcgggcacgagcgcctcgcggtttcggacgcagtgtgactgggtttccaaaaagaactcgccgtgctcccgactccggggccgagatcggactcagcaagagccggccgtttggctgaaacttggggccgagcttttggggctgaagaaggagcggggtgtggaggaggaggcgaaggaggcggcgacgagcggagcctcgaggccaggaggcggggcagcaccgcggaggcggcggccggggcgagcgagcggcggcggcaggggttctcctagcggggaccggaccaggcgcggggggcgtgcgcgctgcggtgcgccgggggtccagagtcttgggcaaactttgaagggtgccggagccgcttgttgctcctcgcggcggagggagccgcaccgttacgtccccgcggggagagcgaggcggccctcctcggcgcccccaacccaggctgacgagttttgggcccccggcggccctgcgagtgcagggcggcggcgtctgcggcgccttcgcggcgcgggcacccaggcggcagcgccctttgctccacgccgcccacggcccggccccggcgccgtgaggactctcatgcgtcgggcgcggcggcgcctccccgcatccaagcctctcccaaccgcctcgtcgcactcctcaggctgagagcaccgctgcactcgcggccggcgatgcgggaccccggcgcggccgctccgctttcgtccctgggcctctgtgccctggtgctggcgctgctgggcgcactgtccgcgggcgccggggcgcagccgtaccacggagagaagggcatctccgtgccggaccacggcttctgccagcccatctccatcccgctgtgcacggacatcgcctacaaccagaccatcctgcccaacctgctgggccacacgaaccaagaggacgcgggcctcgaggtgcaccagttctacccgctggtgaaggtgcagtgttctcccgaactccgctttttcttatgctccatgtatgcgcccgtgtgcaccgtgctcgatcaggccatcccgccgtgtcgttctctgtgcgagcgcgcccgccagggctgcgaggcgctcatgaacaagttcggcttccagtggcccgagcggctgcgctgcgagaacttcccggtgcacggtgcgggcgagatctgcgtgggccagaacacgtcggacggctccgggggcccaggcggcggccccactgcctaccctaccgcgccctacctgccggacctgcccttcaccgcgctgcccccgggggcctcagatggcagggggcgtcccgccttccccttctcatgcccccgtcagctcaaggtgcccccgtacctgggctaccgcttcctgggtgagcgcgattgtggcgccccgtgcgaaccgggccgtgccaacggcctgatgtactttaaggaggaggagaggcgcttcgcccgcctctgggtgggcgtgtggtccgtgctgtgctgcgcctcgacgctctttaccgttctcacctacctggtggacatgcggcgcttcagctacccagagcggcccatcatcttcctgtcgggctgctacttcatggtggccgtggcgcacgtggccggcttccttctagaggaccgcgccgtgtgcgtggagcgcttctcggacgatggctaccgcacggtggcgca

SEQ ID NO: 8373 - DNA, 6000 bp, Homo sapiens
ccctagaggagagaatggctggccagtgagctatatttaaactttttttttttccccctgagagacagggtcattacctcctgggctcgggtgatcatcccacctcagcctcccaaatagctgggattacaggcgcataccactatgcctggctaattttttttatttttagtagagatgaggtttcgccatcttgcccaggctggtctcaaactcctggactcaggcagtttgcttgcttcagcctctcaaagtgctgggattataggcatgagctatggaacccagcgagctattaatacaaacttacatgcttccttataaagcttggtccctgagactctgtggctgctcctgaagctccctggtcaatgacagagaaattaaagggttttctggtttatctttttattgtgaataatgtgtggaatttcccaaaatgtgttccttagtgtgtggtcctgcaggacattgatgagtattcaggtgtgggtctgatgcagactaattggccacagtttgtctttctcacatggcagcccaaaagactgctctcagggagagcagttgtcaaaaacagtacagagcctagtagagcagctgtcccccagcaggactctggtccctgaaatgaaattgcttcagaaagtttgcttggtgtaaggaattaagaggagaattttaggggcacctgcaacggtctgatggtcattctaatggtttctgccttccatctatggcagtgtttcatactggcttgggacccattaattgtggtgtgactatatcacaacaagcatttttgttttctaaacttttgattttgagataactgtagatttaaatacggttgtaagaaacaatacagagagatcctgtataccttccacttggttcccccaccatgctaacatcttgtataattgttgtataacatcacagccaagaaaaaatcattagtatagtccacacaccttcagatttggccggatttacgtgcactgtatgagatgtacatctgtgcatttttatcatacgtgtagctttgtgtgacgccagcatttttaagcaattgaatagtatcagagtgcattacatctgttaagggtaagtgttgatgtggaaacgtattttagttacatatgcacatcatgactggattgtagaaatgtctcttgactgtgagtcacagtggagaattttgaaaaccacaggtcgttcagtcatcagacttgattttatttcactaaaatgggctgctagagagctcaaggtactctgatttctaattggctgctcagggtgcccctgaccacttacttctggtacttggaaaacctagattaattggatatattgacagcaacatatgcattctctaccccatgagttatttaaggggttttcaagtgtaattttgactagaagcagtttttgctctttttttgttttaattttagtttttagagacagggtctcactgtgttgccgaggctgtactcaagctcctgacctccggagtagctggaactacaggcacctgccactatgtccagctgagtttttgctttcttccttagtagaacataactaatgttggagctcactgtactcttttgccagtagtaggaatccgatttctggtaagtactgtaggtgacagaaccaaggttgcttagaagatatggagttaggagaaaaatgaaaaggcataaatattttctacagcagtaaatcctaaggaagtaactagttccaagacactgtcaacattaaaaatccatagtgcaggctgagcacagtggctcacacctgtaatcgtagcactttgtgaggatgaggaaggaggattgcttgatcccgggagtttgagaccagcctgggtaacggtgagactccttctccatctctataaaaataaatctggctgggcacggtggctcacgcctgtaatcccagcactttgggaggccaatgcgggtggatcacctgaggtcaggagtttgagaccagcctggccaacatggtgaaaccccatctctactaaaaaaaaattagctgggcatggtggcgggtgcctgtaatcccagctactcgggaggcggaggcaggagaatcacttgaacccaggaggcggaggttgcagtgagccaagatacgccattgcactccagcctggacaacaagagcgaaactctgtctcaaaaataaataaatgtgtagtgcagcctggacaacatggcaagaccctgcctctacaaaaaataaaaatcggctggatgtggtggtgcatgcctgtggtcccagctactcaagaggctgaggcaggaggattgcttgagccctgaaggtcaaggctgcaatgagctgtgtcgtgccactccactccagcctgggcaacagagtgagaccctgtcccagaaaaaagaaaaatccatactggtgtaaacccgtatccagattgactcttctcttaacaaggacacacttggcgttagtatggatctagcctcaaagaccctcgtcacagatgaagcagcccatcgtgaccagtcgaggccttaggaccgcaggaggaatgtctcaggatgagggtcaagcacactgagggtgtgggctggaaaaaagggatctagttgtttcttcctagtctcaggaagccagtgccccaagggttcacacctggtaagtgtaggcgtccttggatatgggctgtagaggaacagtttgaatccaggtgccgccatctaatagctatgtgacagcaaatttcttaatctgagccctggtagcctcatttaaattggacataatgccacctacctgaggatttgtaaaaggaaaagagaataaatgtctgttacatcataagcattatgatgcctgtaattataatgtcaatgaatcttagttccctttatacactcaaggggatcagaagtgacaggctgttgccccagcaaagtcccacagaagccaacccttattcggtgcttggggtttcccaggctttccccaaggtagttggtattttggtattttcccctgcttaaatggcccttactgccgaggccaggcaggtaagaatctccatgtctggaaaaagtggaacctggggcaaactgcaagctaaggataaggagcttggcaggaaagacgctaagactctaacaggaagtggaagggtggacttggagggggaattgaaatcaagaaaaggaaatagccctagctgctgcctcagcctccttgaggggagctgatacttggagttggttgccgttaggttaccctcatttggagtagtactgatgagtgctcgaccgaaacctgggtctactctggtggcgattttgagttcaagcagtgctgccccctactgggggttgctaaaagcactgccatttcagtgggcggggggtgttggttctttttggtttttggttggttggttggttggttggttggttggttggttttgagacagagtctcactcttcgcccaggctggagtgcagtggtgcgatcttggctcactgcaacctccgcttcccgggttcaagcaattctcctgcctcagcctccggagtacctgggaccacaggcctgcaccgccacacccagctaattttgtatttttagtagaggcagggtttttccatattggccaggctggtctcgaactcctgacaggtgatccacccaccttggcctcccaaagtgctgggaaaacaggcgtgagccactgtgcccagcccaccctaaccttttttttttttttttttaacagatgagcgaattaaaaggttaggcgattttttttttttattattggagacttgctctgttgtgcagtggcgcaatctcggctcactgcaacctccccctcctggattcaagcgattctcctgcctcagcctcctgagcagctaggattacaggtgctcaccaccacacctggctaatttttgtatttttagtagagatggggtttcaccatgttggccagactgctctcaaactcctgacttcaggtgatctgtccacctcggcctcccaaagtgctgggattacaaggatgaaccaccgcgcctggctctgattttttttaatcatctttattttgaggcagggtctcactctgtcgcccaggctgcagtgcagtggcgccatgaaggctcacggcagcctcaacctcctggactcgagcaatcttcacacctcagcctcctgagtagctggaaccacacaacatgtaccactgtgcccagctaatctttattttttgtagagacggagtctcaccacgttgcccaggcctcagcctcttaaagtgctaggattacaggcattgagtgtgaagtgttgaacagcggctcagggaggccaaccagggtccagcaaaccccgtccctgctgcctccattggtccagagctggtacccgcagccagcatgacactcacccagtcccagacattgtgggtcaacagagagaaattcagatagctaagagaatggaagcggacaaaggaggcacaggaggattccatgccagagtctgaattggtcacccccattcaggctctgcctgaggaaaggagaatggggtccgggcacagtcagctggatggagcgtctgaagacggcttgcaccagagccctccgtggctgaagggagaagctagggggtgagtcagccccagggcttgatggaacagacaggaactagatgatctaggaagggagaaatgaggctgagcaggagacagcccaggctccctggctgccactacctaatctgtcccccttcacacacatcccacacacagtgtttagacagagcagcagagaagaaacagacatcctggatcccacagggagcaggctggggctgggaacaggaggtctgtttattcctggaagtcacatatcagaagggtcccacacccacttctgtccaggccccaggctgaactctcccagagcctgtgacttctgcccgaccagatcccgtggttctgaggaccggccctggaaccctgcgtccttccgacccaccagctccctcgaggatggacttgaggctggatgctttcctcttcccactttttgtcccaacagaagtccctgatctccaggatccctgactggctgtgcagagctggcacagccacactccacgggcttccagcccttcaggcccagctctcccggagagcaccagagtccctttgctccatttacttgcgctcttcagccagcaagtgtttcctaatgtctcacccccagtcccagctttcctgctgcaatttccgcctgttccctcccatttcaggccttaagggagtgtggctgggcttctctcctccccctcactccaaagccgcacttgatacaaggtggaaatcaaagcaccacttctggcttcccagccttgaacttgcccttccctctcaatgtatctggtttcctcagcttccctgtgcagcaagagtgtcactcccctcttgcttttcccaagctccccatgcgcccctctcagcagatctgtcttagaggggccaggtgcagagaaaggcagaaatcctaataatgttcccagcgatcgctgcctgtcgcggagtgctgaagggccaagtgttgatctgagtcctcatcacacgggacttcatttagtctcacgataggtgagtacaactatgggccccatttgacagatgaggaaactaaggcaagggaactttagtcatttgcccaagttcactggcttttttaaaaaaggatccagacagctctgattccagcgccagctcatgcctcttcatcatgggggaggaaagagagggagccatttgttggggcaaacccccacccatcaagggccatgcactggggtatatgccgccatatgtgttatcctgtgatattccccaccacgaccttaattagaggtggtttttcttgttcccattttaacacaggcaaaaaccgaggccca

SEQ ID NO: 8374 - DNA, 6000 bp, Homo sapiens
atttggcagatatacgcttacagtcccttaaggggaactctttaattttgcttgaggcagaaaaaaacaggacatggaaaagccaataaagaaaggccagagggagagaaaacacatcaccaaggttcccagcataggagaacataggctgagctggaaaatgacctggttgcttggaacaggatcacaaattcagtgagttaagtcacagatgcagaagcacctgcgtaaagtctgagaaccaaaaaggaagctcccaattccctggccacggttgaaggcacccatgtggaccagcccctgaaacccctgaagctcaggagggtttcccgccatgcgggaggggcaccagcaagcctatgttcagagaagctgcgaactgcgagtgctgggcttgtggagtgaggcctcttggtttgtcagcgtctgctgcagtaaagggagtggagtgtctcagatgtctttagaaaatgaaaatgttttctttggtaatgttttgaatatttcatctctacttgtttccgtcattctgggaagcttatcctgtagtgttatttaacaatctgtttgcgtagagctttattcagaaaattgtttcccacctgctgtctgcatcgtagttggtgagggtcctggacagaggttcatgaggacacagtacaccaggagtgactcacgagcctcagggctgtgtcctgggtggatacagagctcaatctcatggaggaagatgtcactggaaaaagtcctaggtggctctgatatctgcccctctcccttcctcccttctgggaaaataagtgagtaagacatagtcccttaacttcgaggggttattaactcttcatgcatcttatacaaatatgtataatgtggagcatcactaaggatccagagggagcaatcaattccaaataagagctatccaggaaggcatcaggaagaaagtaatatttagaagaaaggcagatgtatcagagaaggaaactccacagtaacttgaacagggaatatttgattcaaagaatttttaattataacagaggactggagtaaggagggattggctagaaagaagtaaacagaactctaaggaagatgggattagcagacataggagcagtcatgacccctagggctgagatagggcatccagggagaagcccctgcccccagggctgaggtttaggttttggagagagcactgcagcactccctgggtgccagaaacctgtcctcttgggcaccaagaaagctgttcatggggaagtgtctcattagaggcacccagcgcaaacagcagggggtgcagggaagggtctggctgccatgctctgggagaactgggcaccagagcaggtgcgagcagggcaggagccctagatgctaacacaccaaactaggaaacaaaacccttcctcctgctgtatctctctggcaccctctcctgtcaagcttaatatcatgccaactggcatagtagaaatagttaaaggggcccacacttattttcacagaacaggcaaaaagggtgcatttgtagctgagaggaggtgagtcgataagcatcagagtaggggttcactgaatgtcaagtttggaaggggctgtaaaggtcctatattccgtcccccgtcctcagggtttaaatctcaaatcctcacatgccaatcaagtggttgccaagctcatgctgaggcatccacagcggcaggtggcctccacttcctgtctgagatgctcaggaagttcctgctcacactgaagcagtgctgcttctggaaataatgaggtctcacctgacagcccttcaaatacatgagccgtttttctgctgtgctttttctttgcttttgctttgtttcttgtaaactacacatcttacctctgtgacaattcagaatcttcactctataccaatcatgggcacgagtacacttctataggtctaggtctctgcaggggtggggaatatctcccctcaaaaacttgctccagctgcactctgatagtgcaaaatggagcaggaccattggaccgtttcatattttgccatttcatccataactgacccgttttgctggtcatggtgattgatctagggagtgactcctgagctgtgtcagaaatgggactaggaaagagaagtctattttcatacctggtcatgaaactaagaagaaatgagccctaaaagctgccttcagctctgattccagcttgagaggatgcatccaagaggagagagaagcagagaaaagaaacagagaagacatcctgatgtcatgacagcccctggttcctgtcattcctgaggccagctccgccctcattctgcctccatgtggttacatgagccagcagatgcctacttttttgcttaaactagttctagttgggtttctggaaattaccaacaaataatatcaacttacatggcctttttaccttaaaggaaaaaaaaaaaaaaaagaagcaggaggcattggctcactcctttgccacagggcttctgtagaagcaaatgtcactttagctagaactgggaatttgttgtgaaggatgtttagggacagcgtatttagaaactaagatcttgctcctccccatgtcttccctttcctttctcaacaattcagtcctagagcaagtaggtgggggcaatctgccatgggagccacagaggctcagagtggggtgaggagggtgtccagggtgggggctcctgtgtgaggagttagagtccatgtggggtgaggggagcattttcacagaaggatcacccagtcggggtatcaggtcccagacagggtgaggaggacatccacaccaggggaccaggaacttggaggagttggagcttgagcaagaagagggtgcttgtgtgcagccagggtggcgcttgccacggagatgggaggtcagttactgtgggaggctgggaggctgaataagagcccccagagaggtccacatcttgagctccagaacctgtgaatcgtcccttatatggcaaaaggggtgtgattaagttcagggtcttgagatgggagattatcctgaattatctaggtggagccactgtagtcacaatggtccttatatgacgggggcagggggccagtagtaggcagtgtgaggatgcaagcagaggttggagcgattcgaggaggggcccaagccacagaatgcaggtggcccctagtagctaaaaaaggcaagaaagcagatgcagccccaaagcctccagaaggaaggcagccctgctggcacattgatctcagcccaggatatctagaattgtaaggtaatacatctgtctttttgttgctgttgttttttgagacggagtctcactctgttgcccaggctggaatgccatgttgtgatctccgctcactgcaacctccacctcccaggttcaagtgattctcctgcctcagcctcccaagtagctgagatcacagtgcccaccaccatccctggctaatttttgtatttttagtagagacggggtttcgccatgttggccaggctgatctcgagctcctgacctcagttgatccccccacctcagcttcccaaagtgctgggattacagacatgagccactgcacccggccatttgtcttgttttaagccactaacattatggtgatttgtttcagcaacaataagacgctaataaagttacatccaatgggactgagcaaataaataattataacgaggacaatggaagctaggtctctcactatggagaaaggagttacaaacatggaaatggagaaaacttgaatgaattttgtataatggattggaattagagatgctggtgggaaccaattactgttaatacagatatgtgcatatatattttcatgtgaacgtatgtgtgtgtgtgtgtgtgtgtgtgtgcatacgtatagatgtcttggcttttaccactgagagagcctggaagttgcaacacaccaatagcaaggagcacactttgcacccagatcttggcttctaaatcttgttttccacaaaggctccttggaaaggcagattccagggaatcttaaataaagtgcaagatgagcccacactgactttttgtgccagaaaatgaggaagtattcaaagaatgatggccatatattgaaaggacatagaggctagcccccactggccaaatcaggaataatctgagctgtcaactaaatactgagagtaatggattataactcacgaaatagaacagtaaaccacaagttcatacagatggaaataaacagatgaataaattgaaagtttgagaatgagatatttgcatacatttaaagaatcttccttcaaaatacttattaatgacatagagaaaagggagtggaacagcctgacagccagttccaatcacagcaaacatcatcagtcatgggacaaattggtgttggtgaccactggatgggttgccatgagaacacaccctcacttctatgatatgcatgccagaaacgtgagacctgaatcttatcttaaggaacgatcagacacacccaaatggaaggatattctacaaaataatcaacctgttatgttcagatgtgtccaggttatgaaagtcaagggaagactgagaaactgggccagactgaaggaaactgcagagaccagcaactaaaggcaccacgtgattctgaggagtctttctctagaacagacacgctcgggatagttgtgatgcagggcaggttcttggctttgctcaggaaagaactcaacagtcagctggtggtggaaaaaagcagctttattgagtccggcagtgatgcatctccgtgcctgctccttggggagcagggcaaccctataggcagtgcgtggagagtagtagcctatgggccgctgctagtcatatttccatccactgttaatgacatgctaatgaaggggcgggtcattcagaaatagctaggaaatgggtggtaacttccggctgttgccatggcattggtaaactgtcatggtgctggcaggaatggctaagggtgatgggcagcgagaacaaccagaggcgctttttgtgtctttttctagttttggcctgttctcaatctggtctgggagacgaatcctgctgacctcctacctctgctggcaaaactcgagtggggtctgggaacttgaaggaaggaaagtgttgatgctaacttccggattttgtggttacattgggataaagcgggagaatatccctatttgtgggaaatacacacaagtattttgagggtgacaggatatgagttcagcaaccttctctcaaatggttcagggaataaagattctttgttctttaccttgaaatttttctctaagtttatggttatttcaaaataaaaaggaaggaagggtctctcttattaattaattttgtctcacgttgttttaagctctttagagtgttttcaaatgtaagtggaaacgaaaaaaatataactattagcatatataaaatttaaatcttaaaaccatgatcaacccaaataattgtagtagatatattgagatatttattctttaattccctgcaggacttagatatttttaagctgaatcatttttatgttttgaagctaaaatctatatattgatgtttgaggagtgtgaaatcacaatacttcagaatgttaccaacttttcataaaaatgtgacctgggtttgaccctatgtgtttagtagcccattaggccctctgtgctttgatatactctcatggcaaaagtttcctggccttactcagagatcagaaaaattcttttctgtgtcaaactttacaatgaagtgaaagtagagaaagtaatgcttcactcagaactttctattcggggttttttcttttcttaagaaagcgaaagctgagaatgaaaaatttcaaatataggtaacagcaagtaatataaagtatgcctatgtactcaccaataaggtctaacaattgtgaatatttttgc

SEQ ID NO: 8375 - DNA, 6000 bp, Homo sapiens
gcgggcggatcacttggccaggcggatcagcctggggtacatggtgaaaccctgtgtctactaaaaatacaaaaaattagccaggcgtggtggcacgggtctgtaatcccagctactcagggggctgcggtgggagaattgctggaacccgagagtgagctgagtgagccgagatcgcaccattgcactccagcctgggagacagagcgagactccatctcaaaagaaaaaaaaaaaaagggattcaacgtagtctacaagagtttcatatgaagatttttaaaatgcagattcaacccaaacctcctgaggtctgggaatctgtgttttaaacaagctcctgatacaatgtatgagaattgctgcttccgaactcggagttacccagggaaaaaagttttatataactccttgaatgccaagtcctgtccctcaggaggcaggaaattagtcctgagaatttcatcctccctttctcagctagttccaaaaacagtcctgggcccaggctttgaggctcagcccaggtgttgtgatgatgtataagaagccagttaaagaagccagctcctctctgcagctgcagccctggctgttgccatagccactggctgaccagtagcatggtcagttcaagatgatcccacaaggcaatcacaggatgaaccagctggattcttgaagtgtccttctaggtctataaattccactgctaaattcctattgccctgaagtagcagcttctccacttcttatgaactacattctacttacagttactcacctatacacctgccctcaaggcaaatagaaaggaaaaatgaagcacaaataacgtggctactaggcaagtaggaaaatgttaagttttctctttcaaatgactgaagagcacctgctgtgtggcaattccaaatcttaaaagaaggactgcaaaggcctgagtatctctctgttggctactctcccctgccagggtgtacaactatcagatatgccaaaagaacacatcagaatgggacaatgcagggctttggtaatatatcatctttccatggctgagttttgtgtggttggatgggatggaagcaaaaacaatccacttgattaacaattcagcgtcctgagaagacccctccagaaggggatactttccatccttcccatcattatgaaattcaatcatatagagaaatggggacctgcataaatttaacaatgcaatatagacacatattttcaacagcaaagggggaagtctccttttcttttttctcgttaaagacacatactaacactgcttgataaagagcccatcacaagtgttaggtggagaaaggaaaaagcttaaatgtttgtacatcttttaccaactttctggactcacaatcttttttaatctcccaaggaaaccccagcacacctgtgttccatataatagcagctctcacccagcaggtacattgagagaaaggaatctgtcagcacattaataagatcctgacaaggcagggaggaaaggctgccagtgccataagaaatactgtctccaggaaattaaaagtgttccatagtgcgcttggtgtacatctgtttatgttcttgtttcctccactggcaattgctcctgtcaatccatgaattctgtactatgaacgaaacagaaaattgcttcagtagtacacagtcccagctgggtgttaaaccagcagtgtggtgatattagactcaagcttagatgctcttgctttacacttctttgagctaaaaagaaaataaggtaatgtcaacaacaaaaaaagagacaagtggtacttaggagaaaagtgaaaaaagtaaaaaccatttgcttgattttgtatgtgtgtgtctgtctgtgtgcgtatatgtgtgtttgaaagcaggtggggagtttctagaaaaaatataggatatggagtctcaagatctctcttttaccccaaagacccaccagctaacaaggatcaagggaataggtaggaagaaacagagaaggcatggttgctaggaggttagaggcaaaaggaacaccacagacactatagcatgctgcgcctttgctggcagacaggggctatcagttactaaaactgccatcatgtattggaggacattaactgtccaccaaagtcagtcttccccttctttcattgtagctgaacacatagctgttcagcagagaacttcatttcacagcctcctgggcagctagaggtggccaagtgactaaatcctcaccagtagaacacgagggaagtgacaaatcccacttcctggtctgtgcacttctctgggtgtgcctgaccttctcacaagctgcaataccgacacacctatgaccagcatggacttgatgagagcatcacactctgagggaggtgggaacagagatggaaggaatctgtgatcctgaatggccacatggagcaaatctaatctgaactaagaaaaatacatttctatgtattttggagattatgttttgaggcctctttgtaactaacatagttttcaccctaatatacattataacattttgaaattaaagtctgagaatggaactaaaatgccctcagaatatagttgttttctctgttatcaatcatcccagatttccagaagtattcagttttagaggcaataatacaatgattatttcctgaaagttcacacaagacagctacagtgattaaaagaaggaacattacatttttttaaaaaatcatcctaaatttatcaaaagtagaatgatccataaaaaattataactgtcaaatttgtgttagccacaaatgtgttcagccaccatagccacaggtgaaagcataggtactatttggggctaaaattgttgccccccaaattcatacgttgaagtcctaactctcactatctcagcatgtggctgctggagaagggtctttaaagaaaagtaaggttagccaagtcaggcatatcacttgaggtcaggagttcaagaccagcctggccaacatggtgaaaccccgtctctactgaaaatacaaaaattagctgggcgtggtggtgtgtgcctgtaatcccagctactctggaggctgaggcaggagaatcgcttgaaccagggagtcagaggttgcagtgagccgagatcgtgccactgcactccagcctggcaacagagcgagactccgtctcaaaaaaaaaaaaaaaaaagaaagaatgataaggttcaatgaagtcataatccactatgatggtgtcgtaagaagaggaaattaggacacagacaacacagactgagggacaaccatgtgaagataggagaagacggcatctacaagccaacaagacaggcctcagatggaatcagtcctgctaacatcttaatcccagacttctatccttcacaactgtggaaaaatacatttctgttgtttcaggccacttgctatggttctttgtgtggcagcctgagtagataaatacaaacaataaatgttaaatacttttcttttgtatcagaaccaaggagggattctctgggttggttctctgacaaaaaggaaggaagaaagagaaggaaagcagggagggagggagggaagggaggggggaaggggggaggggggaggagggagggagggagggaaatattatttccagcaattaaaatctttgggtgtttacaagtcacatgctttgattatatttaaattctaaataattctacttcccttccgtttagacgcatgcttcacatcatcttcagaagtaaactccagataaagacttaaatataagaggtaaaaagctaataaaataaaatgtgggaagtcattgcagtctatgagtagacaaagacattttgaatatgaagctaaatcctcaaatcacagtgtcacaattagatgggtttaacttcatcgaaatgaaagattgtgattcaataaaggatatcctagaaaatgtgaacaaactaaagaaagtatctacaataactaaagtgaaaggagattaatatacagaatataccccacaaacacgggaaaaaaagaaacaaaactctttcaaatcaacaggaaaacaatgcaatcactaatagaaaaataaataaaggaacaggtaaagcccaattgtctaacaggtatatgaaggaaagttcaacaccattagccacagaaaaactaaaagattaaacatcagtgagattctacattattcattagaatggcaaacattagaacactagataataccaagtgttggagaggagatggaaatgacagaaacaattgatatgttggagtgaatactcttggagtgaacaatagatactgttagagggaatataaactagtccagcagttttggaaagcaatctaacaacattggggaaattaagtacagaatctcatatgatccagcaattgactgctgggtgtatgtctcagggatactcacacagattcataaaagcacatgttccaagaatattatttgtagtatggaagttagaaacaatgtccatcattaggggaaaggattagtaaaataagatagaggcatactatgaaaatatacaattaccatcctgccttgcttaacaacagtaatatttaattgcttaaagactgtgagtgggataaatggatagcctttaatcattaaagaaaaaataattgataaaatgtctctcgttttccttttctctcttgtgagttgctccttcaaacacccatcttttaaaacatgagagatatccagcttaagactcaccatgggcctcggctaaatcttcatgaatttgatgaggttaagaaagcaactacatttcctaagaaagcaactattttaaaagagcaaacctgggtgtggggagggattaggagtagagtttgggatggcagcctcagaaggacaaacttaggccaaggagggagggagttggggtggagactgagcttctccagttggaggtctggagctaggactcttcattgaaaccggagagaaggaaaaggagagagtgaggctgactttttaactgaactccaaaattctctgagcaatagaatgggcctaatatgtaccaggtgggatttaattttaaatgaaagaaaaatgtttcagatagcagggactgttaaaacattgaaattgaatgttgtggatctcctgctgtgttggttttcagtattttttagagctttgttatccagtattatagtccaatttaggctaaggaacagaataaatttcctaagagctgtaatttgtgttttcatgtgctttccccaaagtattatcaactgctatttgatatcctgtcctttgggcatatttttgttgttgttgttgttaatgatggtggtgcttttttgtttgtttgttttaagaaatgaaaagaaaagattggcaagtccctggagagacattatccccccaccccccgccaaattttatctattgcgaacagcagaaataccagcatgttcagatctaaaagcagtctgtttcttctccaggttaaaaaaatatatacttcttatgactctggacttaaatttgactttttaaaaataagaaaaattaaagaagggtaggaaatattggtcacatctccgcgtgattctaggtcctcacttctgctacccagtaattaaaataccctgcgttatcctttagaaattacacgcctgtgtctttaacaaactgtaagagagaagggggcgggtctcgggaacggcgaaggctctgattggccctcctggcaggaactgggcggtaaaatagcccttctgttactgtccggggctgcggggtgagaggccagggccgagaagggcttcaggacgcgggaggcgcacttgcttcaagtcgcgggcgtgggaacggggttgcaaaacggggcctctttgtccgggtgggttaagggccctggcagctttttcgcgaaggcgccatgtcctagcagttgggccgcagtgggcccgaggt

SEQ ID NO: 8376 - DNA, 6000 bp, Homo sapiens
tagaggtggggtctgtagctgggagagaatttttctctgcacgaggtgaatgttccatttctggactgcttagattctagtcttcgcatcacttagtgtctacatctggggaaaacaaacaccatggcagctattttaggtggtccctgagtcccttccaactctgatacttcatcaccaaaatatgaatgagttaattattgatagggaacagaactcagggactgtgctctgcagtgaaattaagcatgggagcaaggtgtggtagtgagggcgctggtgaattgccgccatctctgatttctagtgggttgaggagtgcaagaccatcatggcgtgtcagcagaccattcaagctggtaaactgaggttgggatccagctcctccaactctccttgataagctagacctgccgtggatgtgatctccccaggaaaatgacatttggagtccctcttaataacaccacagatctgctcatggatgagatatgagtgaaagaatccttcttagatactgggtgtctacccgcaaatgctgtccatccacattgactctccacatcatagctcagtctcccaaagggggcccatccatgcttgtctatactttggaggttaccattatcttggctacgcagaagccctatgaaaaagtaatcacaatctgtataaatacatgaatattaaacaaaatgtccctgaacaaccagtgagtctatgaaaaattcaggaggaaatcaaaacatttctcgtaatgaatgaaaatagaaacacaatatacaaaacctatgggatactgcaaaaacagtggtaagagggaagtttatggtaataagtgcttacatttaaaaagtagacagatttcaaataaacaacctaacaatgcacctcaatgtactagaaaagcaaaaacaaaacaaacctaaattagtagaaggaaaggaaaataaagatgagagcagaactaaacaaaatagaggaaaaaatacaaacaatgaatgaaacattttttaaaaagataaaattgacaaaacattagctagactaaaagaaggactcaaaccagaaatgaaaaaggagacattacaactaatatcacagaaatacaagggatcattaaagactattatgaacaactacatgccaacaaatttgaaaatctagagaaaatagataaattcctggacacatataacctaccaagattgaaataagaagaaatagaaaacctgaacagaccaacaatgagtaacaagattgactcagtaataaaaagtctcccaacaaagaaaagaccaggactggatcacattatttctgaattctaccaaacttattttgttgttgtttaaaaaaaaaaatcaatagctttaggggcacaagtggtttttgtttacattggtgaattgtacagtagtgaagtctgggcttttagtgtacctgtcatctgaatactatacattgaacccaataagtaatttttcttctctcaccctcctccaaccttccctcctctgcatctccagtgtccagaatatgcccctgcatatccatagtttagctcttgcttgtaagtaagaacatgtgcccaccaaacttttaaatcagaactaacaccaattcttctccaactatttccccaaaattgaagaggcaggaattcttcctaattgattttatgaggccaggatttaccctgataccaaaccagacaagtacacacacctctaggtgaatattcttgatgaacatagaagcaaaaatcctcaacaaaatactagcaaaccaaatctaacagcacatcaaaaagataatacaccctgatcaaatgggattcattccagggacgtaaggatggtttaacacacacaaatcaataaatgtgatacacaacatcaagagaatgaaggataaaaaccacatggtcatttcaatagatgcagaaaaagtatttaacacaatttaacattccatcatgataaaaactctaaaaaacattaggtatagaagaaacatacctcaacataataaaagccatatatgacagtcccaccgcatatatcatactgaactggaacaagacaaggatgcccacttgtaccactctttttcaacattgtattgaaagtcctcaccagagtaattagataaaagaaaaagcatatacactgaaaaaaaggcaatcaaattgtccctctttgcagacaacatggtcttacatataggaaagcctaaagacttcaccaaaaaacttagaaatgataaacaaattcaataaagttgcaggataaaaacatgcaaaaatcagtagtgtctttatacaccaataacgacctagctgaaaaagaaatcaagaaagcaatctcatatataatagctatgaaaaatagttagaaatgcatttaaccaaaaaggctaaagatatctgcaatgaaaactacaaaacactgatgaaagaacttgaagacaaaaaaattggaaagataacccatgctcatggattaaaagaatattgttaaaatgacaatactacccaaagcaagctacagatctctatcaaaataccaatgacattcttcacagaaatagaaaaaaaaaaaccttaaattagtatggaaccacaaaagaccccaaatagccaaagcaatactgagcaaaaataacagagcagggagcatcatactacctgacttcaaaatataccacaaagctatagtaaccaacacagcataatggtataaaaacagacatatagaccaacataacaagagaatccagaaataaatccatatatttacagccaactgattttcagcaaaggtgccaagaatacacactggggaaaggacactctcttcaataaatggtgctgggaaaactagatatccaaatgcagaaaaatgaaactaggctcttatctcctaccatatacaaaaattaattcaaaattggataaagatttaaataaatgcaagacctgaaactataaaactactagaagaacacataggggaaatgcttcaggatgttggtctaggcaaagattttttgggtaagacttcaaaagcacagacaacaaaaaataggcaaatggaactatatcaaactaaaaagcttctgcacagcaaaggaaacaatgaagtgggtgaagagaaaacctgtagaatgggagaaaatatttgcaaactatacatccagcaagagactaatatccagaatctacaaagaattcaaataactcaaaagcaaaaaactgaataatctgatgtaaaatgggcaaatgatttgaatagacatttctctaaaaaaaaagacacaagtggccaataagtatatgaaaaaaattcaacatcactaatcatcagggaaatacaaaccaaaaccacagagatcagagacctttttagcctagaatggcttaaaaagagaaaaaaaaaaaaaacaaatgctagtgagattgtaaaggaaagagaactctgacatactgttggtgatcatgtaaattagtacagctatatgaaaaacagtatggaggtttctcaaataactaaaaatagaactaccgtatgacccagaaatcccaatactgggtatttatccaaaggaaaggaattcaggttatcaaagagagatctgcacttctgtggttattgcagcactagtcacaatagccaagatatagaatcaaccaaaatttttataaaaagatgaatggataaggaaaatgtgatgtatatatgcaatggaatactatttagctacaaaaaaataaaattctctcattcactttaacatgaatggaactggaagaagttaagtgaaatatcgggcacagaaaaccaagtaccacatgttctcactcatgtgggagataaaaaaaattgacatcatagaagtagagaatggaattgtggtgatcaagagtctgataaggggaggagaggatctggagaagttggctaatggatacaaaattacagctagagaggaggtatgagttctagtgttctatagcagtgtaggatgactatagttaatgatatatcgtatgttttcaacaagctggaagagtggatttggaaagttccctacacaaagaaatgagaaatgtttgaggtgataagcatgctaatttccctgatttgatcattacatactatatacatgtactgaactatcactctgtatctcataaatatgtacaattattacatgtcaactaaaaagaggagaaaaggtgatcacaaagggtgtacatttgtgggcgtgcgtgtgcgaaatgggttactaaaatccactgaagtcaggagctattcaccaaaagctgaaaatgtcaacattctttttaagaaaccattttcatgcctccagcctttgaaggactcaaggccactgacttatgctaaggacagaaaagacactgtgttatttaggcctgatttttaaacaatgcattatagtgatggcagagtgcagggtgtggggagtgggagggacaggaaaatgtatgtgcacatttgtggatgtgaacatgtgtgtgttcatgtgtgtttgtgctgactgtggaggtttgcataaatatacttcacaacccaaccaaggactcctacctccaagatccttttccttaaccgagacatgcttgccctactgtgagtcccaggttgttccaagcatgtgtgagataacctatcccacatgagaaggtcaggtctggctctcagttctgtacaccacttcacaaggtcactagtcttgtcattttcttaactttctccttctgtcttccctcagcaggcaactcatatctgggcacatgatagatgtctatccccttgccagaatgatttaaaaaaaaagaaaggcaagttctttgtttaaactaccgaagctctgagaactgcctatcagaagccatggctgtggagggtattcattatcaccaaagaaatctttgagttctgagctataagggcataaaagacactggccttggcatcacacaagccaacagacctggggagagaatacaacctctacacagaaggatccaattaaacacagcatacagtcccatgctgggtactgcagacaaaaagacggttatgacttgtctcttgagaggtctgctatctgatggcagagacagacttttaaacaactaaccataaagcagaaggataagtgctgcttttatagaaggttatatataaagtcttatgaacatataaaaaggaggccaagtcattctatctgctctgcttaaggcatatatctcagagaaagggacatttgaattagactttgcagacaaataggagtttgctaggtgagaagcagcaggagagagttttaggcagagagaactgaaagaagtagaaacatgaaaaatgcatggtgcttggaaagtaaggagcagcttaatgtggctgaagctgaggatacgtggatggctggatatagaaggtaagaaatgaaactacataacaataacaatgaacacttactgagtacttaccacatgtcagatatcatacaaagtgctttacatattcatttactctttataagatacatgtgatataggtactgtttgccttattttactgttggagaaattgaggtacagtcaatgagtgctcaggaaagaaacattcccaaggtcacataagataaatggtagagctgggacatgacctcagacagcccgacaccagaccctgtgcctatcaccgttaggctgttggatgtgcatattgtagttctgcaagttgatcatgacaaaggttaggttgatgtggcttcagggagaaggtggcatcagaaagaggtaaatgaagtggatgtgggtaggctggagtaagaggagatgagtagacatcccaggcatggaggaaagccatgatcaaagccgtatgtgtgggaacgaggatgtggagtgagccattcatgcggcccattagtctgctcagtggcctggtgcttcttggcaaagcc

SEQ ID NO: 8377 - DNA, 6000 bp, Homo sapiens
gggagagaccagggacagagacaaagaagggaggacacagggtcagatgggccagtgctgtcgatactgttagaggaagactgcgctggagtcgcggggccccagatgcagccatggaggggactgggggcaggcagccagccagctgtgcaggccatgctggggcagaagtgctcacggctgctcagctgtctgctgtgagataatggtaactccagttgatttgttgagatctgcccaccatgttggtcccatgaatcccctacttcctgacaaggatcctgactaagggttagtgctgtcactgcaccacagagacacaggcttgtgggggctgagtaattggtccgaggtgctcagctctcatcaaggccatgctcaaaactgagctctctgattccagggagccagctttccctagggtaccacacacctctcctccaggtgacaggatccaaactgctgagcctctgagccagcaggaatggatgaggggtgtgggccctgcacaggatgcttgagtatcacatgccacatccccccggtccccctctccactcccgttactgctgcaggcacaccccagcagcaccttgccaggtatctgcactgaggatccctcgtttcctgcccagtccgctcactgcttagcctcctttgcacaagagccagggagagaataccccaactggcaacccttaaccaacagggaaggatgaaaggaggacgaacacccacctttgccagccctccagtggaaagctctgaggtgccttctgcaaggctcatcagagggtcccagcaggatcaaggccccctcccacaccagtggccaactccgtcacaaaccctcatatttaccggctttcctgccttctctgttttgagcttcccaggctcctgctctgtttccctggaatcacttccccagttgaaccacctgcatgcaggccgggtctcaagctctgctttcaggccccagacagggctctcctggtgcccagcaccaggggagctaatgatcttctctctcccacttctgttttcccccaggacacagagttctgctctgatctattgtttgctggattcaagagccaccacattccccgggggggccaaaccattcttgtttatccagtaacaattaattctcagccatgatttctagtcttgaaccacacaaacaaaaagttgccttcagcaaagaggcatcccatccaggcagatgctggattgaggttggggggggtcaggatgccctccaagcttcgacctaagtctatgattctgtcttccttttaggacaagccacaggggcaagtcacccatgcagccatttgaggtcctgagttgtgtgtgtatagatttcctgtatcatttgattataaaagcgaagcatgccagttgtccaggttacatcaatacaaaatgtatagcttggaaagtgaaaacagctcccccataatcccacccttttcactcgagggtggatatttttcattgccctgggaccaggacattctcagtatcagggaatgaggccagctggtcccttcaaggacagccagtgcctttataaagtaccatttcttcttagggagacttccattcattcaatgactattttttgagtatctactaggtgccaggtactggggaagccactgtgagtgagatggatgaggccctcgcggcattttccctgatctcctctgtggcaggatgtcaagcagctctcttgcccaggaatattcacccagatgcttctggctccccgggagtcctcgcaagggcctactgctgtcccactgcgtttcccatatccacagggaaaggccgtgccagaaccctgaacgcggagcagggatgggaatgtgctgtgctcttcctgcggctgggcctttgcagggaggctccagccacctggaacgcctgcctttcaggcccatcagatccttccctcttgccctgaaaggccctgtctctgatcacctcagccagaagtcacccccaactgtaacctgtgtacacctgagggtctgcctcatgagtcaacatggtgccttggcagaactataaggctcctctggtttccccagtgcccgctgaacaggggcccacagaggagagatagggatggtggaagaacagggagtgggacagtgaagccagcaggcaggggctggagaggcagggatcaatttgttgttgttctttttatatgagggtgcctctgtgtggaactctctcccttcatggggtgggaggctggggcatgagtggtggcagagggcccagcagagaaccctctcagcttaggagctgggcatggccttgcggacagggtgccacactgagaatcacagggctggcatgtatgccaaggaaggggaagggacccacagagggtgcaacatggtgtctcttgtgccaaagcaggaccaagcacaagatttatcagccttttaaaaaacattagcacatctctcccccaacccccacttttttttgagatagggtctcattctgttgcccaggctggagtgcagtggtacgatcttggctcactgcaacctctgcctcctagggtcaggcgattctcccacctcagtctcctgagcagctgggacttcaggcacccgccaccacgctcggctaatttttgtattttttggtagagacagggttttgccatgtcagccaggctggtctcgaactcctgacctcaagtgatctgcctgcctcggcctcccaaagagctgggattacaggcatgagccactgcgccttgccgtacattacatctccctttgtaaaacataaaagtcatgtcctctttaacatcatgtgacaattcaaaataaatgtttaaacctccagcaaagtccaggcatgatggctcacacctgtattcccaacactttgggaggctgaggcaggcagatcacttgaggtcaggagttcgagaccaacctggccaacatgatgaaaccctgtctctactaaaaatacaaaatttagccaggcatggtggcaggtgcctataatcccagctacttgggaggctgaggcaggagaactgcttgaacccaggaggcggaggttgcagtgagctgagatggccactgcactccagcctgggcgacagagtgagactctgtctcataaataaataaataaatgccttcctttttaaaaaacaaaaacaaaaaacaaaccacaaataactccctccaaaaaaaatcccccccaaaacccaaaaacctccagcaaattaaaacaatggggcagcccagagcagtggctcatccctgtaatcccagcactttgggaggctgaggtgggcggatcacttgaggtcaggagttcaagaccagcctagccaacatagtgaaaccccatctactaaaaatacaaaaattaccccgggcttggtggtgtgtgcctgcaatcccaggtattcaggaggctgaggcaggagaattgcgtgaacctgggtggtggaggttgcagtgagctgagatcacaacactgcactccagcctgggtgacagagtgagactcagtctcgaaaaaataaaaaatagaaataaaataaaacaatggggcaaagttttgctttatttaaattaccaaactcctatatctgatgttaggtcccctacctttggaatcaaagccctgcgaagtatgggctgaaggtggcgccttttcagacagagtgtgagggaacggtagaaacagcagtggcaggatcgattctctaatggatccattccccgagggatgcaaggtgatgcctgaggttctggaaggggtgcccgcggataactctcaggggcatggggtggcagctccatccagggtctggatagccaagtttctctcccctctgttcattccttcagctctccccaggggagatgaccccctattgctgctggctgtcctcagcacttaccttcccacacatgcttttgtcccttttgtcccaaaacattctatctctttcctcttcctttatttaaattcccaaagcctgtagttgatcttagcacggtgttctgtcaaatgcaaggaaaataatttatactatggtgtaagagactgataggtttaactattcaaaggagcattcgcatctttaagggacagtttgtgaactcaaacacatctcaaacgggtagaatgtgcacgggaaatctcttcgaagcagggtctcaggaactcttccagttccacgtgtgtagtgcccaccgggccaccgccacccgcctcctgggagcaggacagggctccgctgccgagcccctctgcggaaagctcaggcccggcgctccggagtctgggctcccggggtgggcggggatacttaggccccacgtgccccgcggcggagcggtccccaaacctgagccctggcctctgccggcccggaaggaagccgcggcggaggagggggcggcggggtgccccgagcgcgcctcacctgcgggcgggcgcgtcccgggcttccatcctcctagaccgggcctcctcgctggaaggggtggattcgccccagccctgccgcccaccgcccaccgcccacgcccgcgcccgcgcccgcgcttccacgcagccatcgccccagcccgccgcccgcgccggatcgggggccgcccgggcccctccacctctcgcccgcgcgggtcctgggaccgccgcccggcgcctccctcgccgccccactccggaacgcgccgccgagagggcggagactggggcgagggaggggccgccccgcccgcctcccgcctcccgcctcccgcctcccggggcctggagcgcgcgtggccccggagccgccggcgccgcgcggggaatagctgtgcagcacgccgagcccggactcggctggctcggctcggcgcgggcgggcgagaggatgctggcgggcttccccgggctcggcccgcgctcccgccggggagggccccgcgcgcgcccctagcagccgccgccgccgcgggtgcaggggaggggtccggagagccgcgctcgccgccgcccgcgcctgccggcccccgcacggcccctgcccctgagcctcagccccagggcgggcgcgctgggccggcgcccacggatctcccagccctcgtcgccgcctcctccttccccctgcggccgggcgcccgcggatgctgaggggcagccctgcgcctctcccggtcggatcccgggcctgacggcgggagatcgcgctccggccgggccccgaggcgctgccggggcggcgcggctctgcggggagcagccctcgggcgcgccgagctctcccgccccagcccgcgcggggaccgtcccggagcacgcggtggccgagttcccgcacaggtaaacgcaggggcagggccaggcttccgggggggaagacagcgccccgagcgtgggaagggggccggatcggagcccgagcctccaagggtttggtggaaaaaggaagtaaacagaaggaaggctcaggaatcccccacgatggtcctgatttctttccggcacattttatttacagcttctaaggactgggcctggagggaatttaggtgaggaagtcggggactgagaaagaagagatgacagagagaaaccggttaccagggatggaaaggcggctaggcccttccacaagccagggacaggaaattgagtgtctggcgtggacaggactaagtgtgcctgcggtgggcggtggtgtgagccgggggtggcagggaaggccctgggttgggaggctcttgcagcagagatccttttatgagggttagggcgggtcatggggaaaccgcaaggtaggagggaagaggtgcttctactcagcaatgcccttttcagttctagctgatcagtgctacctgtgctctggaaacccgctctgcgttcctgctggaggtggcctcccctccgccccagacaagaagaggccctcagccctcccccggtctcagagagccc

SEQ ID NO: 8378 - DNA, 6000 bp, Homo sapiens; identical to SEQ ID NO: 920

SEQ ID NO: 8379 - DNA, 6000 bp, Homo sapiens
ctaaccaatatggtgaaaccctgtctctattaaaaatacaaaaattagctgggcattgtggtgtgcacctgtaatcccaactactcgggaggctgagacaggagaattgcttgaacccaggaggcggaggttgcagtgaaccgagatcgcaacactgcactccagcctgggcgacagagtgagactccatctcaaaaaagagaacagtcaggctatgttggatttgaatcccagccctcccacctcctggctctgtgccttgagcctcagtttacccatctgtaaaaaggggctgttaatagtacctacctcatagacttagaaggagaattgcattgtaggctattatgtattattaccatgtattatcatctatatagaaattatatatttatatttatgtatttacattgatatccattacatatcatttcatatatatatactatacatattacatatgtgtatatattttatatatatatatggtacgtacctgggtgtggtgccatgcacctgtagtcccagctactggggaggctgaggcatgaggctagctggaacccaagaattcaaggctgcagtgagctatgattgcaccactgcactccagactaggcaacagagtaagaccccatttctaaaaaacaatttttttaaataagcaggtaaagtacttagagcagtgagtgctggctcttctcagctacacgttaaaggaagcctggcctagcccacagcatgcagggacctgggccacttagttcaacatggcctggtgagaatgagccctgacagcccttctgttcttgtcccacagtgaagccctcagtgagctgccactgagtcgggagcccagaggaacggcgtgaagccactggaccctctcccgggacctcctgctggctcctcctgcccagcttcctatgcaaggctttgtgttttcaggaaagggcctagcttctgtgtggcccacagagttcactgcctgtgagacttagcaccaagtgctgaggctggaagaaaaacgcacaccagacgggcaacaaacagtctgggtccccagctcgctcttggtacttgggaccccagtgcctcgttgagggcgccattctgaagaaaggaactgcagcgccgatttgagggtggagatatagataataataatattaataataataatggccacatggatcgaacactcatgatgtgccaagtgctgtgctaagtgctttacgaacattcgtcatatcaggatgacctcgagagctgaggctctagccacctaaaaccacgtgcccaaacccaccagtttaaaacggtgtgtgttcggaggggtgaaagcattaagaagcccagtgccctcctggagtgagacaagggctcggccttaaggagctgaagagtctgggtagcttgtttagggtacaagaagcctgttctgtccagcttcagtgacacaagctgctttagctaaagtcccgcgggttccggcatggctaggctgagagcagggatctacctggcttctcagttctttggttggaaggagcaggaaatcagctcctattctccagtggagagatctggcctcagcttgggctagagatgccaaggcctgtgccaggttccctgtgccctcctcgaggtgggcagccatcaccagccacagttaagccaagccccccaacatgtattccatcgtgctggtagaagagtctttgctgttgctcccgaaagccgtgctctccagcctggctgccagggagggtgggcctcttggttccaggctcttgaaatagtgcagccttttcttcctatctctgtggctttcagctctgcttccttggttattaggagaatagatgggtgatgtctttccttatgttgctttttcaacatagcagaattaatgtagggagctaaatccagtggtgtgtgtgaatgcagaagggaatgcaccccacattcccatgatggaagtctgcgtaaccaataaattgtgcctttctcactcagctgtgtgtgtggcgtttttcctgacattcggagccatagatatccttctagatggcagggcctgcacagggcacaactgaggcagttaagggttcatggtggtgatggatggtgttgccctgaccagatgggacaccatagagccagtttgaagctggtcctggactaggaacaggagtaaaccgcaccccttccttccttccacccacacatcttcctggcactccaagcaccctgcggccacccagaggccacgagcatcccctccaaacctgctgtcctgcagcccacaagttcctcccagcttttataagttttcaccacttaagctgcagtgacaaaaaaaacacgtcaacactccccaggtcatgggttcccaggtcagggagtagacccccgcccagaggcacagtgcgggccacttccacggcgcctctgccccaccttgggctgcctggcctctgcttctgctcacagacaccaggcctgggctccaggcagggcctggagccgtgtctttggcagcctccaagcaaaccattcactcccaagcctcagtggcacctggagcccagcaggggcaggactgagtgcctgctgggaccatggctccctacccccactcaggtgtccccgccctgcaggctcactgcctggtgtccgtgtagaacctgacctaagtcccaggccccagcctctgattcaacagaccaagggccacggtggagagagagctggagacacccagacattctttagtctcccagcccccatcaccagagctgaggacccaggcatggatgcccatggtccctggggaacccactggctgctggggtgggctggcctgctacacaagtgccatcatctgctcacccacagggagaatgtcaagcccaaggccccatgcccacttaggatggatgtctaggcactccccagcatttctgtgggttcccaggagatacgggtaggagagcaactgtttggggcatacatcatgctccccgtcacctgctctgggttccagtcactcaagcaaatgcagtgcccccaccacagtcaaacccagggctgctgtgaggacctggctttgattgcacgtggtcggacagctgaggcccacctggtgctcagaacaggaaacgctgtggaatgcaagaattttcatccttgccttttccatctctctaccctgcacccaccccgagaggtcccggaccactttctccctaggctttttgctgccgtgatcatctgggttccaccttgaccaggtctctctcctgtctctcctttcctgacaattctaggcattccaaacacccaggttcccccttctggcagagggggaacccagacatccccacctccttatcacctacataattcacctccaagtaattcacctacaccaggctccctaatcaagaaggcaggtcaattagccagctctcatcaaagtgctccattcctaggatgaatttcaccgccccctgagattgcagatgctgctacagtcactgttccttttcagaggtaatttttttccttctctgcttgatgctatgaaggctggttgagagcagcagagtttgtgccgacaggaaggtgttaccctcatgatggacagtctctagcagcgctcttcccagtgcctccaccgcagccccccccccacccccccgcagcctggagggcagcgcctgcagccagtgccacctgcagggacagagtcagccacgggctcctcctccttcctgcatttccattctttttccacaccattttccccacccggataggagagaaattagtgagtcattcagaaaagctctctcccacagctaccttccctggttccagcctaccaggttctcatctttgcatgtccttaaaatagctcctttctcttggcaaacaaatttccatggagacccagctatgggaaggcccagaagctttctgcaaggcagcaaactcagctcccagccttcactctgacagagaccctttataatgcaaatgtgtgttctcacccccacagacactgccacccacgaaggtcccattttgggaaatctgaaccacccagggaacgcactgggaggttgagtctaggtataggcaatctagtttcttgttattttctgacgggctggctggcctgcactggtgagttctctctcaggtcacagcagaccgaaccactaggcttaccagtgactaatctcacagcaggcatacccagctcatgctcttcctccatgcacttggccacacatgttgatggcgtgcactgggccttgggggtcagtgcttctattgaggtaggccatgggtgggagggatcctggactatgggaacagatagaatggggcttaaatgtcttttatttcctaaaactataatcttgcacaggtttcttagcttttctgagcctcaatctcctcatctgtacaatggaaagaaggctacctggtgtggttgtcgaagattcactgagctcatctctgcaaagcccctggctcggcgcctggccctgctgtaggggttcagtgagtgttatcccgttccctcatccttcgagacaaggcagtgagggagggcaccgtgcacagcatcggaaaagaagcaaatagaagagctttggggatgcaggaacgtccaaagcagaggtaaaggcaagagcacaaattcataaacaaggcaggccatccagggggcaagtcaaggctgtgaaaagccatgaagagcagggagatagatcaggctaaggcatggataactgaggccaggaggaactagatgaggccaggtgggctatttgaggctaaggaggagctagttgaggtcaaggagaggcgaggttagttgaggccaggaagactagtttgaagccagaggtgcaggtggattctctagctacacagagcacagctgctcagatgacctgagccaatgggagcagacccagcggacgcataggaacacttcatggggcagtgctgggcagtgtttctggccaccagggacatgtaggcaggtccagtcaccacaaagcagttttgtgccccacggcggttctggacgcacctgtccctgcgagattcggctcctgcacttgtctctccctccttccgctttttcttcctccttccctaaccatgtcaatgacttgcagtcctgcctcattctgcagggaatggggagccttggggactccggagcacacaatgacgtgcttgcttagcatttaggaaggtcgagaatagggtaaggccagcaagtctcgggggtgcaaaaggtaaccgacactcactctccagtgctcaccctgaacttgcaccacctcagatttaaacatcccccccacccatccctgccttgcctccccttcatccaagccctgcagagcaggcagaaaagtgaaagttagattccagaaggagccgaattcctgtggctgaaaggtggcaacgctccaacccgcagccctggcagggccttggaagaaggaagggctggaggtgcaggcggaagaggctgtcctctgtatcatgtggaatcctgttttagtgcacgggctataaattgaatttccaggccttatttagagtacatccccagaaatggtttgtcctgcttctgctatttttaaaaagcactctgtttaggtagtagttgagagcacagacttgggagccaaactgcttaaacacatcaaaaatgtgccaggctgtgaccattgtgcagaagaaggcaacatgcccagcttccagaagaggccgatgcacaggccagcagttacagtgccaggtggtaaggggtatgcagacaaaagcccccggccatgaatttcctttcgggattagctgggaaatgtttcatgatttagtgttagtattcagaatgataaccagactggtgctgaggatcttggactctggggtcagaacacttgggttcagcccccagcc

SEQ ID NO: 8380 - DNA, 6000 bp, Homo sapiens
caaatggttttggaacaaatgtgtagccatatgcaactacaacagtaacagcaaaatcaaccttgaccttcttatctcatgccacacaagaattaactagcaattaatcacagacttaatgacaagagctaaaactaaaatttctagatgataacagtggaggaaatctttgtgaccttgagttaggcaacactcaggtaagatacagaaaacataagaataagtaccataaaagaaattactggtgaattcgatttaataaaaattagaaacttctactcttcaagagaaactgtcaagaaaattaaaagtcaagccttaggcaacacatatctgataaataactcatacttataagaaacaacttttacaactcagtaacaaaaagcagaaataggtaaaatattgcaaaattgaatgagcatttcactaaggaagatatacaaatggcaaataaacgctaatgttcaaagttattggcctttaaggaagcacaaattataattttgctcactagaatgcctaaagttacaaaaactggcattgcctgttgtcagcgagaatgtggagcaatggatctttcacacattgctcatgggaatgtaaaaaggtccaaaccttttaggaaacactatggcagtttcttgtaaagttgaacattacactatatactggtcttatgatccagtaattctattcctcagcatttacccaaaataaataaaaacatagccaggcacggtggctcatgcccgtaatcccagcacttttggaggccaaggcgggcagatcatttgaggtcaggagtttgagaccagcctggccaacatggtgaaaccctgtctctactaaaattacaaaaattagccaggtgtggtggtgggtgcttgtaatcccagctacttgggaggctgaggcagaagattggcttgaacccgggaggcggaggttgtggtgagctgagactgtgccactgcactccagcctgggtgacagagtgagagactctgtctcaaaaaataaataaatagctgggcgcggtggctcacgcctgtaattccagcactttgagaggctgaggagggcagatcacaaggtcaggagttcaagacgagcctgaccaacatggttgaaacctggtctctataaaaatacaaaaactagctgggtgtggtggcatgtccctgtaatcccagctactccagaggctgaggcaggagaatcgcctgaacccgggaggtggaggttgcagcgagccaagatcgcatcactgcaatgggtgagcctgggtgacagagtgagactctgtctcaaaaaaaataaaaaataaaaataaataataaaaacgtatgtccacacaaaaacctatctgtacataaatgttcacgagacccattattcataatagtccaaaactggaaacaccccaaaacacctcccaagtagctgggattacaggagtgcactaccatgcccagctaattttttttatttttattattttttgagatggagtctcgctctgtctcccaggctggagtgcagtggcatgagcttggctcactgaaaccccgtctctactaaaaatacaaaaaaattagctgggcacggtgatgtgcgcctgtagtcccagctactcggaaactgaggaaggagaattgtttgaacctggaggcagaggttgcagtgagccaagatcatgccactgcactccagcctgggtgacagagtgagaccctgtcacaaaaaaaaaaaaaaaaaaaaaaaaaaaggaaagaaaaaagaaagctaccattataaggatgaatgtacaaatatatgatgcagactgggctggatcagtgtctcctggtctgagggtggtggtagggggatggaggctggagctgggcctcaaagacaggagggagaaactgtccagaatgaggtgctcacggtctgtagtgagggaaccctcggcagtgctgatcggctggagcacagagcctgatttggaaatactaagatagcaaaaagattggaaatatattttgagcataaactgtagcttagacttctatactaagatattggcatttgttctctttataatgagaagccattgatagctttagaggtgtgaaatgagtgttttgaggttaacagtctgacagattgtgcagggtcagtgggttttatgttaaagtgacacattcagaatggttttatacacaagcctagatgtgaataaagcaaattccttaaggtatgatacattttgtgtctttcccacctatattggcatgcgtttctctgatatgtgtactcagagtccctgacccagcacccaaagtcatgatgaatctttcctggctttttatcaggccttgccatgagagtgaccattaaaggtcagagagccatacggcctctcccagggatactgggctggcctgggaattgaggaattcactctgcatccaagaaccacatttccccagctgtaagatggcagagaataatgtttgtgtcccaatgaagttctaacacacagtgttctcagatgacgggcagcattttgaaagtaacatgtgactgtgtaatttatgctctttgaatttgcagtgagactatttgtggcagtacaatgtctatccatgctcctaattagaagttttccagaacagctcatgtgtctgaattagaaatatttgtcacggggcattaaatgcggtatttagctgttaggtgattttttcaatagaactttgttaaagaccagatataatgtgtcattgtttcttttgtgattctggattctttttgagaactaaatgtttaagcagtaaagagctgagacaccctatgggtaagatcctttataaatcagcccattacaccgtgaattcacttacattgttggtcaatgacgtcatgtaaggatcagattatgcttttctgtttgggtgtgttttgtgttgatttgtcaagcctggagggttggccaccaggaagaagttgaaatggtcactgaaatcccctggctgtgattgtcacaaacttgggtctgagatacacagaaacacttgcctgtcatcaggctgaagctttcagctcagactgtaccagtgcctgttggaaacataaatgaaagcatttttacaagtcatcaacaaaatatccaatagcctaataaaaagatgggcaaaagactcgaacagacatttctccaaagatgatatcctaatagccaatgaggacacatgaaaagatgctcaacttccccaatttcattagagaaatgcaaatcaaaaccacactgagctatcacctcacactcattgggatggctaccatcaaaatacaaaacaaaacaaaacaaaaaacggaaaataacaagtgttgatgaggatgttgcaaaattgaagcccccgtgcactgttagtgggattgtaaaatggggtaactgctatagaaaacagtatgaacagtcctcaaaaaattaaaaatagaactaccatatggcacagcaatctcacttttgaatatatatccaaaagaattgaaagcagcatctcaaagaaatatttgcacactcatgttcatagcagtgttattcacaatagccaaaagatggaagcaaaccaagtgtttgactgataaacggataaacaaaatgtagtatatacatacaatggaatattatccagccttaaaaaggaaaggccagacacagtggctcatgcctatgattctagcactttgggatgccaaggcaggaggactgcctgaggccaggagtttgagaccagcctgggcaacatagtgacagccccccatctctgcaaaaaacaaaaattagctggatgtggtggtgcatgcctgtagtcccagctacttaggaggctgaggcaggaggatggcttgagcccaggagttcaagactacagtgagctatgattgtgccactgcactccagcctaggcaacagagcaagatcttgtttttaagaaaaaaataaaaaggaaagaaatcctgtcacatgctacaacatgtatgaaccttgaagacattgtgctaagtgaaataagccaatcacaaaagacaaatgctataggattgcacttatatatctacagtcgtcaattcatagaaacaaagtagaatgttggttaccctgggctgaggggaggcaagggggagttgtttaaaggatatatacagtttcagatttgcaagatgaaaaacttctggagattggtttcacagcaatgtgaatatacttaacacactgaaccatttaattaaaaatgattaagatgataaattttatatgtttctactacaataaaaattgcacaatagataattgcattaatagcccaatttgtagcctcctgtatttatgtcctttgccttataacttcttagtcccttcacacactgcctctgggcttggcacataaagtacagtcaaaaacaagctatgtaacttctgaggctaggtcacaaaaagggtattgtttctgccttgcctgctttctcaactgggacactaacatttggtaccaagccagcatgctatgaagacgcccacagtagccaacatggagactacattgaagcagtacaggtattgagaacagagatgcccccagccccactccccacccagctggctgccagcatcagctgcaccaaggaagatgtatggatggcaaataagcacatgaaaagatactcatcaccattagtctttacagaagtacaaattaaaaccacaatgagacactgctacttacctactagaatcactgaaattaaacagacaacagagcaagtgctggcaagaatgtggaagaattcacactctcatacaccaatgaaggcaacccaaaatggtactgtcaccggtagagggacgtgactgcaaattgtccaggttcttggcgttttgaacaaagaattggacaaaacacgcagcaaagaaagaatgaagcaacaaaagaacgaaagcagctctctcggctttcggctcggaggaggccaaggtgcaactttcttcggtcgtctcgaatccgggttcatccgacaccagccgcctccaccatgccgccgaagttccaccccaatgagatcaaagtcgtatacttcacgtgcactggagttgaagtcggtgccacttctgctctggcccccaagattggccccgcgggtctgtctccaaaagaggttggtgatgacattgccaaggtaacgggtgactggaagggcctgaggattacagtgaaactgaccattcagaacagacaggcccagattgaagtggtaccttctgcctccgccctgatcatcaaaaggaactaccaagagacagaaagaaacagaaaaacattaaacacagggggaatatcactttttatgagatcgtcaacattgctcgacagatgcagcactgatccttagccagagaactctctggaaccattaaagagatcctggggactgcccagtctgtgggctgtaatgttgatggccgccaccctcaggacatcatagatgacatctacagtggtgctgtggaatgaccagccagttaagcacaaaggaaaatatttcaataaaggatcatttgacaactggttaaaaaagaacgaaagcagggatttattgaaaatgaaagtacactccacagtgcgagagcgtgctgagcagtggctcaagggccccggatacagaatcttcttgggtccaaataccctctagaagtttcccattggctacttcatgcccacctcaggtaaatgaagtggtagcccacaatcagtctgattgattgcagaaagcagccaaccagaggatgacgtggttacaaaagtgacactcctgtgcaaacgtatgattggttgcagaaagcaaccaatcagaggctagggtgaagttacaaatttatacttctatgcaaacgaagactccgcccgcaatcagtctgattggttgtggacagcaaccaaccattcg

SEQ ID NO: 8381 - DNA, 6000 bp, Homo sapiens
agacattactctcttgtctgccacattttgcagatattttccttaacacatcattttcttcttcagttttttcgcagcctattttatttcataaacctgtttttcctctgtggcttcctccactgctcttatacttaggaagtgttttttccttatgctaaatttgataaaaatttatctttttaaaaaattctgttttgagttttcttatggtttttggtacaagatagaaagtgaagattaatttcttcccaaatataatggttagtgtgcagtctccaccgatacctgtcatctacgtaatctttctcctagagagcaagaattcctcttactgcagttggtgttccttcatgtccagcctcaactcagaggtctcctacggtgtgcccgtgaatagcagaccacagcacttctgtgacacaagtagggtaacaaaagaaatctctggaaggtgactacctaacttcccaaaacaaaggctgatttttctcgtcgatagcacgcagaaggcttttttcaagagtagaaggggaagaaaggcctcttacatggctagctttcctctagtcacagcagcaattcttcagcagtcaaggagagaccatctccttttccaaacccacgttcaccattgcccaggattcaagcctaactgaggtcagggtggctgctgccctgacatatccctccctaagacacgccaccagctgccatcagtgtgatgcaagccacaaggtatccttaagctttctgctgccaaatgcatcaactaaagagaacacattacaaacttagcatagcactaacagactctagaaaatatttaactgtttgcaagattaggactgccagcaaccaaggtatgtagaaactgagtcaagaataaaatccaccagtgttaaagccaggaatacatataaacaacataagtttggcaaaactgtatctattgggagaaagtaaacagttgaaaaaagtatattaaatgcaagtttgctgtaacataaaaatgattaaaagtgagctagaagaacatcaaaaatgcttttaccttttagtgcactgtcattggccccaaagaaaattgtaactgctactgggatgtccaaactgtttcctttcctgattaatcttggaaggataattttggcccacctggtattgtaacctgaaaatccacgattcagaacatcacattttctgaaacgaaaaattttaaaaagatgaattgtgggcaagaagtgtttatggtcgcagtaaccggcctttagtgagggtgtgctctctgggattctaaacccgtcacgtgtctctgagccacccccaggtttcactttgataggagcaagaacatagctgaagcatgctaatcttaagccattcaaagatacaggtaaatacaccatactcctccgtgagagaagtaattatatataaaggggctgtgatgaagtctacagactacctgacttcaagcatggtatagtgaggtgcttttaaaatggagttcacaacagatagataatctgagcaagtatctcaggtaaaaagtcactaatatcctggaacttaaatagtttagtttggtttatatttaaacagtctatagaatatttgagatttctggttttgattaaatagttttagtaaatacattcgttgtgtttcaacttaaaccggttaatactttttgtttccttcttaaaaacagttggattcacagtactgtaggtgtaatgggggaaaaaaaaaaaaaagccgggttgcctggatttgtttctcggctccctgtgtgactaggcgtgaccctgggcacgctgtgctccttcctcacatgtaaagtgaggagaatcccagttaaggattcgcatcaggcagtaggtttgaaacccctcagagaataccagtcacataagagggactctttttttcttagtcttggtaaaatgatatgatttgggatttgcttcagaataatccataggagggatggatgggctcatttcactctttgcttctgtagatatttaaagttgtccataaagttttcttaaaatgacgcctggggttcaacttatgattagtaaatcaatatggttcattttgctgtattcacattcccatacatgcataaccaagcagagaagctggggcacccgcggagaactgcaggccacagcgtcaggcagcggctccaaagcagcacaaggggacactttctgacactgctcaaagttctcaggtggcatttataaactgcagaaccaccaccgaaactcagccttatttctaagagattgtttgtgtgtgtaatgattataaaatgcgactagccattttacagagtgaaatcacaatactttaatgaagtgctgggctgggtgtggtagcgagtgcctgttggtcccagctactcaggaggctgaggtgatgatgccttcagccccagaggtggaggctgcagtgagccctgatcacactgctgcactcaagcctgtgtgacagagttgtcaggcctctgagcccaagctaagccgtcataacctgttacctgcacgtatacatccaggtggcctggagcaactgaagaaccacaaaaggagtgaaacagccagttcctgccttaactgatgacattccaccattgtgatttgttcctgccccaccctaactaatcaatcgaccttgtggcattcctcccctggacaatgagtctcaggagctccccacagagcaccttgtgacccccttcccctgctaacaatagataaccacctttaactgtaattttccactacctacccaaatcctatagtactgccctacccatctccctttgctcttttcagactcagcccacttgcacccaagtgaataaacagccttgttgctcacacaaagcctgtttggtggtctcttcacgtggacgcgcctaacaagagaccctgtcgcaaaacaaaaaccaccaaaaaccaaaacaaagtgcggtagaattgtgacaaggtgagtcttaagtcatggcagcacttcaaaaaaaggcaaagtagcttcctaccagtgtggtgtagcagtgaaactgcaagttctgcagtcatagcagctggacttggatctgtctgcccctgactagggaagaggccttggccatttccttgatttgtctgagtctacccagccatcagtgctcaaccctaaaatatctaattggtcagactgagtgaagagtaaatgttttctgttccttctcctatatactgattaggggaggcaagcaaaattaataaaggaggaatgttctgttcagaactatccttcatccataagacggatccctaagacattttccatccataagaactcaagtatcggaaaccattctcacctgaccagcctgtcagccagcgatgctccccatccaccctgctggaaggaaaactggaggaagaaaagcccattattactactaatgactgtaaccgggcatctcagcgagggcagttctgattggcaacttctgttttctcggcgctcccttcttggctttgattgcttcactccaggaggtcattttggggattacaggtaagtacacctggcagcactttagcagagggggatttttctctatcaaaagctaaacagcctgtattcccagcactttgggaggccaaggcgggcggatcacatgaggtctcgagttcgagaccagcctggtcaacatggcgaaaccccgtctctactaaaattacaaaaattagcccggtgtggtggcgcacgtctataatcccagctactcgggaggctgaggcaggagaaacgcttgaatccgggaggcggagcttgcagtgagccgagatcgcgctactgcactccagtctgggcgacagagcgagactccgtctcaaaaaaagaaaaaaagaaaaaaaaaaaaaagctaaacagaaatctaagttcaggaaataaagtcaaaggtcagtgaggaaatgaaggccacaccgcctcactgctttgctggttaccgagctgagggtgaacactttttcatacacattcccatggaattcggcagctctgactgccccatatgcctaaacataatgttaccagttactggcgtatacacaaaagcctggtgaagcaagtcctgtctgagaagaggacacacacaggaatggaatttctactccctccccgaagtaagaacctgcatttagaagaccgttcccttcatgggaggtgagatgatcttggatgaacggatggtccttttctacctaattcctgaaggcgttttacttccaaggtcaacccctaacggccccacctgtgcccgcagggaatggggcgagagagctcctggcgcctctgcccggagctggccgcggggcctcctgggacacagcgcgcggtcgcccgcggccgctaacccggacccggaggggaaaggccgctgcccaggagggcgctgaggggaagaccgcgcatctcgacccgggtgggaggcggcgcggggcgggcagcgcggccgggtcccctcgcgtctgtgcctggagcccgggctctcgcggacgccgtcgtgacctccgggacgccgcgggcccggaaggcgcagccactgggggacccgccactcctccggtgtctccacgggcgtggccaggcctccggcccagccgtctcgggcgccgaagaggacggcgaggagcctcggcctgctcggcagcgaccccgcagggaggccggggcgggaggccgagcgtcggggcggccgtacctgggtgatggagtccccgaagagcaacaagcgaggccagagcagggcactcccgcagcccgcggcctcgcacagcgccatggagcagccgggcggggcggggcggggccgccagccacgagaggcgcctgcgcagtggccgcccgtgggttgcgggagccgggctcgtgggcacccacgcagtcactttggtgacgcgcgaaggtcgttgccccttggagtccgtttgcaagaagctcggcctccgcgcttgctcacccacagcaaggctgcccccagggagtccggagcccgcgtcccgctgcgtggttcccggaagaaaagcggttgggggcccttctaagcccaccccgcgctccgcgggcgcaggtgcgttcggcaaagggcaggagtgtgacctcaggacgcgcggcgggaagcacagctggctctcggtggggcggagggctgctccaggcccccctggaagaggtcgtgggatgcgcgcgcggcctcctgcgcccagcgtcactctggagggcctgtaacacccacgaggacgcaggcactgcggaaaccctggcagtacctcgtggttctgcgaatgacaagggaaagcagctgcaccttcagtgcgcgcgcagccggccgcttttctttttcccgccgtggggtggatgcgcagatgcagaaccccgcggacacggagcactgactaacttccaagggattcacctgttaaaacgtggttgtaatgcaacgttcttacctcaactgtgcaatgaagttcggcagccgagctaaaaacgaacgggtgggaaggatgccttgaaatcacggagctgtagatgagtaacagaagggccaggggcgccggcgcagaggccgaccccgctccctggggcggggcgatgggcgtagagcatgactttctttaggttgctcgtcccaagctcgcttggatcacctgggggagctttacaactaagatccaacctagggccctcattccagccggactaactcacctcctggtggcaggacttgggcacaggtgcacttgtgatgcaccccacgtgattcccacgggtagcccagattgagagcccctgctagagcaagcaaaggtgcctggacttcatctttatcacaaggacttcattaaggccttcaagcagcagaggcttgaggccaggtctgttccaggaatcagctataggggaggagatggaggtggttgcagg

SEQ ID NO: 8382 - DNA, 6000 bp, Homo sapiens
gccccgggctgagggagtaggaagaggggggagaagttggggagatgggagccccgggctgagggagtaggaagaggggggagaagttggggagatgggagccccgggctgagggagtaggaagaggggggagaagttggggagatgggagccccgggctgagggagtaggaagaggggggagaagttggggagatgggagccccgggctgagggagtaggaagaggggggagaacttggggagatgggagccccgggctgagtgagtaggaagaggggggagaacttggggagatgggagccccgggctgagggagtaggaagaggggggagaagttggggagatgggagccccgggctgagggagtaggaagaggggggagaagttggggagatgggagccccgggctgagggagtaggaagaggggggagaagttggggagatgggagccccgggctgagggagtaggaagaggggggagaagttggggagatgggagccccgggctgagggagtaggaagaggggggagaaggtggggagatgggagccccgggctgagggagtaggaagaggggggagaacttggggagatgggagccccgggctgagggagtaggaagaggggggagaacttggggagatgggagccccgggctgagggagtaggaagaggggggagaagttggggagatgggagccccgggctgagggagtaggaagaggggggagaagttggggagatgggagccccgggctgagggagtaggaagaggggggagaagttggggagatgggagccccgggctgagggagtaggaagaggggggagaagttggggagatgggagccccgggctgagggagtaggaagaggggggagaagttggggagatgggagccccgggctgagggagtaggaagaggggggagaacttggggagatgggagccccgggctgagggagtaggaagaggggggagaacttggggagatgggagccccgggctgagggagtaggaagaggggggagaacttggggagatgggagccccgggctgagggagtaggaagaggggggagaagttggggagatgggagccccgggctgagggagtaggaagaggggggagaagttggggagatgggagccccgggctgagggagtaggaagaggggggagaagttggggagatgggagccccgggctgagggagtaggaagaggggggagaagttggggagatgggagccccgggctgagggagtaggaagaggggggagaagttggggagatgggagccccgggctgagggagtaggaagaggggggagaagttggggagatgggagccccgggctgagggagtaggaagaggggggagaagttggggagatgggagccccgggctgagggagtaggaagaggggggagaagttggggagatgggagccccgggctgagggagtaggaagaggggggagaagttggggagatgggagccccgggctgagggagtaggaagaggggggagaagttggggagatgggagccccgggctgagggagtaggaagaggggggagaagttggggagatgggagccccgggctgagggagtaggaagaggggggagaagttggggagatgggagccccgggctgagggagtaggaagaggggggagaacttggggagagaagcagggagaagccaaggtagcagcggccccagaggaggggtcggcacgtccagggcgagtggcatgagggtgaggctcagccgggggtctcggggttgctggggaggggatcttgggaggggctgttgggggaggagtggggtcctgggggctgccctgcccagcctgacccatgtgcccttgtccctccaggagatggtaacctgcacctcaatgtgacggcggaggccttcagcccctcgctcctggctgccctggagccccacgtgtacgagtggacggccgggcagcagggcagcgtcagcgcggagcacggagtgggcttcaggaagagggacgtcctgggctacagcaagccaccgggggccctgcagctcatgcagcagctcaaggccctgctggaccccaagggcatcctcaacccctacaagacgctgcccagccaggcctgacggccactcctgctgctgccaaggcccactgggggtcggcgggtggctctcgggcgggggtgttgcggtggctctgagggatgagccggcagtgggcaggggaccaggcacctggttgaagggactgggagcccgcactggggaactgccggacgcaggccctcgggcaggagcatctggcagagtggggggcgtggcaggcaccctcctttgcagggcgaggtggggcctctgcagccatcctggacaggccggggtggcggcagctttgcccacgtggaagcggggtgggtctcacttgcgtggtggcccctggccccatcttgcctgctgcggcctggggagcaggcgctgggtggtggttctgcctgcttgctgctcgttccccgggcatgcgtgggcagcggggggcatgcgtgggcagcagggggcgtgggcagcgggggcacgggcaggaccacgtgggccgtgatcgtgggttgccgagaggacctgagcgctgcggctctgctgaatggagccgggtccctcaggccgtggacgccctcgggaggggggtgactgtggcttgtgtctggacaggaatgtgtcatttcccacatcttctagagggctgccagctgggaagacagttatcagggcaagctgtgctctgagtttcgggttctgctcctacaaagaacgtgcggtgctgcgggcgagggccccggcacggacaagggccactgcagagtgtgtttctgctcgtcagctgccctgggcagcggatgggctgggcgatgcagctggatgcacatctcattctgtcatgaatgtccagtaaaaatctgaattggttgcaaccttctctttgcttctgttactggaaaatcatctttcagagcccattgtgaagggcctgtgcatcccattcccacagcccctggaccactggggccatagtgtggccgggcctgacactactgtgactgtcactgtgcctcctgtccccatgcactgtctggtggcagctgagctcccaccggctgcacagggcaggcctggacatggaacgggcaactcataacccttggtggccctggaggccctcagcagctgggcctgaccgaggtgtatccacgggcccctcctgtccctgtgggtgtcgaggacctcggatcctgctcagagggggaaacatacctctgacccgctgccctgcagagcccgcctgcctagccagggcctctgtgtggacaggccacgtcctcctggtggaggtcctcgggggatgggtgggggccttggtccagcatgattttttttttttgagacaggatctcactctgtcacccaggctggagtgcaggggtatagtcacagctcagtgcagcctccacctcctgggctcaagtgatcctcccacctcagcctcctgagtagctgggagtacaggtgtgagccatcatgcccagataatttttttttttttttttgagacagagtcttgttctgtcacccaggctggagtgcagtggtgcgatcttggctcactgcaagttccgcctcccgggttcacgccattctccttcctcagcctcccgagtaactgggactacaggtgtccaccaccgtgcccggctaattttttgtatttttagtagagatggggtttcaccttcttagccaggatggtcttgatctcctgacctcatgatctgcccgcctcggcctcccaaagtgctgggatcacaggcatgagccaccgcacccggccatgcccagataatttttaaatttttttttttgtagagatgaggtgtccctgtgttgcccaggctggtcttgaactcctggcctccagcggcctcccacctcagcctcccaaagtgctgggattacaggcccgagcctctgcgtccagccgatccagcatgctttgaaggcacaaatcaggggcactttcatgctggcccagcagagccagtgggtcccgcccaatgcctgggctacttcctgctgtgcctgggggcacctggggctgtcctgcctcactggccaaggcccggctctgtccctgggctctggccactgttctgccatcccaggctgggtacccatgggcagcccgacagtatctgttgcacagagcagaccccaggccccatgggtgcctgacacgaagccccacagcgtgtgcccgcgtcccccgaggtcagccggcggctcctgcccttccctctgacctctggttgggggccggccatttttctgcttgttcctctagctctgctactgggcacatggtccgtgctgggtaggctgcaggccagggtgagttgctgacccgctgaccctggctgtgcacctgccctcctgccctgggtggctgctgctggcccaggggtgacttgggggctttcaagcttctgcccgtgctggccgcacgaccccacgtcccaccctgggtagggacttgtgattctcagagctggggtccgttgctttcctaaggacctccggccctggtcgtggtctaaatgctcactcctgttgttggagaggccagccgggtgacagggaaaagcccagagccccgggcttcccgtgaggatctgggctcagcatgggctgtggggctgcagaggcctggccttgcctgctgagggacacccgctggtagtgcctgcagaggggggaggaggaattcctccccctagtgccctctggaccctgggagagcaagacctctgcatccacactgccttccgctgggcctctggggactggggaagcggacacagtccaggactgttggaggaggaagaggctgcggctgctcttccctgggggtccggctccaggaggctgcggtgaccgttgggccggagcaggccagtgccgggcacgtcctgcccatgacagccctgctgccagccgtgggcacttgttcctggagctccgtggctgggtcctgccgtctccgctgctgccctgccctgccatgttcacctccagtttatccagcaatggggagaggggcttcttagatccccctcaggcttttcttttgtgcctttagatatgtgaaatacaacacagccaggcaaagcaggtgccggtgagacacctggctggcccgagctggcccgaagaactgcctgtctgccatgaggaaaacccacactgcgtggtggctgggaggccaggagttttcacaagccggaaacctgttagatttctctacctgacagcaggaaaatctgatgagacccgatcgcatccaggcaggccgtgttctcgcagcccgcgggttaacacagactccgagtgactccgacgcaggagaacgcggcgaatctgcgtgaggcaggccaccagccttggtgccccggagacagctcccccaacggccatgtgacggcgttgagtgtccgtggtcaggtgtgtgtaagagacgcgcagagaattccacgccgtcccaacctcccagccggaggctctgacgaggcctgcagccacgcggaaagagcaatgaggagcacgtgtgtggggaggaaggcgggttctggccccgttccttccgcagcagctccggcctggcgggttctgacggaattctgcagcggctccagccagggtcgtcggggcggggtgggtgctcaggggcggcctttgtgttcggattagaagctggtgattgtcacattaagacctctaagctgctgcaatctgagaagatgttacacaaccagggcccctgagctgaggccaaggagggggccaggagagtggtgggaggggccccaggcagggccagagctgcctgtgtacagcaggggagaggggagaaggggtgggccgggtggtc

SEQ ID NO: 8383 - DNA, 6000 bp, Homo sapiens
tgcctcaagctttgtttaggattgtcttggctatacaggttctttttttggttctacatgaattctaaagtagtgttttctaattctatgaagactgtcaatggtagtttaatggtaatagcattgaatctacaaattactttgggcagtatggcaattttcacggtgttggttatttctatctatgagcatggaatgtttttccatttgtttgtgtcctctttgatttccttgaccagtggtttgtagttctctttgaagaggtccttcacttcccttgttagctgtattcctaggtattttattctctttctagcaattgtgaatggaagttcatttatgatttggctctttgcttgtttattgttggtgtataggaatgcttctaatttttgcagattgattttgtatcctgagactttgctgaagttgcttatcagcttaatttgcatttaagctgagatgatggggttttctagatataggatcatgtcatctgcaaacagatggtttgacttcctctcttcccatttgaatacccttatttctttctcttgctgattgccctggccagaacttccaatactatgttgaataggagtggtaagagagggcaaccttgttttgtgctggttgtctttaattttttaggtgttctgtttataactgtctaacttctaacaatttcttttacattagtaatcagtataataatgtaagcattatgaggacaggaatttttgtctgctttgttcactgatgtattctcagtgcttaaatagtgtcagcacatagtaggtacacaataaatatttgttaaataaaaactgtattagtccattatgctgctatgaagaaatacctgagactgggtaatttataaagaaaacaggtttaattgactcgcagttctgcatggccaaggagacctcaggaaacttataatcatggcagaaggcatctcttcacagggtggcaggagagagaatgaaagccaggcaaagggggaaaccccttataaaaccattagttcttgtgagaactcactcactattaagagaacagcatggaggaaactgccgatgattcaattatctttgcctgatcccacccttgacatgtggggattattagaattcaaggtgagatttgggtagggacacagagcgaaatcatatcaaatacatttaaaaattgtctccaaatcgattattttttttttaaaaagaagtgttttgcaacctagagtgcagttgttagtaaaagtaatttaaataggagagacgttttctttctgaatgagttttttttcttttctaaaaatttgatacacaatatttgatgtttggacatttttggttgtttcaacatatagttttcaaaataaagaagaaacaatatttattttaggtaactataatgttacctaaaagaaagttagggactctgcttccttcttatttatgtgcctctcccattgttacattgtttgcagataagaaaaatacagaaattacatttccccctgcttttcccaacttttcagcttcactgattattctttctccccctttcctcattccagtgcccacttatgccttctcttttctgatcgtgtgcttccccctccatacaatcaaaatgcatttgacatgaatgatgaaaaatataactaagggggtgagggtgggtcaggtacctggggacctgaacccaggtcaccatctttacactgcagtctgtgtttctggatttacacaggtgaaatgttgacctagaagtacagcgtgtggaacaaactactacagctttaagctgtgaaggtttatcaaaaaagagcagaaacaaaggcaagcagatggctgaagatgaaggtcacatcagattgagaagtttgtcaaaatgtgatgacataggtaatctgtaaactgttattgcgcctagctggaggtgctgaaaaacattttgaaattacaaaaaacactggagtcgccagcacagaggcaggaatgatagcctggagtggttctggtctatggatgaatgccagatgtggaaagcgacatatctggaattaatgatattaaacatgcttttcttttatgctcaataataactctattatgattgatacaaaccgcagacactttatctagtacaaatggaatcgtctgtcattgactatattaaatcatcaatttctgcatgatgaggatcgtttagggtaactaatcatctgtctcgttctgaagtctttaaggctcatcagataacgttttgaatactgcctgagcaaccatgacaatctaacccttccatgtaaggattgagaggggcccattatgccgtcaaagcctgtggaaatatcacagctctttctctacataataccctgctgtaaataaatcactctccaccacaaactttattgatcacaagcacttccatgcttgtgtctagtgaagtctctacagaataaaatgctgctttatattttgtcttgtcaaaatattaaacggctctgtcaagcggagtcagggtagcagtgatggtgtaattctgctgtagcccttctcattccctccttctatctcagctgccaagcttacaaagcaggattttatttttataaactttccaattatagtctcgtaagattatgaagccttaagataaagtgtcctaatttagagcagtggagtactgaactcctaggaaagcgactgttagataaaacagcatttctcacaaggaaaaagataacctggcttatttatatacacaactttaatgggcagtgggagttaggctgaaaaaaatctctttcattttacctcgcaaaatggagggagggtagaatctaaatgaatttgcactaaagtgcttattagtcatacttaggaaattatgtgttatgatctaaaccagcttatggggggcagatgggaagactgagttgaaactgaagtccgccattaatgcaatacatattttccaaatggcatggatagggtatgtagccactaagtgttatcacatactgtagtatgtttgtggcaacacccagaaacaacaagcaaattcaaagtgtaatttactgcttgctaatgctgaatttcctgggcagcatatggttttaatgcaatctaaaagtagtttcctcttttgtcccttataaaggggtagaattttgctttcaatagggcaaggaaaaagactgaaatcacttagagaagagtataagatttagtgtactgggccattagtgctgcttggaggacactgggtttgatctttattcccttttggaagatcattaactcttttagacatttagcaaataacctcttccaaggcttacaagagtttatacaccatcagaagagtgcattttgcttctgtcttgtctatttctgaaccagatatttattgaagcttttgtttggtcatttttaaaaagaagttaagctgtaacatgaattgataatcccagacagtgaatttatgttagaggcataaaaactggacgccacaaaaactgcaagttcaagtctcatcatggacctctgtgtatgcctctgttcctggctcaaagagattctagtgaagagaggagaacaaattttagcttagggacagggttaaacccactggcatatttcaaagaagcaagtaaacagctttttttgatggtaataaatttgaaccatcaacaaccttagcttaattcaagttctaattcatctccatagttccctcaccagtatttttttaaagtactataatgggcagtaaactcaaagatagtggtgtcaatctccatcagttttcttttttaagacaatgtggaagttggtaaattctactgaattatagagtctctttccaagtaattacagccgtgtattttcttgtgagtgaaataaaatgtgcaaatatatttgcaaatatattgtggaaagtattttgtttaaagctggagccatttctgccttattcagaaagattcactaaatctctccacaggctagttactccttgtttcaccggaaacagcccctgaccttgagaggcttcaggtttactgagggagactcacttgtaaacaagtaacaacaatgcagtctgagaagagctgtggtgtaggtacctcccacatctgtgttagcccttgttctgtatttaaccataagatgtatgctaattatttttcatgtatcagtttaatagacattggtggtttatgcctgctaattttcttagaacagcttcttgtttttgttcccttcactgatctcgaagcgggtggaactgaccttacttccaccttcacctggccagaatggggacataatgcaggccttgacaacatgggcagtacgacctctggctacactgatttattccaggatagacagtagcatggtcaggaagaggcagagtcaggttattcctcaggcatggtggcttccacactgcatgttcctaaccactgtgctttacaatctctcaggctatccaatgtagaggtgagtgaatgggtaaaatgttgaaggtaaaaaggcccacgccagtccaatgagattcactgttgggacttttactgaaacgctatttctgccgatttgctgagctggtatgcctgtggaagtccaagtgccaccattaatgaagaaagaagtccccggagaaggaagtcaaacacagaagaaagagctgagaggtgcagaaatggagaaagagtgaaacaccggaaagattaaatgagctgggtggtatcatttgataccctggatccagccattcctcaaacatctatccctggacttttgagtttcaagagccaagaacaattggctactcttgctgaagctagtttgaggtaaatttctctacaaattaacaatgtagttaaagagatacctccttaaaggctcaattggtagaaaataaagtactgtctctaaaggatcacagaacgttgagttagattcaatggcagagactgcgagaaggagcctccagggcaaagtcatcatttatctttaaaatagcactttaattttctagtaaccttggtattgggtcaaaaaccttcctataattagaaaccagctgataattgtacactgtaatttctattagaagatttaaaaaatctattatctaaatatttgttttccttctatttagtaagcattttctcttagtttctgggtttcccctggtttgcacagcagatcattatagaagttgtataaatcctcttccgtatatgaaggtatcatttaatatcctgtgaggcagctcttttcaggcaccaggaaacccattattgtagcatccctgaaagtgttaatgcagtttcctcaagtacctagcatactcctggggagtagcttacactgtgggagaatctaggtcaatgtgcatgactgaaaatagcttaacagtgaatccaatatgaattgaaaaaataatgagatgagatcctagccatgagataccctgactggactgatattaggtctaaaaatcaagcatcccaggtcttggaataggtgtattggtcagcacgattttctttcctggccttgttgaactgttttaaaggaacgctggacgtttagatctcagttcagccaaagaggctgccaaaaagacaaaggatcctgtttcatatagaagccagattgcagtttggaagggaaataaaaacttctagttaactgacattacatctctaggcaattttacatttttgttcaggagtccattactatcccctgaagatattgcattttctaacattaataatttgactgtaaaaagaaaaattcaaacctctcactgttctgaaatttggtaaacagagagatcatgtagggaagtgaaaaacacaatatattttattttggggaaaaaatgggttcggattactttgtcactctttaaatataaaatgcttaaatggttgctatcacattcctggtgtttatt

SEQ ID NO: 8384 - DNA, 6000 bp, Homo sapiens
ttttaagccttctgtaagttacttgaacacttttttgaattccatttagatttacttatagtgttttcaatgtacctcttttatagcttttataatggttgatctcgatctaattatatatattgtatatatatgacatatttatatatagaaatatatatgacatataaatatacatgtcacagtctacagttattatcatcctaccagattgagtgaagtataggaattctaccttcctcacatctctttactcttccatttataatgtaattatcttaaatattttctacatatatttagaggcacattagacagtgttataattttggctgcaaacatctaacacaatttagaaaactcaaagaaaagtgtactttctgtgtcatttttttttcttactgtgtattttctccttccttactatcccaaagttgttttttttttttgttttttttgtttttttaattgcctcctgtctgtttggagaatttccttcagccattcttttagagtaagtctgctagtaacaaattttaatctttcttcatttaaaatttttttgtttattttctcttcattcctgaagtgtattttctgcagatttaggagtctgtgttgacagttcttttctttcaggacttgaaaaatactgtgcaattttcttctgccttccatggcttctgaagagaaatctggtatcatgtaaatgttttttctttataagcgaagtgtcatttttctcttactgctttcaaaagtttgtatttatctccagatttcagaactttgactacgttgtgtcttggtgtagatttctttgtgtttatcctatttgggattcactcactgtctttaaatatgtagattttgtatctcctgtcaaatttagaaaattttcagtcatatttctttgaatactttttcagtcccaaaccttttctccccttcttccattatttcaattataaaattttgctagaatttttgttatattcccatgggtctctaaagctgtatccatttttttccctggctattttttcctttatacggaattgttaattttattattctattttccaattcactgattctcttctctccctctccattctgctactgggtccacctcctgagcttttcatttaggttataatattttttttagttttaaaatttccatttggttcttatttgtattttctaattttggtgagtttttacatttctttgctgatactctctattttttctatttgctccaagcatgtttgtaattgcttattgaagcatttttatcatggctgctttaatatttttattatgtaattccacatttctgtcaccttagttttgtattgattacccatttcattcagtttgaaaacttgctgattcttggcatgataaatgagtttcaattgaatattggtcttttttctattattttaaaaaatttagagttgtatttatgttttctgttttagctgagtttttctgataccacactggcaatggaagggggtcgccaccttattgctgacagatgaatggagaagaccaggttctccacgggtgtctcaggtgaccttgttgacacctgagaagaggaggtttcatcattattttcgagtgaggagggtgggaattctgcctttccatgaggtctccactggcactgtgattgggttcaattggcctcattactgctatgtgacaatgaaagttctgacttttctctaggcctcctttgacaccattccatttgggaggagtgtgacccttgttactgcttagtgtggataaaacctaggcatttcccatggtactgacctacgagcacgtgtttgttagtgcgcagcaggaaggaaggtcctggcttccaacttctccaacactaactcagtactgttttggaatactatattatagtctcataagggtggaagcctaggctttccatctgacttttgttgttacagatgcagatggggccatagacttttctgtagtgcttggctggagtagagaagatactgtttaacgattttccatcttgcctggctaccacttttctgggcttttagctagagacttcaggctgttattggctttttttgttctttttgtttgtgactattgttgcttccagattgctatcttcttcacctctaattcaaatgtatttgaggcaaaaaaataaatatcacaaaactcaccaccatgaaatttcttgaattccaaggtccctaggtaggtcttccttcttctctccactattcggagtcttcttatatttgttttatgcataatgtccatagtttttagttgtatttaacaatagaaataatataatataaatatatagttatataattaataaatatataaattatataaacaaatatataatatatataataaatatataattaacaatagatatataattatatatattatttctactgttaaacaagaaccaaatatatacacacacatatatagatgtattttctatatgttctgaaaatagaagttgtggattgtttttataattctattttatttccaatattggtttattatttatatctattttttaaatgtctttgtagattaccacagggtttacaatataaatcttcagataatcatggttcaccttcaaataatattataaaattttgtgtgtataataagcaccttactaaacagttgatgcccatttttgttatctttcttgacacaattattgtaatatattttatcttttatgtaggttatgaatataatatccattgatacctcttttactttagacaaccatcttttagagcaattaaaacgtttagtaaataatgttgtatttaccttcaattataacacttagaacactgctttatttctttgtgtagatgaaagtttttctttgatgtcattttcactccacctggagaacttacttttaacatttcagtagagaacagaaaaaatggcaacaaattttctctattgtttctctgaaggttattatatctccgttatatgtgaagggtatttttgctacatagagaatattgttgagcagtttattcccatttttgcactttaaagacattactgtattgtattctgacttgcaaaataatttctaacaaaaatcctggtatcattctttttttgtgttgttagacagagtcttgctgctctgtcacccagacgagagtgcagtggcatgatctcagctcccaggttcaagcaattcttgtgcctcagctttccaagtagctgggattacaggtgtgcaccaccatgcctggctaatttttgtatttttagtagagacggggttttgtcacgttgcccaggctgctctcaaactcctgcctcaagttatctgcccaccacagcttcccaaagtgctgggattacaggtgtgagccactgccccagcagaaactggaataattcttgtatttgtttctttatatgtaatatgacttttaatcagactactttcaggattttattttgtctttagttttcaagagtttactaggatatattgtgtgtgtgtgtgtttgtgtttcgggtagggagtggctatcttgtttaatcttgtatgaaattttgagatgttggatatactgtttggtgtctttcactacttttagaaaagtatctgcccttatctttcccaagatctttcactttgtctctcttttccttctgaaattccagttaccgatattagaacacacacacaaaaaaccgcttcctatatcttggattcttaatttttaaaatatttttttcttggtgatgtaattttgatgataaccattgacctagaatgagactcactaattattttcccagctgtcaaatctattgatgagcttattgaaggtattatttatctctgctactctgttttcatttctaccatttttatttaattttattatattttctatatctctgctgaaatctaccatctgttcattcatattatacagttttccactagaatttttaatatattatttatatttcctatatgattattcaaatatcagtgccatggtctaattctaccaacaactttgtctcttaactgtatttttatttgttctattcacttgcatgtttcataatctttagttaaaaatataccttttgttaggcaatacagactgagctatagcttattcattcttcaaaatgggcttccccctttattttctagcttttgtgtggaggattgagtaaatctagttaagggttgagctgagttgaattttttttgttattatcattttactcagtacattaccactcttcaagtacttatagcattaccttctatttaaggttggtgctagagaaattttttaacatccaatcaattcttaatttaaggcttccctttgtgcctacatcacaaagagagtatctcttcatgttcttgctcttttccagtaaatatactggattgctcttacttgttctttcatagttgatagctctgagggcagaaggaggagaccttctctgttgttctggttcagccttagtcttaggcagctgatgtgtttctcattctcaatggttgatctttctcagtgatcgtgccttagcccctagtggtagaaaatctttattgatctggtcctaggacatttttctgtcccttctccaagaagtttttctgtttttattcctcagttttgataggtatttatttgtattctctgtgggacagggcttactgcacttactcaaactgcttaagacttttctcccatggggaagcagagaagaagtacccaaccaggtttcatgccatccccaaagcagttgctattcccctttttcaggcattcaccataagaaatgttccttctgatctcttgtcttgcccccggtatttcttataagtacctaatgatgtgtgtggagaagagcctatgagttggagtgatttatcttgtgtctgcagtatccagggtttctatactttcataatagcacataatcagtgttcaaaaattaattatatttactaaacattcttaaaagtttatttgatagctttgatcttctttaggaaagctagtgttcatatcctttttcctctttgaaagagtgtcttgcttatacgttgggttagttggtttccctgtgaattctgctctctgatgtgttcaagaaagttgcaatcttatagagaacccagatttttgttgttgtaagggtctaaatgataatctttccagttttctatatcctaatacaaagctgaaagttataatggcattttaaagcaaattctccagtggcatttatagctctaaaacagaaatatatactctaaccaaagtttaaaattactaagtaagtaaatataacgataaaaaacattcagattttagtttctggaatgttattatgatgtttaatgaacatggaatagcacatcttagttgaatccagaataatcccattaatctctccatattaaataaatgttccatatatcaaaactctaagtctctatgatggttaatactgagtgtcaacttgattaaactgaaggatgcaaagcattgttccaggatgtgcctgtgagggtattaccaaaggagattaacatttgagtcaatagactgcaagaggtagagccactgtcaatctgggtgggcaccatttaatcagctgccagcacagctaggataacagcagtcagtggaacacggaaggactagactggctaagtcttctggcccccatctttctcccgtgctggatgctttctgccctagaacatcaaacttcaagatctttagcgttttgattcttggggtttacaccagtggtttgccatgggttttcaggccttcggtcacagactgaaaactacactgttggctttctacatttgaggttttgggactcagactgtcttccttctcctcagcttgcatatagcct

SEQ ID NO: 8385 - DNA, 6000 bp, Homo sapiens
actgggttcaagtgattctcctgcctcagcctcccaagtagctgggactacaggcacccaccaccatgcccagctaattttttgtatttttagtagagatggggtttcaccatgttggccaggttggtgtcgatatcttgacctcatgatccactcacctcagcctcctaaagtgctgggattacaggcatgagccaccgcacccagcctagtttatctttttattcttttgtttttatttttaattgattttattttttaaaaaaatttactttagattcaggggcacatgtgcaggcttgttatataggtaaactcatgtcatggaggtttgttatacagattattttatcacctcggtactaagcctagtacccaatagttatttttttccttatcctttccctcctcccacctcccaccttccagtaagcccaagtgtctctttctttctttgtgtctataagttctcatcatttagctatcacttataagtgagaacatgtggtatttggttttctgttactgcattagtttgctaagaataatggcatccagctgtatccatgttcctgcaaaaggcatgatcatgttcctttttatggctatgtagtattccatggtgtatatgtaccactttttctttattcagtttgtcattgatgggcatttatgttgactccatgtcttggccattgtgaatagtgctgcgaaaaacatacacatgcgtgtgtccttatggtagaatgatttatattcctttggttatatacccagtaatgggattgctaggtcaaatcacatttcagattttagctttttgaggaattgccacactgctttccccaatagttaaaatcatgtacactcccaccaacaacgtatgtgttcccttttctccacaatcttgccagcaactgttatttatttatttttctttttaataacatccattctgagtggtctgagatggtatctctttgcagttttgattttcattaatctaatgatcagtgatattgagctttttttcatatggttgttggctgcatgtatgtcttcttttgaaaagtgtcagtctgtatcctttgcccactttttaatggagttgtttggtaatttttttttgtaaatttctttaagttccttatagattctaaatattagacctttgttggacacataatttgcaaatatattatctcattctgtagattgtctgtttactctgttaatagcttcttttgcttttcagaaactcttaagtttaattggatcccattagtcaatttttgctttgttttgcaatgacttttggtgtctttgtcatgaaatctttgcctgttcctatgaccagaatggtattgactaggttgtcttcaaggtttttgtagtttttggttttacatataagtttttaatccatcttgagttgatttttgtatatagtggaagaaagatatccaagttcaaccatctgaatatggctaaacagttatcccagaaccatttatttgatagggagtcattttcctattgcttgtttttgtcagctcttttggagatcagatggttgtagttgtacagctttatttctgggctctctactctgttccattggtgtatgtgtctatttttgtaccagaatggtactgttttggttgctgtagccctgtaatatattttgaagtcaagtaacacgagctctcctgctttgttctttttacttagaattgccttggctattctggctctttattacttccatataaattttaaaatagttttctcaagttctgtgaagaaagacattggtagtttgatagcaattgcattgaatccataaatcgctttgggcagtatggccactgtaatgagattgattctttccatccatgagtatggaatgtttttcagtttgtttatgtcatctctgatttctttgagcagtgtttgtaattctcattgtagagatctttcacctccctggtaggcttttttcctaggcattttcttcactttgtagcaattgcaaggttgtgaatgggattgtgtttctaatttggctttcaggtgtgctatttttggagtatgggaatgctagtgatttttatacattggtttttgtaccctgagactttgctgaagttgtttgattggctgaagaagcttttgggctgagattataggatttcctagatatagaatcgtgacatctgcaaacaggaatagattgacttcctctcttcctatttggatgccctttctttctcttgcctgattgctctggccagacctccgatactatgttgaataggaatgatgacagagggcagtattcaagggaaatgcttccaggttttacccattcagtataatgttgactctgggtcagccatagattattttgaggtatttcttcaatacttagtttatacagagtttttaacacaaagggatgttgaatattatcaaaagattttctgcatctattgagataatcgtgtgattattgtccttagttatgtttatgtgattaatacatttattgatttgtgtatatttaaccaaccttacattgcgaggatgaagcctacttgattgtaatggattagcttttcgatgtgctgctgaattctgtttgcaagtattttgttgaggatttttgcatgaattttcatcaaggttattggcctgaagttttttctatgtttgtgtgcctctgccaggtttggatatctggatgatgcgtgtctcagataagttggggaggagtcccttctcctcaattttttgcaataattttgttagaaatggtaccagcttttctttgtatatctggtagaatttggttttgtatctgtctggtagtgaacttttttggttggtaggctatttattactgattcaactttgaagctcattattggtctgttcagggaatcagttctttctggttcagtcttgggaggatgtatgtttccaggaatttatccatttcttcttggttttctagtttgtgtgcttaagtgtgtttatagtagtttatgatggttattttttatttctgtgggatcagtggcaacatcccatttgtccattttaattgtgtttattttgatcttctctcttttctttattagtctagccagttccccagcagtctccaacctttttggcaccagggactgatttcatagaagacaattttcccacagatggtgaaggtgggggatggtttcaggatgaaactgttcctcctcagattatgaagcattagtcagagtctcataaggcacatacaacctagatctccttcatgagcagttcacaataggttcccactcctatgagaatctaatgccaccactgatctgacaggaggaggagctcaggtagtaatgcttgcttcccagctgctcacctcgtgttgtgcagcccaattcctaataggccacggactggtacaggtctgtgacctaggggtcaaggacccctggagtaccctctctatcttatttttttttccaaaaccaactagatttgttggtcttttgaatggttattcatatgttgatttatttctgttcagctttgatgtattggtatatctcatctcctgctaacactgaggttgacatgttctttcctctcttactctttcagttgtgatgctgggtttttaatttgagatttttctaactttttaatgttagatgtgaatattcagtgctataaatttccctcttaccactgcctttactgtgtcccagagattctggtatgttgtatctttgttctcatcagtttcaaagaacttactgatgtctgccttaatttcattattcacccgatagtcattcaggggtgagttgtttaatttctatataattgtatcattttgagtgagctttttagtcttgatttctatttttattgtggtgtggtctgggagtgtttggtatgatttggactcttctgcatttcttgaggattattttatgtctgatagtgtggccgattttagagtatgtgccatatgacaataagaagaatgtatattttgttgatatgggtggagagttctgtagatgtttatcagatctgtttggtccagtgttgagttcaggccctgaacatatttgttaattttctgccttgatgatctgtctaatactgtcagtacaatgttgaagtctgccactattcttgtgttggaatcccagtctctttttaggtctctaagaacttgctacatgaatctgggtattcctgttttgggtgcatatatattcagaatagttaggtcttcttgttgaattgaaccctttaccattatgtaatgccattctctgtctttttttatgtttgttgatttaaagtctgtgttgtctgaaattagggttgcagcccttgcttttttctgatttccacttgcttggtagattttcttccacccctttatttttagcctgtggctgccattgcatctgaaatgggactcttgaagacagcataccactggatgttgctttttttatccagcttgccattctataccttttagatgaggatacttagcccatttacattctgggttagtattcatatgtgtggatttaatcctgtcattgtgttgttagctggttattacacaagcttgtttctgtggttgctttatagtgtcagtggtctttacgcttgagtattttttttataatgactgctaaatttctttcctttccatatttggtgctactttcaacatctcatgtaaggcatgagaaggaaactttgagggtataaataaaaacagagtttacatcttttaagtccttttcttcctgatgtaagatccagcaatctacaaattttaagtgtacaatttgatgaaatatgtagaaacacccatgtaatccacacccttgcttagatagcatttcattccccattaccacaaaatgcatcactggtattcccaatcaaacccctggcccctgatgctgccgttgttctgcctttcttttacaacatattagatctgcctattgtagcagttcataaaaatggaatcacatagtgtgcactatttttgtcgatctgcttttgttaagcataaaactttgatattgatccatgttgaatcaaatatcactagttctctctttattttggagtattattccattttaattatttacctgaatttttaatatccattctcttgttggtggatgtttgagttgtatccattttaggactatggtgaacaatagcctctataatattcctatgtaagtttgtttgtttgtttgcttttatggaccttttaaaaattttttcttgggagtgcaatttttgaattatatattaagtgtatagtaacatgctgatagattgctaaacagcttaacaaagtattattactatttttatatttctgccattattgtatcagagtttcattgctacacatttattgccaacataaggaagtgacactcattttaaacttagctttactttttggtatgtaatggcatcacactgtggtttaatttgcatttccttgacaacaaagatattatgcatctttatgtgcttcttagctgttcatatatcttattttgaattatctacttaagtctttgctcatttttataattttttattgttcagttgtaggagtactttatatattcttcgttaaattctttgtcagatatatttttctaaaggcttttgcccaatcagtgatttatatatgtatggattttatttttatttttttactttatatagtgtaaaagttcacacttattcagaattgaataacagaagtctacatgagctctctgaagcaaaaatggtgggctttgagaacttaccattaagaatataacatgtattagagactaagaaaagagaaatattatggctttcaggaaataactataacaattgatttgacaggatgacaatccgtttccctgtttctgt

SEQ ID NO: 8386 - DNA, 6000 bp, Homo sapiens
aaatacttattcatactgtgaatttcaatcactttttcttctactttctgttatttcagcatattttataccaactacttacataatttttgtttcttcttaataatttcagccataatttgcaatggtcacaaggcacactttaagttaaacctcatctttcaaatccctcaccttctttgatgccttttcccaaccattctagctcacaatccactcactcactcaacattaagcagcttctatttgccaagcactggattaagtgcctaggacatggaaatgccttacagggaccctgacctcaaggaactcagtcagatggacatgcaatggatctatccccaaactgagatcctacctccaaacaggtgttgatacagaagatcaaacaactgtggatgagagccgccataaattcctggccttccactttttaaacattttttatttgtaattattgtggataccctggccttccactttaactggccctcaatgttgcctggctgttttctccatttcatttccatatcaactattttcaaactttcttccctttcccaaattttccaaccttctatcctcttcttcacttgaggcatgggccatcttctgcatcaaaaaaataaacagtccatttgtaaatttcctcaacttcatgttggtacaataattaagaatacatgtaccaacagggtaccaacctgcccacatctgtctccttctatttctcctctatagatagaatagacctctctttccacaatgaaactttccaccattctactctacgtactccctccctccttctgaggaactcaacactgctgtgtcattgacattttcctcactgtctgctctttaccatccaatccaaatttaaacatactacagccatgttcatccccaaattaaaatcccttgactctaagctcctttagttcccactttattctttccccagaccacctcccagggcagtggaccctcttgtacttcctcaccttctactcgctcctcaattcgctatactctggcttttaccaatcacttttctgaaactgtccttgctgctcagtagtcatttcagtcttttttttttttttgagacaaggtccccctatgttgcccagtctggccttcaactcctgggctcaagtgatcctcccgcctcagcctcccaagtagctggaactataggtgtcagtccctatcttgttctcttggcagccgttgtcactcctaaggagtacctgctccttcctcaagcacctctcccttggcttctctgacctgatgctctcatcttgtcttgctggctttcctgtttccttcacatattcagccacctctgcctaccctttaaatgttgatattccgagggtttgctccttggccaacttctcaatcttcattctcatctttctgacatgctaaggacttccaagcctgtatttgtaacccagattgttcttctgaattctagacctttaatacatacacgtgacactaggtatctctactaggatctctcccgggacttcatattcaagatgccaaactagtttccaccacatgccccgtacttgctctactttcttcctgaaatgctttgtcttcagatattgatgtggttggctcctttgtatcatttgggtctcagttccaacgtcaccttctcagatgctttcccttgactacctcctctaatttgcccttcacagcaagccacaacccagcatcagttatcttaatacaactacatgaagttattgtacctacttatgtcttctttcaggctactaaatgaaagcttcctaagaacagaggcattgtccatcttattcactgctgtattgctacagtacctggcatgtagcacatcacaaaaaatacttattgaatgaacaaaactcctcaattttgaaccttggaaagattatgctaaatgaaagatgccagagacaaaagagtatgtattgtatgatcacacttacatgaaatgtccagaacaggcaaatctataaagaagtagattagtggttgcttagggctggagaggtagtggggattgtctatgactgctaatgaatacaaggtatctcttgggagtgatgaaaatgtgctggaattagagagaggtgatggttgtataactctatgttaagaacgactgaattatactctttaaatgagttgtatggtatgtaaattgtgagttgtatggtatgtaaactgtatctcaataaagctgttacgaaacaaccaaattcccaaatttactccagagttgccccatctcttatactccttgagtgaataacactaccctttcccaactgccaaacttaggaatctgatcataacatcctctctgccctgccttccctccccacaaccacccttccagatacagctgatcagccacaaaatcctgaagatctcatttgcatactctctcacactcacatcactcactacaggctctcgtcagctagacttagaatctttcaatatctcactgaatctgctctactcaatccatgcttttattcatccatgcttttattcatctgctacactgctgccaggagagattttcctaaaacataattcccacaatatccatgcttgcttaatagccttcgctggctccctgtaattgacttgataaaggtccaaactcctgtgtatacgaggtgcttcctaaactggacctcaactgcctgtcgcttcatctgctaactcaactctttagctacagccatgaggaatctggccacaagctgtgaccactctcactttcatatgtgccacttccactgcctagaacatcctgggccccccagtctttaactcctactcattctttaggactcagctcaggcatcacatttttcaggatccacgaggtatccttttttcctcaatctgtcagaaatcccttttccatactttcacagtgctcagtgcaatgcctgcctgcgttcttagattagctattatttacaaagcacctaccgcgatgttcactcttcaagttttatcttatttccatatgagaaaacgggttcagtgagattgttgtcctactaattggtcaagtagataatggacttcaggtctgacttcaaagtaatagtctcctattattccaaagtatctctccaatatttcccactgtgcactgtaattctctccaaaagagcgagagcaattaactgggccctctgttgcgtctatatccccatgtgtggtgcttgacacttgctcagtgtttgctcatcacaggaagacatgacaggtgtgaactaagcagaaggaaacggactatgtcccaagcaggtgctcaatgaagccttactgaatgattgtgtaaaggagatactttctaccttttggaaagcgtatattcatgttgtgccaactagtatctaacaataaacatgttgtgggttcgaaatgctcatctgtaggaattcaagttctctacatttgcatctccccttcagcagcattcccgactgatgaggatcgtgtccactgaaaggccactctccttatggacagtcgagggctgagtttttgtccctaacacctctgcactttctcttctccagctttacaccttccttattctactagggcctgagctgagaagatcgaaactcacggcaagtccctaatattttctaacttctggcacatgtgaagccctggtgttaagaaacagacttaattcttccctgcacggctgtagcctcattcaggtcctcctctcatcctgtcggtcataagcttcaccggctccctcacagcttgccctgacgcgcagagatccgtgcttgtgctaagtgaaaacgcttcttagcgtgtacgaaagcgagcggtggccccgtaaaacttttttttttccgactccaacataccctcccctgaaactgatgaaaaagcaaaatcccgttcactctatagcaggccccttccgatcaacggtcctccaacccctcgagcctgagaagcctggcccgcaagcgcggaccaaaggcaggctgccggggtaggtgggagcgcgggcgacggaggaggccagtctccggttacccctcgcgcccctcacagcccgtggcttcattccctctctcgctggtcccttacaggggtcggatcagcagctggtcgctctcctcagcaggaatcgcagacatcccgaaagtgtgagggcgaagcgggggtgaggaacaggtcgccggggtcttcctaaattggaagcacagccaccggtaaataaaaaaggaagaaccccattcaccaagagcacaacttccgtcactccggagcccgcggcactagactcctcccctcgacttccggtcgggggacgccgctcgcgaggcttcccaccacttggggtcttggaaccgggggtaggacgtcaggactgcgcctgcgcatagtcttggaggcgcggcccggcggacgtgggcaggagggctggaaaagccggcgctggagcgggaacgggagtagctgcctgggcgccaaaggccgcggcactcccacgcggaccccgaagtccgcaacccggggatgggcccgcggctgcgaggtgagcgcccagccctcgtcccgcttggggccgagctcgcggaggcctgacgggaacacggtcccgagagcggcgcggacggccaggaaggatgggtggggccgcggggcgggcggaggagggatgcctgggctcgggcttggttccgggcggggccgcgctcccggggcgcgggtggaggagcttggaaccacgcagatcgggcgtgggcttgcggactgcagcttcccgagccgctgtcgccccggaggggcggcaaggcgggcggccgcgggccgtttccttgcctcttcctctgccccgcttcggccgcctcccgcctctcagggtcggggttgtctgtccccttcgctgtcacatcctccgcacccagcgcttggaaggtgctccatcacggtgacagacaggtgccaagcaggctggcgtctgggaggaacttcggagccggctctccctaggccccgagcttggccgcatccgtccttactctggtgaccctgggcaggtcactgactcttcgggcgctttggcatcctcgtttgaaaggggctgttatcctgcagccttgctggtcggtgagggtgagggtgagagggatctgtgcacctagcaccgtgcatggcacgtggtaggcgtttggtacatgggaatcgctgttggggtgtcacctccccagaaagttctcggcttcagtaagcgcgtcccctgccaggcgccctggcaatgcagaggagtcaccgagctccgcctttgaccagcgtgcagctgggagagtgagatcagagaccacagcagatcgtggcgctgtgatcagggggtacactcaagctgtgggtcccttaccccagccttgagatcccaggaaggcctgcagcctgaaacgggccttgaaaggtaagaagtagccaagtgcctgacaggtgaaggacgtcccgggcggtgcaaagcaggggcgcgtggagcatcgcgctgagaaccaggagcagctttgccttgctgagatcaatgaactgtgcccgggttgtggaggatggaagtggaaaggtgattaggagctgggtcctggaggacctggcgtgtcgtgctgaagaacgttgactttggtctctgactttggagaaccagtgaaagattttcagcaggctagtggcattagattcatgtttgaaagaaatcattttaatcgttttggctgcagtgtgggggtagatttaaagtgttagggaatccagtaggacaaggtcccttatccacgaaatatccttgggtttgtgaattccttaaattcatgccaaactttgtatggatgtgcatttttatagggtgaggatccatcacattcatcagtttctaaaaaaatagtgtctgtgcccatggtttaggatgac

SEQ ID NO: 8387 - DNA, 6000 bp, Homo sapiens; identical to SEQ ID NO: 3694

SEQ ID NO: 8388 - DNA, 6000 bp, Homo sapiens
tatacttgacagtttggctgtgtgtagaattataaattgtaaacattttctatgcagaattttgaaataaaatctctattgtgttctagagtccagagttgttgagaaggctaaggctatttgactatgaatttttctatatggctcatagaaatcttctctttgaagctcatagaatcttctctttgtccccactgtcttgaaatttcactcagatgtgcctttacatggatctattttattccaaaaatatggtcactcagcagatattttcagtcttggaaattcattctttcagatctaggaaatgttgttatgatgatgacttcctctctctttcagaaattcctattattcagatactggatatcttggactaatcctctaattttaattttattcgttcttattttacatgtctttgtcttttgatttgcttctgggaaactttctcaactttgttttccaatcttgagtttttcatttctgctcccatgctgttaatttctaagaattttttgtcctgtataattgttatggcaccttattcttgatgtatgctcagagtgtcttttttttcttttctaagttctcttgacattttctcctagaccctattttccaattgtctggcctctgtcttccatgctgagggatttacttagagcctggtatccctacattatctgttctccattaggagtggggaattgaaagactggctgtaaactctgacgatattggtgagatttgtcaactttgagcttcactttaatctatctgaagggttggaaaactaccaatgccattatctttaggtctttcctcttggatgggtcatggagtggatcggcttttgtggggctagaaacttacacaattagggacttttttttgtttgtttttgtttttgagacagagtcttactctgtcacctagactggagaataagtggtgcgatgttggctcacctctgccttctgggttcaagtgattcttgtgcctcaagcctcccgagcagctgggactaaagacatgagccaccatgcccagctaatttttgtattttttgtatagatggggttttgccatgctgcctaggcttgtcttgaactcctgaactcaagcgatccgcccaccttggcctcccaaaatgctgggattacaggtgtgagccacatacctggccaggaagctaaattatttctatcaagatgaactgtgaatcaattaaacctcttttctttataaattacccagtctcaggtagttctttatagcagtgtgaaaatggacgaatacatggggaaatcatcttgtaaataagtgacagctgggaaaagataaaaggagaaaagagcctgacacacagccctcaacaacaccaatatttagggggatggacagtagaggagggaactacgaagaacaataagaaggagctgcctgagaagtacacagaaaaaaatagtggatggttaatcagaagccaagaaagaatttctagctctaaggaagagtcaacaagtaaatgctttaggagatgggatgaagactgaaaatgctcattgactttttcccctgtagactatatacactccaggaaaggtgcaatatctgccttgttcgttctttcttttaataccttttttattttagatttttgtggctacacagtaggtatatattgtgttgttcattctcgtatcatcacatggaatagaatagatcctcaataaaaataagttaaagtaatgtgaatagactaacacatttaaaagagaaaaatagattaaactatgttagctaaagagcttcaacctcactctaatttctttcgttgtgagttttcctaagctattttctcctaaaaatgttaactttcctttccccatccccaaaagatgggttgttttgccaatagtaccttacaattttctcaaaaaaggtgtatatattagataaaaattatctagacaaaactccataaccgtatttcacccctctaatcccgttatgtatgctattgttgtgccaaactcctactaacctcaatagagaaggtaccaggttcaagaggccaagaagagactggagagccagtaaatgagacatgggtttgtattaggagcttacagtccagtggtgacagaggggaaagagtccagtggcagcgggctggacagaagaaccagctatgtatagaagtggtccagtggcagtggggtggacaacacatctcccttcctgctgtcctctggcagcgggctggacaacataattgcacgtcccaagggcaggaaaaccgcaactgcctgtaaacatcatgcagtttatacagcattttcactgaacaccctcccactaacgacctccacttggcaacctgcatttaacccaaaactcagggccctaatcccctgtatggcccatgttccaatggatgggccggtgggtgggggtgggggtttaagatgtttatcatagacacagaacaaatctccaggttggccactcccagattccctagctcagagcacacattcaggtgcatctaccatacagggtcattctcagggtatgcttacattattgctatcagatgcgtttatgttgcaggtctctaatgatttacacctccctggttccttgcctggggtagtcccagtacagggagaacagcccttacgagctgatctgatgccatgttaggtacacctgattttgaattcattttggcttttagagaaatcggataatttcccgattttttttttttcttttttttttgagacagagttttgctcttgttgcccaggctggagtgcaatggcgagatctcggctcaccgcaacctccacctcccaggttcaagtgattctcctgcctcagcctcccaagtagctgggattacaggcatgtgccaccacgcccagctaattttttgtatttttagtagagacggagtttctccgtgttggtcagtctggtcttgaactcctgacctcaggtgatccgcctgcttcagcctcccaaagtgctaggattacaggcgtgagccaccgcgcccggctcccctgatcttatctttgtattcttttttattgtattgtatttatttctgtctgccacatttcatatcaagacagaataacagtgctgcacattaggatcacctaattttaaaattgacattttaaaaatgtcaatgcccaggtctcacccatgacagttaaatcagaaggtctggaatagtaagcaggcatcagtggttagtaaagatcctcaggtgatgccaatgtgcagcaaagtttggaaactattggcacaacaggttttaatctcagttgtgacactggccttgcaatcttggatatgtaatttaacttctctgtagagttaaataacgtaagagtacctatctcagttagttgtaggaatgaaatgattgaaaataaagtgattggatctgtgcctagaacaaaataagggatacgaaattgtggggcggggttaagataatctactccctacataagtagagaaatgtcataattcattctgagttagccagccacaccccatcctttagcgtgggcgggcttaactactgcttcccagatggtttgaaaataagctccatggacaactccttcagtggtgaatagtctctgctctcctaaaatttgtattttattggggagataatcaacaaatacatacataatttcaggcagtgttcaaagaagccatgccaaagaaataacctttactctgaattcagtgtggtctctggctaagaatatgccctggcagaagggaagccctttctattctctgaaaagaagtgtgtttaccaaagcattaaatgataaatacattttttaacggtgaagtcacaggtctcacagaaatacaaaatgaacacgtgtaaaaaatttatttactcattaacccggggaccagtaagctgttagaaccagctctaagcagaatttaaagcacccatctatattgttgaatcaggactggggaatgaatttacaaatcgatgcaaaatggcttttcccaaggaagggtaagataacaatacgaggggtcttaccgagttgtgcagagcaccacaaagaaaagcggacagcccctctagcaacagaatgcccgggacggtgtgccaaactatggctgttttttcattgaagacattcagtaattttttgtccatttcaatgtgtttcataatttctccctacaaaaaaaaatcactcatctccaaaaacccagcagctaagtagttcttctacattatcttgctttcatttatccttaatccttttgcctttggcagggttggatggtctttcttcgcccccaccaaggaggcttcggagggaaaagagggtgtaaatccaatccctccactcctccaggcaccctcccatttccgccacaggggcgaggatggctcaaggctgggcttggctctgtcccttccccgcaggccccgcccccagcccgcgcaataattgagctgcgcgcaaaggtcacgttatcagcctgtgacgcttcccatccagtacgtggcacacattgctcagaaaagccccttgtgcccgctttctgccatccgcgctgtctcgtgtctccctttttccattaaatgcctcttttcttgcgggtctcatctcgggaatagtgcactacggggacatacctatccccaactatcctaggcccgagaaccagcccttgccttcgcgtaacaggcggagactcgctgaggcgagttgcacttctaattgggcgtgaggtcttgtcaatccccaagttcttccaatcagaagtccggtccatccagccttccgctccccattggcctgtgtggaggaagaggggtgggtaagccgaagtcgctgcgctcagtgcgcaggcgcgaagaagctggcaggggcacgagccgggggcgggtttgaagacgcgtcgttgggttttggaggccgtgaaacagccgtttgagtttggctgcgggtggagaacgtttgtcaggggcccggccaagaaggaggcccgcctgttacgatggtgtccatgagtttcaagcggaaccgcagtgaccggttctacagcacccggtgctgcggctgttgccatgtccgcaccgggacgatcatcctggggacctggtacatggtaaggcgggcaggcgtggcgcgtatgtccggggggcctggggagcggggcctggtgcggagggggtgagactggaaacggggtgttgggtggggcggggacttggaggggcgctgctttttaaggcgcgccaactctggatgaagtccaaggactttgggaaagtaaccttgttcaggaatcggagtcgggggagcggggggcggtggtaagcatggggagattgttctttggcaagaatttgaggagagaagcgggcttgggagagcagaggctttgcaggcgaagggacgagggtggtaggatttggtgggaattcctctgttttggttcttgttgtatttctacgatctgaaaggcagcatctcccttcctcctatccagtgctccctggaattttttcctctaatgaaataattaggagcggaccttggtaaacgcagtctagtttcgacattggtcttcccgttgggaaagcgaaagatccagcggtaacccggttgtccgcgtttcttggactttgttttgtttcatgcctctcttgcatctccagaatcgcttgggggcgatagcttttgcctgagttgacgcctgaccagcttttgtcctggtgcagcctcctccctgcgcagtaggtgcttttcgtagccgaccggctgtttttacagagacctttattgagagccctctccatcctggccacctaccccggtatctcctgggttccaagatctgtgtgattctgtcctaaccaagttgacactgttgttgcctggtgattcactagtaataagtttgtgattttttctt

SEQ ID NO: 8389 - DNA, 6000 bp, Homo sapiens
tccacaggacccaccctccctcccttccttccctctctttttctctttgtctttcttccttccctccttcttccttttttctttctttttttctttctttttctttctttctctctctatccctccctccctttttttctttcttttccttctttttctctctctctctccctcccttctcttctttctttttctttctttctttctctgtctccctcccttccttcttttttctttctttccttcctttccttccttttttctttctcttcctttttcctttctctcttttccttcctttcttccttccttccctcgttctctctttccttcccttccttccttccttcctttcttctttctttctctctctgtctctttctctctttctctcgagtgcagtagcacaatcttggctaactgcaacctctgtctcccaggttcaagggattcttgtgcctcagcctcccgagtagctgggattatggacatgtgccaccacaccaggctaattattgtacttttagtagagatggggtttcaccatgttagccaggctggtctcgaactcctggcctcaagtgatccatccactttggcttcccaaagtgctgggattatatgcatgagccaccgcacccagccaggataccattttcatggaagacactgaatcatgcttcctggaactgggtaatgctccatctctagacatatttatcaaataaatgaactatactccactctcctcctccaaaacaaaaaagttattcccatagacaaagggttcctaggcctccctaggatgatgggcaccatgaggtgataaaagtggtcccttacggggatcgctttggggaagtagatactctgatttggatgtgtaaattccaatgatatctacaaaaggtgtattattctctctctttcctgctatcaaatattagaggcaacttagaaggcaagggaaattataagttagaaagggacagtcagcacaggggcaaggcaggtttgaggttgagagcagagaagcaggacataaagtccaatccacttgctgcacactgaatccccagatgatttggagctgccaaagcacgaaagtgcagacacacttggttacatatttctcaatatctaagaatgaacatatggccaggcacagtggctcacgcctgtaatcccagcacttttggaggccgaggtgggtggatctcctgaggtcaggagttcgggaccagcctgaccaacatggtgaaacccatctctactaaaaatacagaagttagccaggcatcgtggcgggtgcctgtaatcccagctacttgagaggctgaggcaggagagtcacttgaagccaggaggcggaggttgcagtgagccgagatcatgccattgctctccagcctgggggacacagcgagagtccgtctcaaaaaaaaaaaaaaaaggatgaacatattcgttccttagacgaaaccaaaactttccactgcttctaggtcttcatgtctcacaacagacccaaggacagctccgcagccgtggtgggtgaggggcttcctctggagtcccccgatggcactcagggccatgcccctgcactgggacccagtgagagccaatcctacggtgcattagaggagacatacgccagtgtggccttcagacagttctctgaaaaacctctccaacatggctccttctagcctacacctcttttttgggcaggaattgtccccaaacttaacatacagtctggggctgggaaactggctgggctgcctcctagaggctctttgtagcagcatcttcaaagccattcctctcaccgtcctcctgaggcacctcttcttcctttttccagttgtcctccccatactcttctgagatgattcacttagtcttatacagaagaatgaattcatcagtgtatttttaggattagaattgctggcaagtgagagaaaattcagagaaacagtgtcctaaacaaacaaaaagagacattttcccatcatgtataagtctgcgtgggcagtccagggatgacgctatactccatggggcagggacccatgcttcctttaacttgttcctctgctgtggatggcctctgttcccatgttcacttcatggtccaagaaggctgcttcagaggcagccatcagatctgtattccgcccaggagaaaacagaaaagggaaggagagcatgcttgacacctttctgaaagtgcatgtaccacttctgctcatgtgccactggcaagaccctaatcatgtggctacgcgtggctgtaagagaggcagggaaaggtaatctttattttaaatagccataagcccaattgaaatttaaggaatctcttactgagaaagaggaaaacagatgtgataagtaaacagaagtgtctgcccaaccagtcggcaactaaaggcttcagcaaaacatttcctaatgggaaggatggtcagactcaaacagcaataagatataattttacttgcatcagctggcaaaatataaaaggcccaacaccaagtcataggaggatgtagaaaaatggaaatgctcataactgctgttgggagtgtaaattactataagccctttggagagcaatttgcttagagcaattgcttacaacaattcctgagaaagttgaagatgtttatacctataatccagagctctacttctagagaaagcctcacacatgcactcaagaagacaagtataagggccaggcacggtggctcacgcctgtaatcccagcgctttgggaggccgagacgggtgtatcacctgaggttgggagttcaagaccagcctgaccaatatggtgaaaccttgtctctactaaaaatacaaaataaataaataaataaaaaattagccggcctgtggtggcgtgcgactgtaatcccagctatttaggaggctgaggcgggagaattgtttgaacccgagaggtcgaggcgattctccctgcctcagcctcccgagtagctgggattataggcacctgccaccatatccggctaatttttgtatttttagtagagatggggattcaccgtgttagccaggctggtcgagaactcctgacctcaggtgatctgcccgcctcggcctcccaaagtgctggggttacaggcgtgagccatcgcgcttggccgtgagtgacttttaaaaaatgaaaagactccatcaaatcctccctgaccccagtttcctctgttgtgagcagtagagaaaggtaagattccaaaattcctatttttccaccatactgggttgaagggatctgtggagccaccctctggtagaggtagaaccttcgaaaagggcatttttaatccacagggactcctcgagctcggctggacctccgtggtgccgtgctgtgagaccatccatcactcaggcactcagcgagcccacatcggcccccaagaaccctgatgaaggtcttcctgccccctagacagacttggggagacggacaccccaaaagcgagagctctttgaggtcaaacaggtgctcaggagcaggggtacaagcaggccatcatcttttagtgctgtgaggaggagtggggggatgagatggggacgcaggaggctgctcggctccagagcctgctccacggtggaaggtggaggagagtccagggtcccacggtcagtccctgcgtggcccaggaaggtttaattcttttaaagaggaacactggacacttcccgatattttcttggtccccagctcaggccgacccaagttcttgccttccgcctagggaagacaggggaggacgacgccatctttggtctcagggcccaggtgcgaaggtcgtttggcaccatctctcctgcctgccagatgtgggcagggcccgtccggttcttcccctttgctctctcggccgtttcccctacacccgcaggccttccacagctttttgaactgaggcccagggcctcgcaggggatctcgaaggagcagcaactgcacggtgctcctcagatccgcgtgcccgaggtcaccggggaacaaagaagttacttatttttccttttagctcagatgaagagagagggcgttgtcttccacagaaaaacgctgcgaactccgcccccgtccccctttttcttgcagcccttccgtgcgggtgcagctgtttaaactaaggccccaagtctccagcactttgtggagtgcaggaagaacgcgagcgtacgggagaatctgggccggcggggcgcagcgagccgcatcgcagctggaggacagccggggtgtgtctgtgtgtgtttgcccgtcggttgaaggccccatcgcccccgggtccccgccctgccccagaaagcgttccccaagagagctaggagtcctgcgcacctggagcgcgctccgcgtccacgcccagagggcgctgcacactcgcgcccgaggactgcctgccccccttcagcccctctcccgggctgcgcctccgcactccgggcccgggcagaagggggtgcgcctcggccccaccacccagggagcagccgagctgaaaggccgggaaccgcggcttgcggggaccacagctcccgaaagcgacgttcggccaccggaggagcgggagccaagcaggcaagaaccttaggagcgggccgggggtggggcgttccgaaggggccgggaggggtggctggggggcggggtcctggggggtgtggactggggctggccgggagacctggcggagctgggggtggggggccagtttttgcaacggctaaggaagggcctgtgggtttattataaggcggagctcggcgggagaggtgcgggccgaatccgagccgagcggagaggaatccggcagtagagagcggactccagccggcggaccctgcagccctcgcctgggacagcggcgcgctgggcaggcgcccaagagagcatcgagcagcggaacccgcgaagccggcccgcagccgcgacccgcgcagcctgccgctctcccgccgccggtccgggcagcatgaggcgcgcggcgctctggctctggctgtgcgcgctggcgctgagcctgcagccggccctgccggtgagtgcggccggcggccaggcggggaggcggcgggaagccgggactggtcacccgcggatgccggcgggtgcacgtggagggggagggggagcgaagacttcccttcttcccgcgctagcccagcgggtcccgggacggtgagccccgagaccagggctccagccccaatttcctccgctgtcggtgggtgccgcaccggtcccgcgctggggagggtggggggccggggccccgcgctcaattatgtaaaacgtctccacatctgtcggagcccgccagcccacagcggcgcccggggtcgcccgttcccaccctcctcgccccggccaccgcggcggccgggcccccgtcggtgacccggggggatgcagtgaccgcggccacaacgccccccctgcagaccctaattcaaaccagacccgcgggcttgcgccccagcgccgccgagcccgggcgccccgccccttgcgccagggcaagtttgggcgcagcgcggccggcgcgggagcgggaggcggccgcgttggcccggggagccgggccagggctgcgtggggggcgcgggcgagcgtctgcagggccctcgggcttgccgtgggcggctcgaggtgagctgagccggcccggcagcgggaggttccgggaagttggcctcggaacgctggagacccggaggagcccaacttctgggctgctgaagttgagctggccccggagggcgcgttcccgtgccgggcacggccgaggcgcaggcgccttccacgcgaggggacccgggaatggcctcccgctccccggctcggctttgtgctgaagccgcgcggagggaaggcgggtcccttggcccgcccagtgcagctgggagaaaagaggggcagatgtggagctc

SEQ ID NO: 8390 - DNA, 6000 bp, Homo sapiens
ccacacaaacaaaaagttgccttcagcaaagaggcatcccatccaggcagatgctggattgaggttggggggggtcaggatgccctccaagcttcgacctaagtctatgattctgtcttccttttaggacaagccacaggggcaagtcacccatgcagccatttgaggtcctgagttgtgtgtgtatagatttcctgtatcatttgattataaaagcgaagcatgccagttgtccaggttacatcaatacaaaatgtatagcttggaaagtgaaaacagctcccccataatcccacccttttcactcgagggtggatatttttcattgccctgggaccaggacattctcagtatcagggaatgaggccagctggtcccttcaaggacagccagtgcctttataaagtaccatttcttcttagggagacttccattcattcaatgactattttttgagtatctactaggtgccaggtactggggaagccactgtgagtgagatggatgaggccctcgcggcattttccctgatctcctctgtggcaggatgtcaagcagctctcttgcccaggaatattcacccagatgcttctggctccccgggagtcctcgcaagggcctactgctgtcccactgcgtttcccatatccacagggaaaggccgtgccagaaccctgaacgcggagcagggatgggaatgtgctgtgctcttcctgcggctgggcctttgcagggaggctccagccacctggaacgcctgcctttcaggcccatcagatccttccctcttgccctgaaaggccctgtctctgatcacctcagccagaagtcacccccaactgtaacctgtgtacacctgagggtctgcctcatgagtcaacatggtgccttggcagaactataaggctcctctggtttccccagtgcccgctgaacaggggcccacagaggagagatagggatggtggaagaacagggagtgggacagtgaagccagcaggcaggggctggagaggcagggatcaatttgttgttgttctttttatatgagggtgcctctgtgtggaactctctcccttcatggggtgggaggctggggcatgagtggtggcagagggcccagcagagaaccctctcagcttaggagctgggcatggccttgcggacagggtgccacactgagaatcacagggctggcatgtatgccaaggaaggggaagggacccacagagggtgcaacatggtgtctcttgtgccaaagcaggaccaagcacaagatttatcagccttttaaaaaacattagcacatctctcccccaacccccacttttttttgagatagggtctcattctgttgcccaggctggagtgcagtggtacgatcttggctcactgcaacctctgcctcctagggtcaggcgattctcccacctcagtctcctgagcagctgggacttcaggcacccgccaccacgctcggctaatttttgtattttttggtagagacagggttttgccatgtcagccaggctggtctcgaactcctgacctcaagtgatctgcctgcctcggcctcccaaagagctgggattacaggcatgagccactgcgccttgccgtacattacatctccctttgtaaaacataaaagtcatgtcctctttaacatcatgtgacaattcaaaataaatgtttaaacctccagcaaagtccaggcatgatggctcacacctgtattcccaacactttgggaggctgaggcaggcagatcacttgaggtcaggagttcgagaccaacctggccaacatgatgaaaccctgtctctactaaaaatacaaaatttagccaggcatggtggcaggtgcctataatcccagctacttgggaggctgaggcaggagaactgcttgaacccaggaggcggaggttgcagtgagctgagatggccactgcactccagcctgggcgacagagtgagactctgtctcataaataaataaataaatgccttcctttttaaaaaacaaaaacaaaaaacaaaccacaaataactccctccaaaaaaaatcccccccaaaacccaaaaacctccagcaaattaaaacaatggggcagcccagagcagtggctcatccctgtaatcccagcactttgggaggctgaggtgggcggatcacttgaggtcaggagttcaagaccagcctagccaacatagtgaaaccccatctactaaaaatacaaaaattaccccgggcttggtggtgtgtgcctgcaatcccaggtattcaggaggctgaggcaggagaattgcgtgaacctgggtggtggaggttgcagtgagctgagatcacaacactgcactccagcctgggtgacagagtgagactcagtctcgaaaaaataaaaaatagaaataaaataaaacaatggggcaaagttttgctttatttaaattaccaaactcctatatctgatgttaggtcccctacctttggaatcaaagccctgcgaagtatgggctgaaggtggcgccttttcagacagagtgtgagggaacggtagaaacagcagtggcaggatcgattctctaatggatccattccccgagggatgcaaggtgatgcctgaggttctggaaggggtgcccgcggataactctcaggggcatggggtggcagctccatccagggtctggatagccaagtttctctcccctctgttcattccttcagctctccccaggggagatgaccccctattgctgctggctgtcctcagcacttaccttcccacacatgcttttgtcccttttgtcccaaaacattctatctctttcctcttcctttatttaaattcccaaagcctgtagttgatcttagcacggtgttctgtcaaatgcaaggaaaataatttatactatggtgtaagagactgataggtttaactattcaaaggagcattcgcatctttaagggacagtttgtgaactcaaacacatctcaaacgggtagaatgtgcacgggaaatctcttcgaagcagggtctcaggaactcttccagttccacgtgtgtagtgcccaccgggccaccgccacccgcctcctgggagcaggacagggctccgctgccgagcccctctgcggaaagctcaggcccggcgctccggagtctgggctcccggggtgggcggggatacttaggccccacgtgccccgcggcggagcggtccccaaacctgagccctggcctctgccggcccggaaggaagccgcggcggaggagggggcggcggggtgccccgagcgcgcctcacctgcgggcgggcgcgtcccgggcttccatcctcctagaccgggcctcctcgctggaaggggtggattcgccccagccctgccgcccaccgcccaccgcccacgcccgcgcccgcgcccgcgcttccacgcagccatcgccccagcccgccgcccgcgccggatcgggggccgcccgggcccctccacctctcgcccgcgcgggtcctgggaccgccgcccggcgcctccctcgccgccccactccggaacgcgccgccgagagggcggagactggggcgagggaggggccgccccgcccgcctcccgcctcccgcctcccgcctcccggggcctggagcgcgcgtggccccggagccgccggcgccgcgcggggaatagctgtgcagcacgccgagcccggactcggctggctcggctcggcgcgggcgggcgagaggatgctggcgggcttccccgggctcggcccgcgctcccgccggggagggccccgcgcgcgcccctagcagccgccgccgccgcgggtgcaggggaggggtccggagagccgcgctcgccgccgcccgcgcctgccggcccccgcacggcccctgcccctgagcctcagccccagggcgggcgcgctgggccggcgcccacggatctcccagccctcgtcgccgcctcctccttccccctgcggccgggcgcccgcggatgctgaggggcagccctgcgcctctcccggtcggatcccgggcctgacggcgggagatcgcgctccggccgggccccgaggcgctgccggggcggcgcggctctgcggggagcagccctcgggcgcgccgagctctcccgccccagcccgcgcggggaccgtcccggagcacgcggtggccgagttcccgcacaggtaaacgcaggggcagggccaggcttccgggggggaagacagcgccccgagcgtgggaagggggccggatcggagcccgagcctccaagggtttggtggaaaaaggaagtaaacagaaggaaggctcaggaatcccccacgatggtcctgatttctttccggcacattttatttacagcttctaaggactgggcctggagggaatttaggtgaggaagtcggggactgagaaagaagagatgacagagagaaaccggttaccagggatggaaaggcggctaggcccttccacaagccagggacaggaaattgagtgtctggcgtggacaggactaagtgtgcctgcggtgggcggtggtgtgagccgggggtggcagggaaggccctgggttgggaggctcttgcagcagagatccttttatgagggttagggcgggtcatggggaaaccgcaaggtaggagggaagaggtgcttctactcagcaatgcccttttcagttctagctgatcagtgctacctgtgctctggaaacccgctctgcgttcctgctggaggtggcctcccctccgccccagacaagaagaggccctcagccctcccccggtctcagagagccctgagaggaggcccagtccagagctcttcctccgttcccagtccacttctctagggccagtagcagacaccagccagtatgccgaggaaccagggcttctccgagcccgaatactcggccgagtactcagccgagtactccgtcagcctgccctccgaccctgaccgcggggtgggccggacccatgaaatctcggtccggaactcgggctcctgcctgtgcctgcctcgcttcatgcggctgactttcgtgccggagtccttggagaacctctaccagacctacttcaaaaggcagcgccacgagaccctgctggtgctggtggtctttgcagccctctttgactgctacgtggtggtcatgtgtgctgtggtcttctccagcgacaagctggcttccctcgccgtggctggaattggactggtgttggacatcatcctcttcgtgctctgcaaaaaggggctgctcccggaccgggtcacccgcagagtgctgccctacgtgctgtggctgctcataaccgcccagatcttctcctacctgggcctgaacttcgcgcgtgcccacgcggctagtgacacggtgggctggcaggtcttctttgtcttctccttcttcatcacgctgcccctcagcctcagccccatcgtgatcatctccgtggtctcctgtgtggtgcacacgttggtcctgggggtcaccgtggcccagcagcagcaggaggagctcaaggggatgcagctgctgcgggaggtgagtcctgcccactgtccccccacagcgtcctctcctgcagctctcaccaacttgggacctgttggagttgctgtttgctttgcctttgagtcaaaatgtgtcctgggggcctccggggctctcacctctctccctagtccctgccttttcacccctgtgccattacccggagtctgcctgtgcttggccccagggaaaggaggatgtcagggcattgggcctcagggccactcttcacctgtgcccagtctaagtgtgtgacaggaaggcccacccagggctggtcttgaggcagcattgtcctggccattccctgtcagtgaccctggcaaggaggacctcccttgggaagagggctccttgattcccatctctccccagcactgactagctgtgtggactcagtgcccctttgtcaaatgg

SEQ ID NO: 8391 - DNA, 6000 bp, Homo sapiens
aaactgagtgcactgaagaattctgcctgcttcacagcgttatcaagggccagcctttggatggtctcttgaagaaggtcccagagcttcgaggaggagattctatgatgtcagcacctgacctttgtgacataggcacatgctgccaggggggaactgaactcagggaatggggcccccagctcccattggggtcggcgaacctggtgccaccccttagacaaagtcccagtctcccagaggcttttaccagctggccccattccttctgctgctgggtataataaggtatctctgtctgggccagggtgagctagaggacatcagcactaggggcaataaggggtcagaggaaccagagtggcaggacactgggatgcttgcagaacccccgaatcaggattaggagaataaaaatctgtaccacaggcctccgcctggctaaaggaggactgagggcaaaactcagggctcagacagaaacccgggtcagagtgcacttagtgttagacgctggggacagagaaaggtgtatccaccatttggtgaccctgctcctctctcccaggtcctctcaacgctgaagtgcctgtgaaacacagcccagaggagttctcattggtaagagcgctcagcaccagaacaccctcaattcctgttcccatctcagcccttatcccccgaacccctcctccaactccatcctaccctcccttcctccttattcctctcctccccacttctcaccttccctggagcattttgccagttcttttgatcccaaaggtgacatggatttaaagtcttggtgagttcagcttggaactggggatatgaggcagagccagaaatggaccaattctcccaatgtcttgggttctctcttttctctccaggtcctatgggctttgtcttcctctctgccccacccagataatcgctgctgcccctccactcccaagatgcagctgtgattctccatccccacacatccctcatcaatggttgactgcaaagaagtgagaagccaagcttagattcatgctcatgcctgaacaccctgagagcctggtgctggagggctgggtatccccttggcctgccaccagcacctgcacccacaccaggctggagccacgctctgcgcacagaaggtggccttgatttctcaggcacagctgacctcagagatactggtcctgactctgccaggtctcttatccctagtcttgttgccccagttccttctggattcaaggcgatgttgcctcaaaacaaggaccaggtgctgccacagacctcagtgctccctgggcgccccacttggggcttctcacaacttgtggactcctctcctcacaacctacagcctctctctccccatcagggcctccctccctctcaaccaccgttctcttccactcagtcccgtcgtccctcctcccctccaccagcatccccctctcctggcttccaattcggctcttgtgactcaaattctgactttgctccacatccctattctccctctctcccaagttcccctactttctttcaccagaactacctctctctcccccgtccacgtgcatcctctccctccaaccactggctgtacccctctccccctctgaccccttccttttctccctcccagcctcagaactcctcccttccccactcaccttgccagtccccttcccaccccgaggaactgcatagctccacactcacttccccaggccccagcccaccttctcataggctccactctaacaggcagacatggcgctggcatcagtacagggacactgggtccgggtcccctggagtggtggagagatgcgtgccaagcgagaaggatcctgcacagttcagggacccaggggccctggcccaggccctggtggtccagctggggcaccgccgcatcgcacacgacctgcggctactgcttttgcagcacctgtggctaggcagaaccggccaggccccagtcgtggagtatcctatatgcctggtgtgcctccggccccgcagcccctcctgccccctccccaggtacaggactggaccccggctgcttgctttccctcaactactgccctgtgtgcagggccaggaatctgggccactccggataggcatcggcttcggcctccgcctgcctcagggccaggccagggccttgcatctgctgcccgagaaaaggccgaaggaagcagggcctcagggcaaggctactcaggcctgtgggcatcaattgccagcatctcagcctccagcagctcaggcccgggccgacccagtcccaggcacaccctcccagaccaggagcttcaggtctgcaggccttcaatcaccaaactccccacgatgtttctccgggcctccacctcgggcaccaaaacaggtcactacctccctgaagcccaggccttgccctggcccaaagaggccagtttctctggagctcattctccaaaagtcatcagtctagttccagagccacggaggccccctggaacaccccctccaaacccaaccctcccaaccaggccccagatctcggggagtccccgagacaccctgaagggctggctggccggaggtcaggtgtgttctcctgctctgaaccctgggagccccttgtggagtctgctgtctccaggctgaagaggaccaagggcaccaaggccccattcagccctccgtgtatctaataaagtctgaccctgtgaaacttgtgtttgcgtcctgctgagtccacagaataggtggctgtaactataggggtgccagtccctaacaagacccttggtggcggggagggggtggttcatgcctataatcccaacacactggaaggctgaggtaggaggatcacttgaagccacgagtttgagaccagcctgggcaacatagcaagaccctgtctctccaaaaacaaaaatataaaaaaattagctgagtatggtggcgcgtgcctgtactaccagctactcaagaggctaaagtgggaggatcacttgagtccaggagttcaaggttgcaatgagctatatcatgccattgcactccagcctgggtgacagagaccctatctcaaaaaaaaaaaaaaaaaaaagagggcatggtgtggttgctcatgcctataatcccagcactttgggaggccaaggtgggcatatcatttaaggtcaggagttacgagaccagcctggccaacatggtgaaactccatctctactaaaaatacaaaaattagctgggtgtggtggcgggtgcctgtagttccagctactcaggaggctgaggcaggagaatcacttcaacctgggaggtggagggtgcagtgagctgagatcaggccactgcactccagactgggcaacagagcgagactccgtctcaaaaaataaaaaagaccctggagggtggtgtcaaaggaaacggagaggccagaaagagcaggtgccatgtatccaaggaggacaagggacccacaaggcctggggacttgagatatgcagagagcttggccaggcccttcacacatctaattcaactctgtgggacagatattggcatccccaaagatgaagccactgcgctattcctctgggtgcaccttaggttaatgagaatgcaggagagggcgtctctttgcagggaaggacatcccttgtgctcgctctcaggagtgcacaaaggtcctcatcagatcagaaacccgagggagaatggagtgtcaggcgcagaagatacctgcccgggagccaaactgccccctctgaggccagcaaagcagctggccacccaccaagccaccagcccaggagtgtgaagccttgagaaagggaatggcagacaccacccctgccaaaagtgggcgataggcgttaaggatgacagacgtgtcctcatacgaggaagcaatggattcagcatttgaagtcaggtttatttttaagttcatgctgcctccgttaagaagcaagagactccggtggtttctggtgtgtgccctcgggcaaatcacttcctctctgaggtaagatgcaaaggcctgtgctcctaggagttggcatatcactcctcagatgggaacagtccttatttgaggattttatgtgtgtgagagacagggtctagctctgttgcccaggggctggagtgcagtggtgacatcactggtggtccagcgcagcctcgacctcccagtctcaagtgatcctcccgcctgagcctcctgggcacctgggcccacaggtgccacgatgtttggctaatttttaaatatttcgtagggacggatccccatgttgcccaggctgtctcgaaagcctgggctcaagccatcctcctctctcggactttccgaaagtgttgggattacaggaggattacaggcatgaaccaccgtgcctggcagaggatttttttttttttgagacggagtttcactcttgttgcttgttgcccaggctgaagagcaatggcaatggcgcgatctcggctcactgcaacctctacttcccaggttcaagtgattctcctgcctcaggctcccgagtagctgggattacaggcgcacgccaccacgccctttgtatttttggtagagacggggtttctccatgttggtcaggctggtctcgaactcctgatccgcccgcctaggactcacaaagtgctgggattacaggcgcgagtcggatttctttattaaaggttgaccttcatcaacctccattggctccacctcctccgcccgcgccccgcgccccgcacaaaaatggcgaagtcggtgctgggcgactctgcctccgcgccaggggtggagaaccgaagccccgccccgggaaacgcggccccgcggccggctagtgctgacgcgtgtcggcgctcctgcgcctgcgcggagggagccgcgagacaggtgcgcatgcgcagtgcgcgtctgcgagaccgacttggacggagccgagctgaggctcggcttcctgctgatggtcagggttttggcaactccccggtgtgagaggggtagggagtgctcccggcggcgacggggccgagttcaccagccgccggggcagtagtcgaaggcccggcgcggcatgtcctgggtgccgcggtgcgggcagtgaacgcgcgccgggcgggatgggccggcgccgggcgccagagctgtaccgggctccgttcccgttgtacgcgcttcaggtcgaccccagcactgggctgctcatcgctgcgggcggaggaggcgccgccaagacaggcataaagaatggcgtggtgagagcgcagggccactggggctgggtcttgctgcgggctggcggcgattccagggtggccggggggtcgcggggcgggccacactccagcttcgggccctgcccacttctgttgggaagacccgcttgcctgacgcccaggggcgaatttcagtcgagaactcagcgggcggaggagaggcttttaaggtaaagtgaaaactgcacacagctgcagagtcgccaggaacgcttcagctccgcctcagagcagctccaggggtcttatactggccttttccgggaggtcttgcctgccctctagcagcggcgagagtggtgcatttgggtttaggctaagttccttccctctcctgagcttcaccctgttctgtaaaatagaggtaataatcccagtcctgctcactgtgtagatttgtgaggcccaaatgagagaaaaaagactcgagaaacccttgtgaactagaacgtgcagaaagcaaaggggtaagacatcagactcttccctaaacgtgctctctgggcacccctgaacttgctcatccgggttccccctcccacagcactttctgcagctagagctgattaatgggcgcttgagtgcctccttgctgcactcccatgacacagagacacgggccaccatgaacttggcactggctggtgacatccttgctgcagggcaggatgccca

SEQ ID NO: 8392 - DNA, 6000 bp, Homo sapiens
ttgttttttgagttttttttttttttgagatggagtcttgtttgttgcccaggctggagtgcagtggcaagatctcggctcactgcaacctccgccttccaggtttgagtgattctcctgcctcagcctccagagtagctgggattacaggcacatgtcaccacgcctggcttatttttgtatttttagtagagacggggtttccccatattggccaggctggtctcgaactcctgacctcaggtgatccacccacctcggcctcccaaagtgctgggattacaggcgtgagccaccgcatccagtcaggttgcagtttttaaacggacaagcagagagggcctggccaggtgatatttgagtcaagacctgaagcatgtgaggaggtaggtcatgagcacatctggcagagtgcattacagctggtgagataagcaaatgtgaaggccctggggtgggagcatacctggtgtgttgtaggactcacaagaaggccaggatggctggggaatgaggtgggagaagtgtgaaatgagatcagaggagctaaattccgtaggaccccttgcaggccattagaaggactctggctggtactctgagtgtgatggggagtgacaaatctgatctatgtttacctaactgcttggttgagaatagactataaggcagtaaggatggaaacatggagaccatggaggaggctattgcagtaatcaagaagacagatgatagtggtttggacaagggcgggatcaggatttgctgacagcttggatgtagagtgaaaatagaggagtcgaggatgaccctaggatgtctggcctgagcagatgggaggatggagttaccatattctgacatgggaagactgcagaaagagaaggttcaggatggcgtgacaatcaggggctcagttttagacttatggagcttgataggcctgcctaccagacaataaggaagggatgtcaagctgacatgtggatatatgagtttggagtccaagtgagagatctgagaatcaccaccaaacacatgacatttattatttatttatttatgagatggaatctcacctgtcatccaggctggagtgcagtggcataatctcagctcactgcaacctctgcctcccgaattcaagtgattctcctgcctcagcctcacaagtaggtgggactataggtgcatgccaccacacccagctaatttttgtattttttagtagagatggggtttcaccatgttggccaggatggtctcaaactcctgatctcaagtgatctgcctgcctcggcctcccaaagtgctggaattataggtgtgagccaccagccaggctatttttaatcctttttaatagaaaaattcaaacccatacaaaaatagagagaatggtacagtgactctctatgtacccagaatctagcttcaacaatcattactttctgctgttattggatagtatttaaagaccagaaactggatgatagctccatgggagtgagtgtggaaagaaaagagaagagagtgaccaaggcctaggctaattcagcaagaaaagattgagaaggtggggaggaaccagcaaaggggactgaaaataaacagccagtgaagtaggaggaaaaccagattatggtagcctggaagccaaatgatgaaacaaataattcccaagtaacaatttagttacagtatgatcagtgctgaaagaaataaacagtgtgttgacccagcatggtggctcacacctgtagtcccagcactttgggaggctgaggcaggaggatcacttgagtccaggaggtcgaggctgtggtgagccatgtttgtaccactgcactccagcctgagcaacagagtgagaccctgtttccaaaaaaaaaaaaaaaagaacaaaacagaaaaagtattgtgcgatgagagtgtatgacatgagaattaacttagtgtgggggccagagaaggcctccccgaggcagtgacatttaagctgttgccctccctcattctccctgtgaccagctaaaatcctacctcctccatcctgcttccactcaactagctcctcctttctgggatggcttaattgaggacagtgtggcagccattagtggggtttggggacacagatgagaaagaaacaattcctgccttcagggagcttgccctgtagcagggagacagacaagcaaaggacttcatcaccatgaggtgagtgctgggatcagataagcacagtgtgagccttgagagaagcagggagggacacatacccagtctgggagaagtcaggaaaggcttcctggaggtgacatctgagtggagcatggagtagaagttggacctccaggttgcctcctctgtccatgctcttcagcttggcttgcacttgtcaggtgttaactcttgtccacatgcttacattttaaaatttgcctgaaatctccagcccagattaaatcctgacctcagtgcagagaatcgcacttgaggcctggcattcgcgaggaccctttgcaaagatgttcacagggccatttgatagctctttgaggaacaggtggaagcatcctgtttcgccgccaagctttccttacataaattttcaagtgaaggttggtattcccaccgccggcgccctcggtttctggaggcggcacgtttggccacgcgctgcgaggcgcctctgccttccccgcctggtggctcccggcaggggcgggcagggcacgtgagggcgtctgcgccccctcctggcactcggtgctgctggccgcgcgggctgcccgggaagggaaatcccggaggaagccattgttgttatgtcccctgttgtcgtcatcggctgagccgtgccaagaatccctttccccgcataggaccccgcagtttctccccattctcgagctcacccgccagggtcactacgggccaggctgccgcatccgagccgcggagtgcgcggtggccgctgcgcatcccagctccagggttctcagaattggggagagccctaggatgggtgcgacgcttagaaaaccgacggcgccgggcccgacgtacccagagccctggcatagctaagcagggacttgggttccaccttggctctgataagtagcccgaaaaggtgaacttggccggtggtttcctgctctcgccgcctcaatttgcttccctgtgacccgaggagaaacagaggtccgtcaagtcccgcgccttaaagggaggttagagggagaacgaccccctcgctcccttaccccctcacccctcatgggctttggactggggaggctgggggctggcgcggaggagaggctggcgcagccgggggtggggacggcgcggagggcgcgcgcagcccctgtggctctcccgtgccgctctgcagcagcggcgcaggacagtcccttcgcacgcgccgcccgcacaccttggcacgggccaagccacactctcccccgccggaacagccagcccgccgcccagctttcctaatccgtttaagcctcacctcctccgcgaagctctcccgggttaaccccatcacttccaaccactgtatctggcacgtgctcccgtttttgttttgttttgttttgtttttttgcaagtgcactcttgggctcgttggaataacaatatcgagggtaggtgtctgtccccagaagcctaagttcaggacgcccagtgtgttctgaaggatgcggctgatgagtttcttgcctgggctcactaaccattcccaccctccacgcttccccatccctgctcactcgctcccctcctcctacggaccctcctcttcacagactgtcacagcttcgagtgcacaatcctcttcccaccccctcccattctacagtggcggcaggtgcgaggggagagaacattgagcatttgaagcttcgacttgaggctcggccaccgactttgctgtaagtcgctccctcccctgggttttagtttcccccaaatgaggcagaatgcggtaatgtccaggagggcgctgcaggtgtggaggatgggaatcactagctgacacgctgccccgctgcccctcagcccctctccataaacagtggccgtgacaccagataggcggctcgacttcactggacccccgcccgtaagagaactgtgagcgctctccagttgccagtgcggcgtccagagccggggagggaaagaggatgggggtccaggccgggccctttattcacagcctgcatgaccttggactcttcttcctctgggtctcagtttactcatttgaaaagcagggataacagtgggttgaaggagagcaggaagcttgtcacccaatgtttctgtataaaaataaatgatcattcgcggtacagtgattggcagcagactgggctcgtgaattccgaccccagattctccgtaaaggggtttctggagtccctggaatctccctgtgtcaccgctcacctcatgttctttctggttctctggagataggtaatgggtccgctcctgtttctgcctccgcgtgagggttgcggccacagggtgacggcgtggtgggcgacacccccgcgcaggcatgcacagagtggtggtcgttgggcgaaggttggtcgtgaggttcttgggcttcaggagcgaggcttggaaccggtgggcgggactgtgtgcagaggtggggctagctcgcctgggggacggggctgtggagatgaggagttctccagaactcgggtggcggggcgctcccgggctctggcgcggggaaatggggctttggcagtgggggcggggcttaagggtggggagaggccggggagcctggaggcggagcttggggagctcgccccacgcggggcggggctccggcggcagcgggatctgcagttcggactccgcgcgccacagtcgctgcagttcgctccactctggtggccccgccgccctgcggggatcccgggggtcggcgggctgctcggacttggcgcggggccggcccggcctctctcttcctcggtggggcctagacggtcggggcaccgggaacatggagccctctccagccgctgggggcttggagaccactcgcctggtgagcccccgggaccgcggtggcgccggaggcagcctgcgtttgaagaggtaggacagacctgggctggccctcggcccgggggcgccaccctactaccctccgtccatttcgttgtctctctcggcgcgggccccggcggccgccccagcgcaccgcgggtccctcgctccgctgcaccccgcttcatcccctctggccacacggagcgcccagccctacacagccggctacgcctcctcccggccgcctgacttcctcgggtgaagcggcctctcactcccctccggccggcgtcccaggccgccggacccctccgccacccccgcggcgcctgccttccctgggagcagctgccgctcggtcgggccggagccctcgcccggtgcgccaaggtccgcattgccccgggcccagggcgggagcgcctcgctgcccaggcttcagagctccctctgtaggccccgggggctcccctccgcgcgccccctccagccgcggccagctgtgggcgccggggcccgaggatgggccgggctccgcgcgggtcttgcgggcccctggggggcgggcggccgccgggaagcgagggggcggcgaggaaggagcaggtgcggtctgggcagcgggggtattcccggctccgcacagacggggccgggggcggcgaggtgtgaaatgaggcgcgcggagcggccgggacagcgggccgggggtggcaggagaaccgccaacgcgccccgccggcccccgcgcctgccgccaccgtccacctgcccctctgagcggccgtccgacctccctgcccacccccgtgggccatcttgtctgtcggctgaccgtccgtttgtctccggaatttggcagggtctccggctttttctcttcccccacctctctca

SEQ ID NO: 8393 - DNA, 6000 bp, Homo sapiens
ctctttcaagacacagatttggtaagctgaggccaggagaatgggtgtggtattagaaaaggtagaaaactttagtctttgtatagtacgcaagcctgagttcagcacaaagatgtaaaactaaggagcctcggccaggtgcagtggctcatgcctgtaatcccagcagtttggggggattaggcgggcagatcacaaggtcaagagatcaagaccatcctggccaacatggcgaaactccgtctctactaaaaatacaaaaattagctgggcgtggtggcgcgtgcctgtagtcccagctattcaggaggctgaggcaggagaatcacttgaacccaggaggtggagattgcagtgagccaaggtcacaccactgcactccagcctggcaacgcagcaagactccgtctcaaaaaaaaaaaaaaaaaaaaaagggccaggcgtagtggctcacacctgtaatcctagcactttgggaggctgaggtgggcggatcacctgaggtcaggagttcaagaccagcctgaccaacatggtgaaaccctgtctactaaaaatacaaaaaatctgccgggcgtgacggcgggcgcctgtaatcccagctactcaggaggctgaggcggagaatcacttgaacctgggaagcacaggttgtagtgagctgccaagatcgcgccactgcactccagcctgggtgacagagcgagactccgtcttaaaaaaaacaaacgagcgtctcactttctctctcctattccatttcccttccccagggttcattccatgatctgctccgtagagaaccaatgctgcgcatgcaggagggagaggggcattctcaactctgcctggacaggctgcagctggaggctattcataaggtagtctctcatcctctccaccctccactctcatttccccccagttctgggcctggggctgatgaaatggtagatgaaaaggttacacagatgacaacctcctcctcctccagagcatgacagacgtacctcattcactggcttttcattcttacctctgtcacccctcatggtcctgtcctttcagattgtggctcattttttttttttgttcatacagctaggagtcaccctaaagcaccacccatgagcatctctctcttgttttctgttctcttcacaggtacgtttcagcccaaacctggactcctatggatggctggtatctggggggcagtcagggctggttcgaatccattttgtccgtggactcgcctccccactgggccaccgtatgcagcttgaaagccgagcccacttcaatgctatgttccaaccatcctcccccactagacggcctggcttctctccaaccagccatcgccttctgcccactccctagccttggcccacaccagatccttggagtgaagtcggtcaagaacaaatggcccctatgcacagagccataggaactgggggccttccctggacagtgatcatgccaggcctggacctttaggcctgcctccccaggactccttagatcccactctttctacagacttctgtgatcacagccccctgcgggcaggggggctctccctccaccaactctcaaggctcctcagcctaagactatggctcatgagaaacactcaggcctgacctaggcttgggagtcaaactgctcatattgagcatattgttaagtgggtaaagccaagtaaaggtactgggtgtttttgtgaccacttgtgaatgggtgtatggagaactgaaaagggtatctgcatgaaggctcctgtctgactattccaggatccaatattactgccttctgaaacttcctctttagggtaaccatcatgtatgcccacgagggtgatagtaattcgtgagactgaagttgcttagagtacttctttgaccaaggaataccacagacaccctaccgatagaacagtggctcagatcttacttgctcctgcttacgaagtattcccaatcactggtcatctgaccctacttgaacactcctgaacagtcatgttttttaaaatcttcctttatatcaagtcagagagtatacttctataaatttcactcatggatgttaggaaatctagtcatcttccctgtgattgccctgttaagtatttaaccatagctatcatgtgtttcccaaatcttctctagattaaatatcttcagttacttcaaccattcttttacacgtcatgatttttgatccttcatgatactgtcacattgttgactcattagaatgtttacctacttcagttctatgtataggaggtgtttagaacccaagtactgtaatgtattgttatatctcatcttgttagagtcctcttgtgggatgctgcagactcacagtgactatgatactgcctcctaagcaaggacacaccccagtgatgagaaataggcaaaccatggtcttgaaatgcctaggagtataggctggggtttggagggaaatagttggatgacctcaggaaatagaaaaaaacaggcagctgctttttggagagagtggagatgagatcagtgcctacctggaacaaaaccctctggcattctagactggctgaatatgtagtgtagggactttatcatctgtcagaaaatctcctttaagaagaagcgatcaagaagtttagtcctggccaggtgtggtggctcacgcctgtaatcccaacactttgggaggccaaggcaggcggattacttgaggtcagaagttcaagaccagcctggccaatgtatggtgaaaccccgtctctaccaaaaatgtaaaaaattagccaggtgtgatggcacacacctgcaatcccagctactcaggaggctgaggcagaagaatcatttgaacctgggatgcagaggttgcagtgagccgagatcctgccactgcactccagcctgggtgacggagcgagactccgtctcaaaaagagttcagcccctatcctgtacagatgagaaaatagacctggaggaaacccaagtctatcaacagcagagaccacaacccatgtcagtgcaaagaagccaagtgttgcactaccctattgggatccagctcacattgagccagttttgttttttgagctgttacgcaagtgccttctgtcgaagagaagctttactcaattctacagggcagcccccttcctattttcagtggtagaaaagatgagacctggggatccacacttgaggctgtagattggtgctggcagccctgcttctgcaactgagtctcagccctagtcttgaccttgttctttttctctaacaagccttttctctttctaaccctccctcccaatatacccacttcatactatccattgttcatacacttctctacctttattcctcttctcatattcctcccttcgccagagtgtctttttccaccatcttcacctgagttcaattcatccttcaaggtcccggctcaaattccaccttcaccaaagagcttcccagttttctccagtaaaaaatagtttccctcccttgtgttcccaagggggaagggaggaaaaaggataaacaagcattaagcacttgatccattttaggcacttcgcatgtgtcacttgtatgaggtaggtattgccattttacttaatgataaaagagttggagagggtaagctgtctgtaaaaggtcaaggtcatataactagtaagtggtggtgctggggatttgaactcagtctaacttcagaatataactttacagcctaccacatttggtctcctattacatttacttttgtcagttcactcctctagcatgctgttttgcaaatagcattttagttaaatgtttgtgacattgacttctcttgcttccttactctgtttctccaggatttgtggcaggagtctccctgccttaatcataaaggaattgagtaaattgggggtggagctgggcaggtggagagcctgaaagagtgtgcctcctgacgtgtgggctccctggagataagtaaagcctgccagcctgacaagtccattgccagggatattgtagacatttccaacgctctagaaaggatattgctctatattcacagactcttagaatgttagagctggaaggggattaagaaatcacctagcttactggttttcaaacatgcagttgtgggccccgttaaaaatgggtcttttgagaagtatatacttggaaaaaaaagttggagaagcagctgtagtaatgctgcccctctcatccccacacacaaacatctgaaaaatccctagaactgaggagccgagtttggaaagtcaatagtgtaacctccctcattttacagatgcagagccttaacatcaagtctagtcatgaccaaggctgcacagcccgttagtttgggagccaatacctaatgtcttctgaggttctaattccaatgctttctgtggaagaatcatacatacgcagtatttcttaagtggctgtttgcggcaaagcactgaaatagttgctatgaggacgacaaatatgaacgaccccagttttacccactcatgagctcacagttgaggccagtgaagaacctagagacaaaacacgcacttaactataacttatagttccctaactacgattgctgagacaaggatcgtagttatggccagttatgcggggagggtgggctgaacaatgagactaccggattgagagaggcccgggtctcgcgcggagagaaggggcaggaggaggcagagggtcgaacttaggtgagaaatatggctggcgggccccacaccagggtccggcacagtccagctggaaaaggggtctctcacagagtgggtggccgagttaggccgctctccacgggtattcatggctcggtccacccccattcctgtcctggctgcgtaatccgaaggacgctgggaggaaggggcgggacttgtggcggaagttcctaggccagcctgtcacgtgggagggaggctcggcgctcaggtgagtggcgggtgatctgcggtctctggcttaaagcgtcgcaagccatgagtgcccacaaggtgtgtggtcatcctatatccgggcagtgacgggccctattttcggtttggagctggactcaggaaggttacaaactggttccaaccaagtctgaatctggagacggaccaagctatcttttgaggcacccaagctctgggtagaagccagagcaaagctgtcctcatgagtgtctccgtcgggaacggaggcttccaggtggtctggcttcaggaatgaggttggggtggctggtggctgctaccaggagtccatagcttcccacagcctttctctcttccccaattgtctaaggcgactcctgcgacaggaagctgtctgggaagcatccttcatgtggcctctgcccctttaagtcacattggaagtgggaaggggaagggagtgggcacaagggaatgtcaggcggcttcttagtcgtggagagggacggtgggggtgaccccctctcctcttggcttgacaggaagcatggcactctggcgggcataccagcgggccctggccgctcacccgtggaaagtacaggtcctgacagctggtgagtgtccctctaggacttgagtgggaccagggcagactgatttggaagccagaggcttgccccactgcaccaccctcacttcctgtttctattcggctctcttgaagggttggctgtctttcatcctacactgtccccagtctgttttggagggtggtccccaaggctgtttttaaggggtatgcgtagttggccaagctgtgcagtagggttttaggatttcaaagtcctcaaaaagctgaacagtcagccctgaaggataaaggcattgccccaggaggcctcaacttggaaaacattttaccgtatgcaaagcactttcatatacgttatggcatagggcccccacaaaggtgtgtgagctaggagggttacttgagtccacat

SEQ ID NO: 8394 - DNA, 6000 bp, Homo sapiens
acacctcctatctccctggccctccttatttctcagtcttctctccagtgtcctactctgcagccaaacatcatctacctttgtcctgactcctcttcccttcaacttttgcacagtccattctgccagtatctttgtttttctctccctgtaagacctggctcaagggtcttcctctttacggatcttcccacctggacctcctgtctcctccttcctgaaggctcccaacatgttttgcctggatgtgtgtctgactttatgacctctatttgtgctgatagttcttgcagacatctgtgcacccctgccagacctggagttccttgaaggccacaactgtgtctgtcacatctatgtcctcagggcagagccagtgcttggatgtttgctcaaaataggcatccattaaatggaatctgagggcagaaaggagtaaggaagggaccgaataaatggatttggtctggtgtccatgtgcctctcattccccttcctgcccctctgacttccaaagctatacatcctggccacaagttaccttggccatgttttaggctgaagtacacagtgggccagtgaaaaagaaacaaggagaagagtactgcttagaagtccagaaatctggagtatggtcttaactttcaaactaagactttggacaagtcatttccctatctggatctccagtctgcttccctaggaaagcaagaggactgaattagatgatcttcccaattctttgtctttggttctaatcccttttcttttcctctgtgcccatgataagaacatttcctctgctgcaaaatactgtcataatgtagattatttatgacagttgtagatcacttttcttatatgccatgctgaagcttcccaacaagtacagagggttcacgttctcgatccagctcagacacggtcttatgcttcatcctgattttaaccagaagtcgcttttacttactttaagaaagttggaaacctccaattcctggaacaacaccttccttttgagtaatgctttgccttggtaggaatccccctcttttatctgcaccattgtttattgcaggctgctagtttatttgcctatttgggaaactgggttatctgcagaaggagaccttggaagtgccaggagtagtttaagaagactgagtactcattagctgcttcccactgtggaagtcagggatcttgttgaaacagatttctactgcaaaaggagcagcatctaatggcccaaaacttcaaagcagaagtgagcaagtaaaattaatgtatcagaaggaatgcctggaacaatataatggtggtgtgcttttacactgacagtaatccccatgaatgtaggtttctcgcaggtcatttggcctgtgctactggaatcaagattggcttgctccagagggaaactctgccatgggcacaacaacaggggagatttgtagggctttttctgtggagaccagttgcaagttcacatgactcataggctcaagagctgaaatgaacattaagagattattgagttcagccaaccctctcaccccattttacaagggaggaaactgaaacctaagaaagttaatgcttttccaaagatcattcaactagtaagggaaggaacaagagtcttttgaaatagatgtttttattcctgttttgcagatgaaaaatcgaaggctctaggacacagaagtaggaagtaggggagctaaggttcgaaccttggtctgcctgattataaggcctatgtctccagccactgtccacctgcatcaggctatactatttacaaagaaaatctaagaatggaggaagaaggctgggtgcatgcagagaaggagataatggcctccagtatctctgattttgatgccatttgtctctaagtcttgccacagagctactgctggtcttacctgaacacatctgcagattcgttttccctgtctctttccaggctcctttctccttctcaacacctcagctgactccaagcacaccatcctgagtccgtggatgaggagcagcagtgagcactgcacactggccgtctcggtgcacaggcacctgcagccctctggaaggtacattgcccagctgctgccccacaacgaggctgcaagagagatcctcctgatgcccactccagggaagcatgggtaagtacttctccatgtccaaaattgattttataccaggtgatttggcttttggttacacatttccagagtctgtgacatctacttacaaactcatgattgtcctttaatcggtaggtccaggttgagcaattactactaatatcccttaggtagtgtcttgggtactgatttgtgggtccctctgacttccctggctagtggcccttccagaagccagaggaccagctgccagagtggggatttcatgagtgggtgttaaagatgttcatttcccaaagttcagatacagccaagaagaaaacagtcaaagaaatgttaaaaggccagaatgaaagtaatttaatatggtagaaactgggttttaccagcagaagttgggcaggaagggaaaggacaaagtactttggccatccaagcgggttctatgggagtttggtaccccagagcaggattagtcatggatactacgccaatgtaattcagtagagattggaacagagctttgtgctacaaccaccaagacatatgacagtggaatcctctaagctttctggagatacttgcttactcagtgatccatcaggcctctgcggtagtgacattggaaagcaaacttaaactagggcacttctgtgcctggcttttgtttttccattccataagtataaataccatcctatgacctcagcgttgagggaccccagatctgattactttagcaacaaggatccttctttgtgacttgtttacaggagaaaaagcccaactgtctagctatgcttagacttggcttccttctaagagaataccttttcagaagggtcccacctgaacgataactgttacccattgtccatccccatggtgtgcaggggagagatcctgcctgttgctttggcaataaggctgaatggcctccttcgtaatttcttgaaagtcttctccccactcccagccattaacccatctgtatttagttgcacttagaaggactacaagctgctgcagtctcatcaggaatgaaatcttgacatcaaaaagaatgctctccccattcctaaactcatatccatcttcttgcctctgaaatgcctctctgggctggctgagaaggtcccagctaccaaggactcttgctctattcaccagatatcagtgtggcatagcaggtgtctgggctgccccttgtttgggaccagctatcttctggcaccaagcctccctccagcacggcttctctttccagtaagaagcctggatgggaagacttcttatctgagggcagggctatgtgccatcctataggtatttgcccagcctcatattctgagagctgcatattctgacttatcactctcaacattccttccttccctaccaggactggcagagaccagggagtgctgcttgaggcttctgagccctcaggcatcagtccattgtggtgctggtggcgggtgggaggattcactgatgtggctgggagaggtggagttggagtctgagaatacccatgagtgtgagaaaaggtgccagaggggtttcagcacttcttgtgtggcctggcctgtttccctgtgtagcatagtcaggaaaataactcctcgggtatgactggccatagggccttgcaaatagtttttccctctttacctttctatgctcatataggaagtcaattctcatttaaaagaggagaaaactgaggcagagagaggaaataggaagtgatgtggtccaaactggactctttccaggagacctgaagcctcttagggagaaagggtggagttgggaaagagaaagggaaatatgaaagaatcttgcaaaaaaaaaaaaaaaaaaaaaagagcgattattttgattatttgatccttcaagacaaatgagccctgggacttgccatgtcagtgccttcaggggcagccttccctccacatgatgccatggtcacctgcctcaacgtccacctggccacccaacttatcctcttcccaaggcaatgcctccatcaccagaggagctgctctgtcctctggagggtgtgagttgagcaggagagaggaattgggactgagctgaggcaaattcagtgacttgatggctttgtctggggcagagtttagtgatgagctggagtgattccagatttaaagatgcctggaccagcctcctcacctcccatgagatctgtgtggtgagggtagaaggtggcagcagaaaggacaatcaatggaccatccactgcagcgcagagctactcttgtgggtgccttggccagctgcaaggaacagggcatttgcccagcaaatcaaaacttgcccagctttgcactgttcagagtttgggatcacaaaggatggagatttgcctgctctctgattatggggtcgctgctagtctcaagaatctttggatttgcagtactcagcagtttgccttgccgaaagcttgctctgtttaatgtcagagatgacctcactagcatagtgctcagagcagcgagggggacacagtgatatcctggtgatgttgaatgtgatgattacgaatggggctggcttcctctcataacaggagacggtggtttggggaccactatttggaaaacaacattccgtgtttgtagtaacgagggaggaagttgtaataataaagtcggctggggagagcctgactcagaggagtgggctgaggaatgacaagtcagacgccaccaagttccccggaaaccactgtgtcgtgagcaggtggtgccggctgtcgtgcacgggtggggcaggagcagcagactggttggaagcacccggaggcagaaggcaggggaaaggcagttggagaagcacagcagctgctgccttcctggttgcctggaaagcagcagagtatatgaggtctaatgaatcacagagcatgagtggccacgttggccaaggctgccgggctttggctggagtctcgcaggggacagacagatgagtgcccagcctgctcatctgcatggccagaatgaccagagaagcaaggaagcagagaaataggggctaccaaacagcctaggcccggctgatcacagagtcacataggcataggacatcttagctagaaattagtggccataaagtccccatgaactgaatgaataggataatacttatgtaaaatggtgagctgtgaaatggcatatggaaaatggctcgcacagtgcctggctatcattggcactaataagtgctaggtccttttgggttcaaacattcatctcaccatcatggattgagtgcctcttgtgtggcaggtgccaaagatgacacagccaaagacaacaaggtcacagctttcaaggaacatctagtccagtaaggaagacacaagcagaatagcaacagcacatgcttatgtgaatgttttaaaattgaggctcgtattattaagaggctgagctaagatcgctagtggcagatccagcagaagcagccggctagggagccacccactgcaccacactgccattctgatgtgtctcagaagatcaatccagcagcaattgtctgtgtaaaattggtcctctcccggatgcaagaacgcaagcttgatggtgggtggcgtgtagggctataggagacactctccagggctcctacccagaaggccacctcgtgtcttgtttcctttcgaagcacatgactttttcccacagcagcgggtatctggggactttattatgtatgaccagaactacacagtgtgtggagggaagaattgggcctcaaggggatagaagttgccaatcatttggattactaatacttgaaaagatat

SEQ ID NO: 8395 - DNA, 6000 bp, Homo sapiens
attccttcttggatttgagctctcctgcccacttctacctttcactgatgcctctaagcttaagcctaacaggaaagactgtctttgtcagagataatgcaagtggctctcagatttggttgtctgaaattggggacctggggagtgacatctgtccttagatccttctatttcttctgcctgtgctgccctctgtcagagtctcctctagataattcaagggaaataattttctttttctttcttttctatttttttttttttttgatgatggagttttgctcttgttgcacaggctggagtgcaatggcgtgatttcagctcactgcaacctccgcttcccggattcaagccatcctcctgccacagcctcccgagtagctggattacaggtgcctgccaccatgcccggctaattttggtattttttaaaagagacggggtttcgccatgttggtcaggctggtctcaaactcctgacctcaagtgatctgcccgcctcggcctcccaaagtgctgggattacaggcgtgagccactgtgcaggtctcttttacttttctttaggcaaactgggtcacaccttcatgctagaactttgcatattctataggggctggggggggggtgggggaaatttctcagatcaccacagggcaccatcactgaagatcaaaccactttacacaaccagcaaagacatatcattgtagcagtattaagttttacacttggcatttgggtgagaaacaaagaaagtttggggcatttcaaacaataaaagaagcaggcttttgaaatgcaaagatatagatccctttcaaggaatcgaatataagaataaaaggagggagaggagttgagggtagtgggctggtgaaaggagttgtttaatggaaagagaaagatccagaaaggtgactgtcagatcccttagataaagccacccatctacccgtcaaagatgagaggaaaatccagctggctttattcttttgacaaagattcactgatgtggcagaaagatgaggtaaggggttggtaatagctcatcctcattcaccacgtggtttaaactattccatcactcactctataagaaagccttgcaggaaacccaggacatgcggttttgacaggatctatagtggcaaggaaaatggagaggaacacagaggaaaggggagctgatgtattatttacagtggagaacttgaacagagtcaactgcaggagtcagcccaaagacttgtatctgtatgactgtggaataaagacagacagatctttgaattttcactgccgctctttttgctgctgggccagcatgtgtgcgactcatcttctcactgtgctgcaatctgccctgctactgcttacctttccctatggcccagaagaggtaaagacctcaacagaaacctgtctgggcctctgtgggtgaaatttcgttaggttggcacagagggtgtctcgctgattgtgacaggtctaataagcgtgcagatggcaagaagcacacacacagccactcgcgcacacacagcctccctgaagtcatgcagtgggcagagaggagggactcagagaatctgatccaaaaggaacaaaggctgcagcctctgcagtgggctgagcgagaatgatggggagacggctacaggaaacgagaagcgaagtgtgagaatccacagcaaaagccgccacagagcatatgcatcggacttcacagcttcctcctgcttccagcttgcatttgctccatatgctgctttacactgctttccgggccataatgggtttcattccatagtttttatactaacatgaatgactcacatctgctccagtacccaatttgctctctaatgtcttcggctgtgaggagagaacagcttacacagaactcgccaacaacaggagtggtaaagaaggtcctgatccaggacaagaaaggtcagaaccctaaatgcgtcagctgggagggtctttgagagaacatgacattgccgatgggaaaccacagacccagaggaatgaggagcttggctcaacaatatcaagactgaggaggtagatctgttttaggagatccaggagaaccaggagagtcctagttcagagtgtatttattttttttcatttcctgccatgttaagtcttttgctaggagcttttcctccccatattggctgtgataagaaaaaagtaacttggattaatcgccaatgatagctaatcccccgctgggatcaaccatactctgcattacttaagcttgttattttatttattcattttttgagacagggtctcgctccatcacccaggctggagtgcagtggtgagatcatagctcgctgcagcctcaaaatcctgggctcaagtaatcctcctgtcttagcctcccaattggctgggactagagacacctgccacttcgcctggctattttgttgttgttgttgttgtttagagacaagctctcgctatgttgcccaggcttaaagctggttattaaagcgtttcaaatatattcctgagcatgggggacccctggatagactgggttcctggagagacctacagaactaggccccgcatggacactcacttcacttccagatgtttgaagtcccacttgaaatctacttcagtcctaatgatatttactggtttgacaacccaaactgatatctgatatgatctctggatggatcagctaatgacacctagcaaaactggattcccttgacagcttccataggcccaggaaatcttcctcacttgagtagaggacaaaataatgatttgagaagaaaatcattcctggaaggaaattcccactctctgagacattgcagtccctgcacggagctgccttcaccccagggcctcagtttccccatatgccaaacagtcagaatgaggcacctcagcatctcagcagtgtggtgagcagcgtggtggtgctgcaccatctcaaaagcttggcggtgttcttgtgtaactgtctgccatctgttactcagaagcggcattacaaagcgctgagcaatggactcctgtgctgcagcttctgcctggagccaacagcagctcagcagcttgcctgggggtcccctgcagagcctgcagcagaacgctttgcaggcccgaaactgcaggtcccgggtgaggctcctgaaagaggtccaaggtgcttgggatgctgcagaggtgagttctcttgctgctccccctacccctcccatgatgatcatctacctgggcctttgctgggacaaagcattggctggggagcctactcccacctttcagtgttcagagttctgataaaggcaaatgctagatcaaccctggggttctgtgtgatggtctaagagcgcaggtagatcttgaaagggctggcaacagtgctcaccttttctgggctgtttaatttcaactgcggttcccaaccccaaacatcttatctacagtccagtcaagaactctctgaggttgaggcaggacttccctgtggctgaaagataaggtaccaaaaacaggaggctttgagtagacgcctccatttctcagtacatgtctttggggagacatcttattgaagaaggaattccagagccctgatttacagctgtctcacctgtgcggaggtatgggagcttgccctacactgagctttatggggagagaggggcagggagaatggtggctgccacagtgggtgcatcgttctcacctccccaagaaactcgatgaagcaagcaaccctccaacaaaaatggcatggttcccgctgcctctgctccccagacagagcaaggtttccccactttgagtggtcagataacaccagcaccttgcattcagctttcaccactactcatttgcttgtcagaggaggtattttccctccattttacagatgaggaatcgaagactgggagaaggtaaatgacttacccaagactcacacagtgagtgtgacagctaggtcagtactctctggtcagtgatctggccgtgattccagcctacttgagcctacatgggaattggagttagaatttgctttgcttctagatccaagcggttttaatctgcaagtgggagggggatacaattcccaaaggcccttgggaaaaggggcttttgaaagatcaccctctgcacccagtatcctcctgcccagggtcactttccaagaatcccaagtggttgttccaactttggacctcttttcttgcaagcacaaagccctgatgcttacagggagagaaaacctttatgggagataattgcgccttaattttttaaaggatatctttaaagttaaaattagaccagctcagctttccttccgttaagcagaaaaagttaccaggcacctgcaggcaggcatagaaacaccctggggagttggctgaccgcggccttggccctcagtagccaggcaagtgaaccgcgggtttggggcagcagccctgccggcgccctggaatcccagccttggctgtggtaggacgagcacattgggggtgggaccccggcttcagcgccacgtgcagcccccgcgatgagcgggaaagtcctcccaggcacagcgccgcctggcgagggccggcccttgggtcccagctggcagctgggggtggcgggcatcccgagtgcaccgctcccgccccgccccgccttgccccaacccacgatggtctgggagctgcgcccagggcttggcgctggcggccccgcaacagcaccgagcgtttcggtcggcgggcggcggtagcgccccctctcagagccccgctcactcccacctgggctcgctccgagtcggcctgtctgtcgggcccgccctccccgctcactccctccgccctcgtgctcctcccggggtgcttggcacagcctcggattcctccctctcgctgctcgagtcagtttccctatcggcggcagcgggcaaggcggcggcggcggcggcggcagccgcggtggcggcgtggggaacatctcggcagccaccgcgcttctcccgctggagcgggcgtccagcttggctgccctcggtccttccctgccacgtttcgggtcgccctgcaccccccacccaggctcgcttctcttcgaagcgggaagggcgccttgcaggatcctgccgcccctccaaccggatcctgggtctagagctccccagagcgaggcgctcgccaggactcctgccccgccaaccctgaccgccggggggtgcccccgggacgtagcgccgcggagaggaagcggcaaaggggaccatgcggcgcctgactcgtcggctggttctgccagtcttcggggtgctctggatcacggtgctgctgttcttctgggtaaccaagaggaagttggaggtgccgacgggacctgaagtgcagacccctaaggtaggcggcttgccggcgcgctggcgctgagcggtggcttgcgggagggcgcgcagcccgcgtgccgggtttgcgggctcccgggaaaccagggcgagggtctgggtgctgcgagcaggtaacagccgccggatgtggctaccatgtgatgtttctggattttaaaacgctcgggggcatctccggacccgcggtgtgcatgagtggcagtgggtgtgggtggtgggcgcgcgctcgcctgcggagcggggctcccaacttgagctgcgcgcgagggtcccggggcggagggggctctgcggacgggcggcccaggggctggcggtctccgggcgctgccagagagtcgccggcggtcgggtcgggccagcgcccgggcgaagtgtggcggctgcgctgacctccttcccgcagctgccaggcccgacctggggaggccggaggccgggtgcgccgcgcgcgcctgtgcgttgcgggcgagcgccttgcagcctcccgggcggctgccacccctgttctctaactgttcccgaccctctcagctgcattggaagttgaatgtgcccag

SEQ ID NO: 8396 - DNA, 6000 bp, Homo sapiens
tccacagcccacaagaagtactgctggattatcacaggtattcatttaaggcagaaaggctattaagtcagctggtggtgactgctgcctggcctgggactcactctttggggcagtgggcttccctgtggcccaggaaaggtctagaaatgctgttgaagagtcaactcttggaatcaagggcccccaagagcttgcttggtgctttacctccctgtggctgagccagtacctgaaaccagctagtctcagaggctcacccaaggcccttgatgtagtatctgggtatcactgctggttattcagagccaaagggcttttcagctagcaggtgatgaacgctgccatgactgggtctttcccttcaaagcagtgggttcccttctggcccagggtgtttctaggaatgtcacctggaagctagggcctggaacagggacctcattattctgactggtgccatatctgttgtggctgagctggtatccaagatgcaaggcagagtcctcctcaactctttcctctcctcttctcaagcagcaggaaggggtctcttttagagttgtgagttgtgcagcctgggattggggaggggtgatgccagcactcccttggctgccccagctggtgtctcagtatattttgcacccctcagtccactgtctctggccctagttcagtactaggacttgtctaagaattgcagttcttttggcctaaactgcctttcaggtttagtcagagatccagagcacttcagccctcagtggtgaggtttgtgggaactgaaattctgactgctggaattagtgattcccctttggctgggactggtttgaatgctccctttatgtgtgggcatcagctgaactttgtctggctttcctttttgctgtaacaggacaacactgagtttaatgcctcaccattgatgtgttctccctcacccagtgcacgaaaatgctctttgcaccacaccacagctgccagggtgtgatggaggggtggcttcagtgcttcaagactccttctgcaaccttttcagtgcctttttcagcaacacaaagttaaaagcaggtactgcaagtgctcacttgagttttggttcttgtgaaggagctttgcttgcacagatagttgttaaattggtgtccttgttggggaaacaatcagtggagccttctattccaccatcttgctccacctcccatagtactatacatctcttcttttggctagttctgtttggatatttttgctataataaaactgtagttgtaagtatagtgctttccagagttctttaattttttttagtgaattatcaagcttgaagggttagtggggattcctaaatatggtagccagctgtttagaagtataggtagcttacgtaaccttgaacttgcagctgatgtctgaagtaaggacagtgttatggaggaccatgtccttaacttttgaagtttggctcaactctagtagttgttgtcaaaagttgatgtaacatgcctagtaattttaggaatgctggatattgtaaaggctatattcttacttgtctggatttaattgacttcctttaaacagtgttggactgtgttaggttacttgtgagtcatcttgatcctttgggggattgattttatgttttgttaagaagatagcttttattctacctaattccaatactctgtagatcatttctactactaaaccatggccttctgggatctcccagctagctgtttcctggagattataaatgactctaacacatctttcatatgcaaaccaactaattcagggctcatacgttccccaaccacttcctttatcaggactctacaccctgggccactattctcctgccctaatcagccaggtccaggtaacagaaaagtaaagacagccgctgtaccccagagcctgctaaaagtattcaaacgagctaatcctaagcctgattaccttgtcatgcccactctttcctgcagaaactacagtaaaggctcttgcccaccttgacccctcactccagctgcctcctaacactggtgcttctccatgtggtcttgggtggtgtgctgtgtcttctgtttgtagggatctgtcgatataaaccttttccttcacgatagtcatttttgtgtctgcatatgttaccacattgattaaaaagagtaagttctgtatgattccacttacccgaaattcaaaagcagacaaaattaacttatggtgttagaagtcagggtagtggtgttttttttttttgctttttttttggttttttttttgctttttttttgttttttttttttttcctggaaggaggatgtaaggaggcaggagcacagatcctgatatgctgataatctgtatcttgacctaggtgcagcttgcaagagggtgttcagtttgtgcaaatcaaccaagctgtatatttataattgggcactttcttcttgcatgtaatacagaccagttgcattattggttccaattttctacctcccactatatccctgccctttaccatgtaactttacaaatagtctctcactttggctctagaatccaccatatgacttgatttggccaatacaataaataggaagtaagggtgtgcttgttcttggcctgagcctgaagaggccttgtgtgtttcttctactctcgtacttttgttattaacattatatagacatggtggagctagctcactcatcccaggatgagagcctcagctaagtttctccatccaaacacagcctggagctgggctctaacttgttacacagatgaatgagtgaatattgttaagataagtcaagcccagcccagatttctgacccacagccaacccacagatgcataagctgaagatgactggttttatcaagctaattgttataatagtggagaaaagatcatgaggacaaaaagtgggcagagtcggaagaaaagagaggaagaaattgagacagaagacatttcatttaaaaaaatattccattgagctgggtttgaaatagtgcactgcctgttctcctaatgctgtatggtatcatgaaatctattgtttactgagtctatgagccagcttcctagggaggctatggcaattgaggacagggaagaggtaacactcaggaacatagaaggagaatttgggtccaagtgggtggagggaaaaataactgggtttagttttgggtagggctggttttgaggtctctgaaggacatgtaagtggagttttccagcagggagaaaacgcagagctaaagctcatatctttgctggcaatctagatttgggcatcttcaacaagcaggttgtagctgaggaagctgggactggacttgtactctaaagccagtgcaaaaaaagcttgaaacggctatgatggctaagacctggcttttccatgaaaaatgcttcggtcagtatgagtgattccaaagtggtgatcaattaaaaactgaagtatgattagcattaattataacccaatgggaatatgataaacgactcttggtcagcaagcagagggtgccctgtagtgctaaagcatcaccatataccatgtgtgccaagaatcaggagacaccccaaacgggagcagatgaggggttgtgtctgtcattggaccagctggcctgatccagcagaagtggatggagatacactgaatggggctcctgggaggcgtgagttgaaggggaaggaagagaagagacctccaaagtaagggaagagtgaaaaatgagaaggactggggtggagccccaagtagggaccagaggagaaaacagggataaagtaatcaagggagatgggacaggaagatgaaagaatgaggtaaacagcaggtgggaagaggaggtcaacctaaaggagaaagccgggtcgaagaaagaaggaagagaagaaaagaagggttgggaaacagaggaggaggcagccaagaaagcctggaagctgaatcatagaacggaagaggtagaagacggaggggctggaggataacataaaggtgggaaacggaagagagaaagaaccgcgtctgcgtgtatgacggctagacaggagttcagagaacagcggggtcgccaggccaccacctgatgggccacggctcattggctctaggagctgggaaagggcatcccaggaaagaagccctagactttagcctgagtctgggccactctaggggaccgggagtggggtggcgggagaggacgcgcagaatctcgacttctggccccaatctgtgcatgatcacccgagctcagcggacgctcctctctgacccaggcaggcggctcagggacgcgtgcggggatgcagagagaaaccgctgaggaattagggccgggagagactggtacctgccgggggcgtgtggtggggcagagctggcactgatgctgagagtggctaaggagcgcggcgccccagagcagaagggctggcagacgctcagagagccaggatggttcagggtccaaggaaggtcctatgttgggtgggagctgtgagggagtgaaagtgcatgaggaaccggaggagatggaaagaccttggcttgggtgttcgagggtgggactgcgtggtgaccgacggcacagagggtgtgtgttggggcggaagaaccaccccagctgaatcgtccccgtggggttttcttcccgtgtcttagttccagaagtatgcgcatcagacgctaatagttgaggaacaagtcatggaaggacagcctaagcgggaggtgaatgtaaagccgtggagagggcgggcgaactaagaaggccttcgttctcctccggccaccgcggctgcatccttgagaaaggggtattgctgcgaaccgcgccagggctggacgcggcgaggtgggaggcaggatggaggggcgggagccaaggccgagggggcggacacgggtggcgtctggcgctccataaaggggttgcgggggccgcgctctcttctgggagggcagcggccaccggcgaggaacacggcgcgatgcaggttcagtgccagcagagcccagtgctggcaggcagcgccactttggtcgcccttggggcactggccttgtacgtcgcgaagcctccggctacgggaagcacacggagagcctgaagccggcggctacccgcctgccagcccgcgccgcctggttcctgcaggagctgccttccttcgcggtgcccgcggggatcctcgcccggcagcccctctccctcttcgggccacctgggacggtacttctgggcctcttctgcctacattacttccacaggtagcgtttttcccttgcgggcgcccagtgcagcgcactgccctgctcccggcgtccaggagcgcagcgtagagcgcgcaccgaggaacgccaaggaggcagcgtggggcgctgtgaggaacgcggaggccagcctgcctggcgcacctggcgggggccggggccggggcttggacgctagagagttgacaagcggctgcggcacagacgccgccttcactcccccaggacctcatccgctctcagcagctccaaatcctctggctgctcgagagaaagaggtcctgcgggcgggaggcgacctggaaagctcaggttggggagacctattggacaggactgttccttaactgcgcgcaggcggcggttacctgtggcatatcgcgccccgccccgcttccctttcttccttcaccttttccttgcagggtggggacagattagttctgggatcttgggagagtcttacgcgtttggcatctcccgagggaaactcagctcagaggttctcattgatttagtctttgcaggtctaaggaggaaggtgggtagagcccaaatccagacttcacagatggggaagagaatatagtgagatcccactgactcaagcgagggtccccgcttcttaggcccctcccaaaagggaccaagcacaccaccaattcatctacctttcc

SEQ ID NO: 8397 - DNA, 6000 bp, Homo sapiens
actgatgacattttcttgtgaaattccttctcctggctcatcctggctcaaaagctcccccattgagtaccttgtgacccccactcctgcccgccagagaacaacccccctttttcctttaccttcccaaatcctataaaaccgccccacccctgtctcccttggctgactttcttttcagactcagcccacctgcacccaggtgattaaaagctttattgctcacacaaagcctgtttggtggtctcttcacacggacgcgcatgaaatgtataatgctttgtcagctccaaatcataccctcaactttccattttacatctccgaaatctggatgtatcttagagtcgatgatgcaattataattggtagcttcctttctttatgttagtacataaaaataagggtgcatcctacaaatgatggcttctgagattagataaaatacctttctattagctctgtggttctctgcctgtgtattgccaggaggaaggaagtggagcatttcaggtgaggcacagggttttggtatcaattcctaagattcctttcatggtccagcccctggtgtgcattatcctacagttcctccctctatcgcaccctcagccacttggtgtgtctccttatttctgctcctcttgcctaccagcatgtgcctgatgactgaatcctgcccacccaaatgtcaagagcctaccagagatggcttattctcctccactctcctcagtgcatgtgggtatgtgtgtttggagatgactggaaaagcacagtggctacccattaaactgacttaggggtcacactagagaggaagaccatgaagaaaactgagttccagcctgacagcagaagggcagagctttctgggctactggctctaagggcaatgcatatatctgctgatttaaaataataataacaataatggctttgggtttccttaggttatcctccaacccaaagaaaccagtgggcagacatgtatacatggagtggactgggtcagctctttggcttcctagcatgttctgccatctctttttttctgatgacagaacaagcccttgcccacagggtaaaaacctgatgccagcctggccccctggagtccttctaggaccctggaagagagctgttctctttctctttgttttgttaattttaagctgcttccttgccatgcaaagagagaaagcccaagcaaagaccagcataggcagagagccggtagagcggcctgggtccttgtatcctgtgaagcatcacggttatccttctctgcacatgggccagtgcattcctgttctgcttaaacaagcttaagttgttccttcgagtcaatacaagataagatattttaaacctctctctactttaaactatccctctagcttagctgttctttttgaaagttatttgcaacaaacaattcaagtttgagatttgggagggcagaatgcccatattctgtgttgattgaaaggagattcctgggccttaggtccctgctttggttgagaagttgtgatgataattaaagagcctgcgtagattctcactagaggcagggctctgccttgagttgggtcggggtgccaacaggctgctctggatttatccgaagtccttatcagggtaccggatggggcattcaatgaagtttgcaccataaagccctaagaactccaggcttgaagattctctgcaaaaagtgttaccatagccagtcattttggtttgccataaccgataagggcttatctttctgacagcacttaccaacctagttcctctgatttttgagtcatgtcctagaaaaagagctgagcccaaggaactacagcttggaggatatatctgatctatctgcgatggcaggaaagcatgcatctagttgatctaaaaactagatggcattattgaggagttggacaggcggtcttaggaacaacctcgttttatactttttaaaaataggaatttacttaaaggcaacttccatctgctctcattctggcagaggtattgtgataaaggctttcaggaatgtcaacagctcaggattggcattagctcatagataattcccgtctactaaattaaagtctatgagagattgatgcatgcaccagagtcttgaattattaggcaaggatcttgctaaagctggacatgggaaggttgctatgaaactcatttcaaaggctgtgtaggccaactcacctctgggaaaccaacgcttattattaaaccaatgcaactgctcaaaaactaaaactccatcactatctaagttccccatcatggtgtgtgaaatcatttccagaaaactcttcaaaagataccgaataaaaggcatcacaggccgggcacggtggctcatgcctgtaatcccagcactttgggaggcccaggctggtggatcacctgaggtcaggagtttgagaccagcctggccagcatggtgaaaccccatctctactagaaaaatacaaaaattagccgggtgtggtggtgcgcacctgtaatcccagctacttgggaggctgagccaggagaacctggcaggcggaggttgcagtgagccgagatcacgccattgcactgcagcccaggtgacagagtgagactccatctcaaaaaaaataaataaataaaaataaaaataaaaaaagccatcacgaaaagacatttctttatcaggtcagcaaattgattgctggtttcaatctctcaagaagtcagattcttttcagacactcctttgtgtttctttacaatgtaatcagtcattccagggtcagctatgaggcacactcccctggcctccctcataagcaatttaattgcaaagggttagcatactatttcttctctgctattctcagaattctcaattatgaaaacaaaaacaataattaaaaagttcttccagctgattttttttttttttttttttttgagacagagtctcacttaaactctgctgcccaggctgtagtgcagtggtgcaatctctgctcactgcaacctctgcctcccacgttcaaccaattctgctgccttcccccctgatccccgagtagctgggattacaggtgtgcaccaccacgtccggctaacttttgtatttttagtagatggggtttcgccatgttggccaggctggtctcgaactcctgacctcaagtgatccgcccgcttaagcctcccaaagtgctgggattacaggcgtgagccactgcgcctagccccacgtgcatttttttttttaagggaggcaggaaagaaggcatttgggcctcttatctgcaattttcttccgtgtaaacttatgtgaaggatctggagtgggacttggtggcttcaagccctggctccacttcttgatggctgcgcgacctgggttaagtcacgcaacctctctgaaccctagtttattcatctgtaaacaggtcaataatagcacgagattcgcagcgcgagtggagctcaaagtgcagggttgtccctggtgaacctatcacttttatatttatcctttgatgaagccagtacaattcctacctggttaaccagatacatcccacctcttccctcgagttcgcccttccccccgcctcgtgaagtccttgttctcttagctgtcttgaaaatcctatgcatcagcatgtaggaaagggcgcgccaggcgggggaagccacccccgcccaagcgcctccggcttcccttataaagggagggcccccttcgcgaccgcaagcgcgcccaggaagaccacagagccgccggtgcgcagcgaggtggcgatacgcgcccgggctcggcctgcgggtggtggcccaagcgtccgcctcgctggcctggcaggcgcgactgtgcgtgcgcagccgagggtggtggcggccggcaccccacgccaagggtggtggtggccggcaccccaccctcggccgccgcctccgcgtgtcaggtgccgtgagaagcgcgggaggagcggccgcaggcagcgcccagggatatgactggagccgactttccagaagcggcgcacgcaaagcccagctccgcacgcaaaggggaggcgacagcagaaacttcaacccgataaagttcgccggagcgcggagattcgcctcctcctgccactctccgccccgctcgggtcccgccccgctagctcccccaggcccccccagtcgccccagcttggctccccgccctgcgccaacggcttccatcgcagcctgggcggccccgcgcccaccagcgggcggcgccacctggagtggcctctacgcgggaaatctcagggccagctgcgccccaggagcctttgtgtgcccaagcactgtcggggccccggggcgggggagcggctacttttagggattcctgatctcgccgcaagaactggaaaaaatttagcatgccaaagagcctccactgaggtggcaatttgtttgcgagaacctaagataaaatttaaacaaccaaccaggggcgctgtgaggcaaaccgctgccactacactggctttccgggaagcaagctcaagtcgcggagagggaagggaggtcgtgcgctcggggcggggcgcgctcccaagtcgagcgcagcggccggggcaggttgtaccgagcgtggttctggggacaccgtgcggcctcgattggaggtggctgtgatgaagcgcggttaccgcacaatggaaacgtgggcacctccgctcccatgaaagcctgctggtagagctccgaggccggccggtgcgcctggacgggagtccgggtcaaagcggcctggtgtgcggcgcgccccgccccccgcaggccccgccctgccaggtcgcgctgccctccttctacccagtccttaaaacccggaggagcgggatggcgcgctttgactctggagtgggagtgggagcgagcgcttctgcgactccagttgtgagagccgcaagggcatgggaattgacgccactcaccgacccccagtctcaatctcaacgctgtgaggaaacctcgactttgccaggtccccaagggcagcggggctcggcgagcgaggcacccttctccgtccccatcccaatccaagcgctcctggcactgacgacgccaagagactcgagtgggagttaaagcttccagtgagggcagcaggtgtccaggccgggctgcgggttcctgttgacgtcttgccctaggcaaaggtcccagttccttctcggagccggctgtcccgcgccactggaaaccgcacctccccgcaggtcagtctgtctgccgaggcgctgcccggcgacctcttcagatggattattacaggtagcgggtggcgtggtaggtactttaaaggaaatcaagcgccaccgcctcgatgcccgcagcgttgtccccagattgcaggaaccgttacgcgccttgcggggaggggaagggtttggcgctgggttacagcgaggtggaaacacgccccttctcttctccaagggagagtgggttggggatgggaaggggcgtcttcggccatttctccagagagtcagctccgacctctccacccaacggcactcagtccccagaggctggggtaggggcgtggggcgcccgctcctgtctctgcacccctgagtgtcacgccttctcctctctgtccccagcatgggcaccagcctcagcccgaacgacccttggccgctaaacccgctgtccatccagcagaccacgctcctgctactcctgtcggtgctggccactgtgcatgtgggccagcggctgctgaggcaacggaggcggcagctccggtccgcgcccccgggcccgtttgcgtggccactgatcggaaacgcggcggcggtgggccaggcggctcacctctcgttcgctcgcctggcgcggcgctacggcgacgttttccagatccgcctgggcagctgccccatagtggtgctgaatggcgagcgcgccatccaccaggccctg

SEQ ID NO: 8398 - DNA, 6000 bp, Homo sapiens
ttttttcattacagagaggaaaagtactctcttgatgtagaaatgtatatttttctggattattcattgcatagaactctgtataacaaaaacaacagcataatcaatatcaataattggatgacctgattatgtagaatctaattatatagaaattttaaaatttacattgacatcatgtttatgaaactttaccagtaataataacagcaatatcgtttgctgagcaattactatgatcaggaactatgccaagcatcctatatacattttatccttcccacagcaccttgagggagagtttatgatccatgttttccaaacaaagatattgagatttaagaggttaaaaagcttccccaaggtcacacagctggatctgaaaaatctaacacagatattctgactctaaagccttggctcttaaccaatctgctattattttctgacctctaaattaatagctctagataatgattctgccattgagttaccattgataaagttgcaggacagagactagatatttccttaatttaataaggggcagaaatgaaaaacagaagtctcagaattttgtacaaacccaattcttttttttttttttttttttttttgagacggagtctcgctctgtccacccaggctggagtgcagtggtgtgatctctgctcactgcaagctccgcctcctgggttcacgccattctcctgcctcagcctcccaagtagctgggactacaggtgcccgccaccacgcccggctaattttttgtatttttagtagagacgggatttcaccatgttagccaggatggtctcgatctcctgacctcgtgatccacccgcctcaacctcccaaagtgctgggattacaggcgtgagccaccgcgcccagcccaaacccaattctttaatatcagttgctcaaatgtagaattgcaggtccctgatgtccaaagactgtgacaaattcattggcgactcagaggaagtggttgaccccacggtaatgcagagaggaggagagttgtgactgtgagtctgccaggaaggctgccccagtctgtggactgttgtgcagtagcagggtttacaactgggtgaggtacaagagtggtgttcagttggtcaaaacaaaacagagaagtaaaagtttaactgcaggaacaagtctccagggaagaggaacaacagcacttagaagtcaacaaagaattctcaaagtcatccccaaagcaaagaaccctggatctactcatcagcaaagaaaacctaaagaacaaaactgggaacccaatggttcacctgagattcttaggtatggaaaaatggctaattctaagctccactcactggccaggctaggggctattatgtaataacattttcttatgtagaaatcactatgaaactgagcctgtgactgaacagataggtgattagtgaaggctggcagagtaagaaatgaggtgagggacgactaagactgtattaacatatttcagaagcccgaagcaatggaagagacaatagaggtacctctgatttatgtaattcaaagtaaaaatgaaaggaatttaaacagagtattgtgcttgttttccctatgatgaaaacatattgagtgctttagtaaagtattaaatatttttaaaaatcttggtaacctgatcacatgtctaaattttctatagactagataaaaagtagggcctaattcacaatatttacacttggtctgaaaatgagtttgctaacagatcccctgaaggtttcctaggaaatagtttgtgaacatcagaacatctttcgaatatatcaaatcttagtgatatccctgtggagtcccctgaatggttgtgtcgtattgctttggttagataacagtggagacccggtgactcttaattccaagtccagaggaaagaatggcaatcaatatggaagactgcaattaagaaacattactgctattagaatgtaaattaccaccttcctccattcaacatgtcttctttccaaagccacagactgcagcagcctcactttttcctttcttagagccatagtcttcctcagccttgtgcctgtgatgcagcctttgataattctcgcaataaaaactcactcatgtatgacatttaggagggagcaaaaggtttgatttgccttggggccctggaaccattataaaaatgcctttaaagagaaatgaaaggcaaagaaaattaggggctcagaaactgactgaaccaaaaaggatgccaaatcactaggcactaggctgcctctccaatagttctagataaacagaagaccatttaatattgtttttttcccaagaatccaaatcagtctaaaagcagtttcgattggaaaagaggaagaatcaagtggccaagatgtagcctttcagtttcaatggtcaaagcaaaaaaaaaaaaaaaaaaagtcttaagacagactttgggcatcactggagtataaacatttaaagaacagggttcttgtcactccatgtcacaaacatgcctaaaatttcaagaaaatctcagctttcactaagcggcccgtcatagcaataagaggctacactctttccacaaaatctattccagtgaaatatggcccactcacattttcatttagctttctcttggttccttcatttggctgtgttctatttcctattgagtggagtctttagttataagctttccttagtgttatttagaaggcagccacttttctctccaagcccctttcattgagtgtgagccaaatatctgctactcacactgccttaaattcagggactctaagtaatttttggtagaggacatattctaaaagagacagtgaccttctgtctctccccacaggtcattctgtttatatccactagtaagtgtagtctaaccaagttggtgtggaaagtagcttccaagaaaatttaacttatagcaaggaaagaaaaatgttcttaggcaagaacgattcctgcaaattttataagacgtgaagcagcttagagtgtcctctacaaagccagtatccaagactgctggcaacagacccgactaattaaagtgaggtcctcattcagacggcctcagcatcacttcaacacttgcctaccccaggcctgctccaggtctattgaaaaagaatctgcaatccccatgtgattcatactcacattcatgtttgaggagtattggcctagagcagtggttctcaaccttcattgcacataggaatcaaccaggcatcttaaaaacaaattaaggctgtctggggcccacctgcagagagtcaaagttaatcagtttgggggtgtggcctaagcactgggatttttaaaaacggcccaggagattctgaggtgcaaggagggttgagagccactggcacaggggcagaagaggctatttcttccattccgccccctctttgttgcggaggcaaactgaggttcctggagtcagaatctatcagtcgtggtgactgccctggttgcactgtaagtatggggggacgtctccacgaaaaaaaactaactttctgccttgtgctctgcaggtccctccttctcccaccttccccaagtagctgctcctgacccccccacacaccttggcaaacgacaccagtggccgatagcaactggtgttttaaaaatactaatttggagccccatttgagacctacaacgggagagtctgcatcagattcggcctcagattctacagcatctgactacattcccaggtgtgtgtgatgcgcagccaggtttggaagctagtgaactccacagtaggtctagcctttcaccacgtgaagtcattaagggtttgtaagaatgaatgagctgtcaagagaggaaaggcctggtgcagtgttcctttattaattatgaggaaagtgatttattggcaatgataatgcttctcttggaaagggcaaagaatggttcgtcgattgctgcattaggttttttcccactcaaccttaatgctcggcttttactcctcactgtagtttaaaaccagcacgcctttcacacgaaacagactctgggtctttattcccaggtgaaacgcatctttgagggaaataccaacacagagactctgtcccagttcttggccgggggacaccctcccccgaatatctctgtttgcttgtgtcagcatctagtagccaacgtatagttgtgcatatctgatacgtagaaaaacacagggtgaggattaaaaaaaaaatcattgatatatgcccagatccttttgctaaaagaaagcttcctttagcagaagggcaggaagtgagggaagaaagatagttggattaacaaagtcagaggtgagaaacgggtaggcgaattgggggtcagggttctgtctgcggaagagaagaagagggttcaaaagaaaagttgcagcgcctgtgtgcgcgtgtcatcgatgggctgggtgcgagagacagcgctagcgcgcggccacaacgcactgcggggccgagagccggcaggaaatcgaaaaagctgctcgccggcagaggctgggaggctggaagggctccccacccgctcggtgctccagaaacgcgccggctttgccccgacgcgatcgcctggggagcccaaggggcgcgcagggggccccggggcgcccggcagccgcggggccgagcgcgcgtgtgagcgagtgcgaggctgcgggcggcgggcgggcgagtgtgcgcgggagggagggggagcgcgcgcgcgcccgggccccggccctcccagcctcccggcctccgcgcctgcctcccgcccgcgcgcaccgctgcccgctgccgcggctcccgctcgcgccggcgctgcacggtagtcagcccgccgccgccgcctgctttgtgcttcccacagaagatgggagcgacctcttcctgatcgggagctgtttaaaaggagggagtgcgccgtattttctactagcgtggaggaacggaggaagaatccattcacactccccaaaccaggtaggatcttatgatggacaggcagaaggcatttagtcagagaccaagaactattttccatttgctgctcataaggctacacttccctctgctttggcaaacgagcggcttctaaatttgtgtgtgtgtgtgtgtgtgtgtgtgtgtgtgtgtgtgtgtgtgtgtgatgtggtgtgtgcgcgcctgcacatttttctgggtgtccgcgcttcccagagtgaaattgctcgggctggtgcgtctgggcgtgagggtgcctgcctgcctgccagtgcaggctgccggaggaagaaagggctgctaaggagagatgctgcaccctgcaccgcgctgggctctgaggattcagggcgcgaagagctaagtccaccccgaatgcagagctgctggggatccaggcgtccccacccactggactcttctccgcggacatccctccttccggtaatccctggggtctttccccaaggccacatttccgagccccctgttttccagcgggcgttgggtgctcattcaccacggactgcggagaggagggaggtgtggcggggcagagacagacgaggaagaaatgtagggggtagcagggagtgggctgcggggtccacgtctctgggcactgtgccgtggtgtgctttggggattctgcacacacaggcatctttccccaagagattggaagggaactttgcagctgcattctctgcctctggagctttgctggctcttgggggaaatggtctgtgttctgagatgtgaagatatcctttttggctcctccttaatgaagaagagggcggtcttatagctggacagccggccaaagaaaccaaatccgcccaggcgatgctcttgaaaatacagtacgtgtgcatccttgattctttaaatccaccccctgcatcacccccgcctcttctctatcccccccaccaccccgtggattctgttgctgtttgatgaatgg

SEQ ID NO: 8399 - DNA, 6000 bp, Homo sapiens
tctgagagacgaaaatagatgccccttaataaactaagacagaccctaagataaggaaaccaagttactgatgggtcaagggctcagggcttggctggcaaatttctaaattactgtggctaaactccctaaaaataggagttttcaattctgttatacaacccagatgacaacaactctgtctggatagacagccattacaaacattcttttctgatgagctgctgcagaccccaggtcagtttcagccagcttacagaggcagcacacaagctgtctttgtggcctgtagttcacctgttgacataaagagccaaattccacctcattttaatgctaaagccccatcacaaagtgaacacgatgtatgttacatatatgtgtaccaattatgcatgtgtgcgcctcccccgtaagtatgtatagcttttcccccaagcctgctgactatgtatgatacaggccctgtgaggcctaaaacccaacctgttatttccctctttgaagagagagcaccttcagtccacaccggagactttctcttcctggcttgcaaactgataacaacaataaagctctcctttctaccattcagccatcctggtggtcttctgaacaccttctacaggggtcattctgcacactgggctaagtcattagccttttatattttaaaatgagagaagtttccatttgaatttccattcgaaaagctgtctttaaaagtaccaactgattcggcagaggctgagaaataaactgatgtaaatgcaaacattgaaaaatatgaattaacagcagggcaagggctttttaaagcagacagagttgataagtaagctgcatggaacagtagtgcccacagggtatttcaatttctaaagctttgggggaaacggtgtttggagtcctcgaacacatccagttatgcaatgcaaagtgatggaggaatctgtgttcaagccagagtcagcagtaaaagggtcacaactttttactgaattttttgtttcaggttactctgttgttggtcacatgtttagacaaatcaattcacttatccaatctgtgtttatttagaacccaggaatgagaaatgagcatggctgatttgggctaaaggaagcatacatgaagtgagatgtttctagtgtcatgcactgagctatataccaccttcacatcagcttgtgatcttttcattacccctttggatgtaggtattattatcttcattctacggaggagaaaaactgaagatcaatgaggtttaaggaactggctccaggtggcttagcaaatgagttatacagccagggtttgagcctagagagagccctatagacaatctggactttttttttttttttgagatggagtctcgctccatcacccaggctcaagggcagtggagcgatctcggctcactgcaacttctgcctcccgggttcaagcgattctcgtgcctcagcttcctgagtagctgggattacaggggcgcaccaccacgcccagctaatttttgtatttttagtagggacggggtttcaccatcttggccaggctgctctcgaactcctgacctcatgatccacctgcctcggcctcccaaagtgctgggattacaggcatgagccaccgcgcctggccaatttggactttattgtatggacaatttctaattatctacttttatatactccttttaggttttgtttgttttgtttttttttgaaaacctctagtttcaagaggagttttgctcttgtagcccaggctggagtccaatggcacaatctcagctcactgcaacctctgcctcccaggttcaagcgattctcctgcctcagcctccccagtagctgggattacaggtgtgcaccaccatgcctggctaattttttgaatttttagtagaaacgggtttcaccatgttggccaagctggtctcgaactcctgaacttgggtgatctgcctgcctcggccttccaaagtgctgagattacaggcgtgagccaccacacccagccacctttcaggtttttgaatttgggaatgccctgatgaaaatggatggaaggaagagctctgtggtggccttattcagaattcatagagataggaaagaactggagtgcaaagagatgaggtagaaggttgtggcagcaatccaggccctggaaacagagtgagcagagtttgacatgagaaaacctgattctagcctctgccaggatgctgctgctgggaatgctcgggctagttacagccacatctctgaagctttgtaacttcggaggggaggaaaaaatgggagtaatttgcttttttttttttttttttttcctaggttctgaaactagaaaacctctaggttctttcaaactctaaaattctacctttaaattgtaatgcattctaaagatttagatatgaagaccctaaataccatcccgagtctaggagagaatctggatgtaatacttctcaacattatcttctcaaagtacaaagaatagaattggctttaagaatgctctctaaaccagattatattgagacaagcctatcatttctgcatcactgttttctttgtttaagaaaacgatttgggtattgctgctgcagcagtggttgatgatattaaaatcaaataaaaatattactcttgaaacaaatgaaatgatttaagcctatctctctaagaaatcgcatgaaaatatacctaggaggcacacattgtattgtcatcaaattaatttgttttctaagctcaaatgtaatttaaaatgagatatttcttcaactggttcaatcaacagacagtagaaggattctacggagagaacacaggaaataaaccctacaataatgttagagcaaacaatcggcactatagttctgtcttctattgcttgtgatgcttctagaaagtattttttaacggcttcctgatgaattggctcttggtatcaagccaggctcatctctggctcacatctgcaaacttttccccatcctcacgtcctacaacaaatccatcttcaagacctgcaaagttcttggtctcagcgtttctcagaacagacccttcttcatcttcacagacacggggttggggatcccattcctgggttgcgaaatgaccttctccttagaatgacccaaagtgcaaaggcatcttcctgaaataaagctttcatcaagccatttctgctatggaaacctccagggattccattgcttatgggatccaatttaaatgctgcagttgagatccccattgtttcagtgggcaagtgcattatacttcttcacagactttaaacctccacattcgagattttgctactaggaatgttttgccctttctctgtgccaactcatggccatcagcacctccaattctgtcttgaaactcactttcttacagatatttttcttgtttaatatctacttagtagatactaaacagcaaagtagcagtatctacccagtagacactaaatagcaaaatagatactgaatagcaaactatttagtagatactaaagtagcaaataactcctgtttttgagcttttaatcacatttagtgctcttaagataaattatccaagtctggggataaacaactcacagagattttcattctttaagaagccaccgagagtgattttacttaaaagacagcactcacattttcagttgtctgccttttcactaggaatccacttaagaaccagcgcaaaaggactccgtttggcgacctctagcgggcaccggacaatcctacaaaattacgaaaagtagagggcaatgaaaaactcttccctttaaccagccaggttaccctgtggtcagatgaccgcatctcaccctaccccacccttatttttttcttctagtatttgttttgcatctaacacggttcgccttacaactcacctgtctcgcctccggcgggctgggctgccggtgtcgggtgtcaggtgaatgaattgctggtagcagtttaaaataatccctgccaagtggaacccgctttctgggcacggacaagagcgcggggtagatcgctctgcggagccttcacggggctcttcccgctcggagggccggtgctgcagccgggtcaggggtgcgcgggggaaatcaagatattttgaaaaggaggatgcagacgaagaccaagagaaaggctgtttttgccggtgacaaggcgttcctccccagactttcatcccactctaagggcagcatctcgagagggtccaggcgcgctacacgttaggcgccttctcaggactcgcgccccagaacgtgggggccggggccgggtcggggaccgcttccctccgcgggctggcaggcggcaccgaggctgggggatggggcgtgtagccgccctctgagcacgcggtacgtgggtcgccccgcgcggcggtaggaagagcaaagtcggcaggaaaagccgtggctgggatgccttccctgagaaatccttaggggcgatgtcagaacccgagctgggctccggacagtttctggaaaaagctctccaaacgccgtctgtccccgcacccgagtccacactgggctttgaaccagggctgttaaaaggggccctggggactgcccaattcatcccgatggcccagggcaggacgcgggagcaggcatcccggcgctgggctccccgctcccccgccctgcggacccctccccgccactacgggccggagcggagggggaggacggcgtcacgaggcggggagcccgaggtccagggcggggcgcccgggaatcccagcccgagcaagccggggaggtgcgggcgcgggcgggaagcggagggcggcgcggagggaggtgagcggcgcgcgcggagccggcgggcgaggaggaggactgcacagaggccccgcccccgccgccgcgagccggctcttcgccgcctccgaacccgctcactttgcctctcgcctctggacggcggcggggcggccgccggattcgcggccgcagggagcgccggagacggggagctattccgccccggcggctccattcggcgcccgcagccctcagggggtcggccccgcggcttgggagagggcaccgcggcctcggtgtgcgcagccctcgggcgcgagggtcggcggcgcggacacagccgcgttcccagccggtggggctcagcgctggcgccggcgaggactccccggccacccgcaggtaccgccgggcggagggcgcgctactagcagcgccggagatactcgagcccagggacccccgggccagcggagggcaggagcggagccccgagggagcgcgggccccgacggcgcgctcccccgtcagccacgggcaggcaggccccgcgtggcggcttggggtggggggctgcagcggggccctcgggccgaaagtcccccgggcggccagccatgaccttcgggcgcagcggggcggcctcggtggtgctgaacgtgggcggcgcccggtattcgctgtcccgggagctgctgaaggacttcccgctgcgccgcgtgagccggctgcacggctgccgctccgagcgcgacgtgctcgaggtgtgcgacgactacgaccgcgagcgcaacgagtacttcttcgaccggcactcggaggccttcggcttcatcctgctctacgtgcgcggccacggcaagctgcgcttcgcgccgcggatgtgcgagctctccttctacaacgagatgatctactggggcctggagggcgcgcacctcgagtactgctgccagcgccgcctcgacgaccgcatgtccgacacctacaccttctactcggccgacgagccgggcgtgctgggccgcgacgaggcgcgccccggcggggccgaggcggctccctccaggcgctggctggagcgcatgcggcggaccttcgaggagcccacgtcgtcgctggccgcgcagatcctggctagcgtgtcggtggtgttcgtgatcg

SEQ ID NO: 8400 - DNA, 6000 bp, Homo sapiens
gtaccatagattccaagcaatactgtagtacattttccaaagtaagagagtacccaagagttacagctactttttaatgatatcagagtaagtttgagagcataaaggaactggaagtatataaaagcataaaatctgtacaaataatagctcagtcaataaaaacagaatggttctcaaagacctcaataagtcagtcaataatatatagtgtgaatctgcattaaagatgctattatgtgctaggcactgtatgtagttaaggctttattgttgttatttctaatccttgggatgacatcagaaaacaggtatttattcattcagcaaatatatactgagtgcttaatattacatggtatttactgttctaaataccaaagatgaacatgataggcaaagcccttgccctcatcagataatattgtagtgagaagaggtaaacagtaagtaaggaaacagacaatctaataaaacaagcaaggttttcaaatagtagtattatagagaaaattctaacaggatactaaggcagagatgaggaaaaggaaagaagagattagtttagatgctgattagggaaacttctctgaagctgagacccaaacagcaagaaggaggcagatacgtaagctctaacggaagactcctaggagacagcagcaagtacaaatctctttggatgggagtgggcttggcagaactaataaagacagcatatgatgaatgaggagcagtgtggtacaatacgaagccggagaggtgggaggggtcatattaaggaggaccttgtaagaacatggtagggggcttaaattttattctatgtgaaaaagaaaaccagtggcggattttaagcaaaggaactttgtaaaggatcactctcgttactatgagacaactgcgggaaactagagaagcaggaagatagttcaatagttattacagttccaagtaagaaataacagtggtttggaaaagggtaatagcagtgagatgtacagaagcaggtggtttcaggttacattttacgttttggaggtagatccaaagaacttgctgatggataggggaagtaggggaaagggaggactcagtgaggaattctagcttttaggcttgaacaagtggattagagagtggtgctactatgatgagaagacggaaggaaaaagaagtggcctgttagacattaaatgaggtatgtcagataaactgctagatatacgtttagagctcagagaagtcaggccagaggtataaatttgggagttatatatatataataatattataatatatatataataatattattacatatatatatatataacatatagcttgaatttaaagccagtagattgaagtcactctaaaaggtcacttgtgatctcgacaagaacagtttcagggctgttgtggggataacacatgactagagtggctgaaggagggaaaggaacttaaggacactgaaaaagtgtctaggtaagactttggaaaacttctgatgtgaaggggagcaaagaaatcagatggcagatgaaagggttcacgaaattttttttctgaaagagactctcactctgtcaacccaggctggagatcagtagtgcgatcctggctcactgcagccttgacctccctgggatcaagtgatcctcccacgtctgcctcctgagtagctgggactacaggcgcgtgctgccacacccagttaatttttctgtcctttgtaggacagggtttcacatgttgcccaggctgctctcaaactcctgggctcagataatctgtctgccttggcttcccaaagtgctaggattacaggtgtgagtcaccttacccagccgaatttttaagctggatataataaagtgtggtatcaaacacttgtttttaagatgggacactttttacgcaattctcaggaaaaagtaaagtttagaaaggtcacgaaacatgcttaacttgcttaaggtcataaggctagacagtgagtctagattcaaatttaggtctgactccaaagcttatgatctttccacatttgcctgctgtctctgattcataagataattaagaaggagataaaataaaagtcatgttttctggtgaaactgtaagagaataacactaatatcttcatatattgatacagtgaggaggaataaggtaaaaccagcaggattataacagatagcttggttctgagtgctaggaaccacctaactctgttttattgcaaatggaatgatgcacatcaaattcactccagcagacttaatactaaaagaaggaaatttatgtgacccatcgatggatcctcttacccaccttgctttttttgaagtcaaagctttattttcattcagctttcttccaccactttctgtatcagaataaaagatattttagtgggttatttctatacatttaacatataatattaagaagttcattccttgactttctaccaaaatagtagtctatatctaatttttaaatcctcatttaataggttattaagatactgcttaaaaagaaaatatttattagggaaacagtaaaaatttgtataaaatacaatcattttatttctcagactcaagggagtactttaggaatgggtctatatttactctatatagcataaaatctagaagccactatatcagtgtcatagaccttgaatataatgaaaatgtttatttttctacccattgaaaacatactttactatatgtatttaataataatgaaggtaaatacttcatcataagtaattaatgataatgaaggtaaaatgggttaaagcatttattcaagaatataaaaatcagaagattaaaaaaatttctcctcagaagagtgcagaaattaaatacagactctaaataagctgaatcaaatcaaatactctgataatcaaatactgtgatattgccatcacttgacaatcatttaataattttgctatctcctgatattaggaacccgtacaagtaactgagaactaaatagaagatattaaatcacttgaggacccagtattctttaatgtttaatagataaaatactttgaacacataacatttcattgtacaaataatgtaaaaactaaggtattattcacagtaagtattcggttaaattcctattttctaaaagaagaaatacctgtggtattcctagcaccatctttccatgtatctggagtgataacagtaccaagtttcttttcacctgttagaacaagatagtaaaaggaaaattaaactttattatttaataagtgcattacattgtgcctaaggttcacaatggtatcgactatcaatggtattaccgtaggagcctgttaatgctgggagagcagccaatcaactgagactcatattaactgtggccaatgaatgactgaccctcagtaaaatgcgtaggataataagatgacttataataagctttcactgttggtttatattttaaacaaatctggtaagtctatttgttccataaatatatactaagcatctatcatgtataaactatacaaagtgctgagaaaaatgaagtgatgaatcagacacaattttaaagggattacagtacactaatttctttaacagcaatctgtaacctgggttccacaggtggatcttaagagatatgcgaacaaggtggagttgtacacaaaccttttatatattcatttttttttcctggcaagagtctatagttttcatcagattatcagagggatcagagaccttccccccaaaaagaaccattcaaccaaaatgtaagcttaaaaaataaaaagtataataatcgacagctaaagtactagaagaaattccatgcaggaagaaataaccctagctaaggaaatccaagaaaagaaagtttggggagaaggcaagacagaggatttggatatgtggcaataggactgtgaacaaaaaggagtaaagaggatgaaggcaaactagataaaggacacattctgaggaaaggcatagaaagcttagagtacacatgggcacaaagagtattttgtttggtcaaaatgtgaagaggataagcctcagtgaagatgaagctggaaaaataagttggggccttagtgtggagggtcctgaacgccaggttccaaatatagaatccccaaattattctctgcacactgagaatttattaaaggttttaagttagggaaataataatttgcacttacgttgattttcaattcaagcatcttctgggcttactctaagccatatcctggcataatgactaatgagaatgaataaggcaaagtccttagtctttggttctagtgtctagcatttggcaggagaacaatacttcttacatgaatagaaaggaaagatcaagaattgccaagacagaaaggtgtcgttggggtttaactgcacatttttatatgggaggagagctgatgagatctggggctgggggaaggcaacagaaatagacaaggaggtgcagaactgagaccattctgagtacaaaatatataggactgtatggtcgttgggaggtgcaaaaatggtcaaagggtagggtagaaagacagcggatagaatctgagacctgtgggcgaagaaaaaacaacgagaaagcaaagttcccgggagagctcagttaggttctcccagcctcctcctcccgcagaagcggccccttaactcacatttttcgcacaccatccttccccacgacggttcccctagccgcaacagcagcagcagcagcaggctgaaaacaacaacactacaacttggaagtattccccttccgggctacgtcaacccacttccggcttctaagcccatactcccgcctaccccaaacctggaaagccgctgccccttttgcccgcccctccctttctgcgactggctgttaggcgtgggtctccgccccacagccctgcgcctgcgcgtgggcctgggccgcccgtcgtacctgatggtaggaggcagtagttccccgcttcccttccgcgggagggagagttaggtaagccccgctggacgccctcggcgtctcgcctcacgaggtgcaagctacccccgcgaattgccgaagcagccctgagccttggcgccccgacccgccggcgctcgccgtcagctcagcgccactcttccggcgtgccctgatggacagaccccctttcggatccgagttttcgcctctgtcccccagttttcccttgtcttcaactcccatgctctttgatcctgcctctcagctggttcctcgctgcccacgcttgcgccggcgtaggctcgggcagaatcccgagggacccgggttggggtggggctgccggtgaaggtgcggcgatgcccgcgaaggctcctctgggtgccgctcggaagagccttctctccgctgcggtgcgtagcgaggtgggccgggtcatgcccgtggcacttctgcaggcgtcctgggggcacgccagggcctaaccggtgctggttccctctttgcttactctggttccttcattcattcagcaaacatttgagtttgggtcctgctcactgtattacatccacatctgctgctggcagctgcgattccgagggtggctcagaaaaatcgctgaagggctatctgttgagagaatggattcctgatccccttgccctccctcaatcagcttaagatagaatctatgggaaactttccctttgtcccttcttgccatccgtttgcttttcatgcctagtgtatttccttataccagagagatggctgtagcgcatgggaccttggaccacctcacctgtttgccgtgtttccttatcagtaaaatatctgcctttgaaaagcattgggtgaattaaatgagagctattaggataaggcccaggttcgcctttctgcttttctcactagtgggcgcccctccgcccacgcgcgcgcgcgcgtgtgcgtgtgtgtgtatagtattttttt

SEQ ID NO: 8401 - DNA, 6000 bp, Homo sapiens
tgtctaatattttagcttgaagtttaattgctaaaccaagttttcagtaagaggccttccctaaaagaaaaatgatgttaggtaaattatgtaacaaaatgcagtttctctacaaagaggaataacgtgattctactacactacttctttgtgcactcattcatttgttcattcactcatttgacttgtttattcctagaagtacgatgataaaggctgtcaatgcaaaggagaaaaattcactatgactataatgagtcctgtgacagagataagaatagaaaagccctatttctctcctaactgggaagggatgagggaagttggcaggttaaataaagttcacagcaaggctgatagtagagatgaagaattttggttgcaagtgagagagactcaactccaactagactaagcaggaggggagtgtgttagctcattacttaggaagtccaagggtagagctggcctcaggcatgaccagttccatgaagtcaaaggacattaacaagactgcttgcccccatctatttctcatctctactttcctctagttgttgccagcacaaacaggctttttccatgagacaagaaggacagcagcccctaattcattcacatccttccagcaacatgaccaaaaaggcaaggccccttctccaactctctctctccatcagccttagagtaggattctcatgccccagaccaatcatcacattccaattaccagcccagcttcctatcatcctgcagcttcaaactcctgctgaggcccacaagaaccccagggctgtgtgggaggtggcacagatgatcgcagctctgattttacattatgtagacagtgaaatggagatgaaaattctaaacaagcaataaagaatttgcatgaaattttggagtgtaactttcatggactgtcttttttattctccttattttgttttgtttagtttttttaccccaggtaaaaaggtgaacagctcagagatgtaactgtatttttctcttcttaagcaattttttcttcctctgcctacattcaccttttcttccaagggaaaggtaaaaccactgcttttaagtgagaagaaataccagttattatactaacagggtatgtgttcaataatcaaaaaaccttgcctattctacttaaggttttaaaaattactttgctaatcccattactgggaatacccaaaggattatgaatcgttctactataaagacacatgcacatgtatgtttattgcagcactatttacaagagcaaagacttggaaccaacccaaatgcccatcaatgatagactggataaagaaaatgtggctcatatacaccatggaatactatgcagccataaaaaagagtttatgtcctttgcagggacatggatgaagctggaagccatcattctcagcaagctaacacaggaacagaaaaccaaacaccacatgttctcactcataagtgggagttgaacaatgaaaacacatggacacagggaggggaacatcacacactggggcctgttgggggatggggggcaaggggagggagagcattaggacaaatacctaatgcatgcggggtttaaaacctagatggcgggttgataggtgcagcaaaccaccatggcccaggtatgtccatgtaacaaacctgcacgttctgcacatgtatcccagaacttaaagtaaaaatttttttaaaaattactttgctaatgtctttcaactccaatgtgttaatgtaacttcagatgctattgagttttgacctagggtggcataaagaaaatagattccatgattttgcaacatggctcattccataaataaataaataaatttcagcaatataaccaattaaataattttagacatttaaacacaggtatacagaatatactatttctatgcttatacatatcaaggtttcttttaagatgcatcaaaattattaggcttcactcaaagtccttaataaagattcttgagctttgttttcttcaggcaaatttaattctaggattaccatttttgtattcctcaaattgtgctctaggactacatgcatcaaaattacacgagaaagcttgttaaaatgcagattattggaccccactctatatctatggaatcagaatctcatagggaaagttctaggaatcttcgtatttaaagctttgcaaatggtatttctgcaccctaaaatatgagaagctccattctaaaactttggagagttttaattgcaatttctgagttacggtgtcagtatgtttttctatctctaaagtaggataaaatatttgtgaattctgtgaactttattttgtcattaaaatgtaatcagcaatctttgtgggtcatgttggtttgaagttctctgacaaagtagctataagcatagttaatgaaacaaagtcctttggatttaaaaatactcactcataatgagtattaatgaataagataggtaaattccattgtaacaaacttttgtgattataacaaatgaatcaatatgattttattataatagttacattgcaagaactgatgtgataattaagatccaactgaaattaatctagatagtaaaattttatgaaaactcattacagttgttagctttcttccaaacgaacaacctcaactcctcataaacaggattttatttccaatccaagacaagttataagaagtcaatatatacaatccaattcctcccactagcaattctgtaggagctgcttagaaagtccttgcatctttagagccagaagagccttagggatagtgaacttcaacccttcttcttacagatgaagagactgaagggcaaatctcatgattgacagcagaaacagaaggaaaatcctagtgttctgattgcctagtcctcctactggagtacagaattaaatgattcttctggaatatccattgttttcaaagattcaggggtgggtgggagcaaactttttttatatataacaggtacactacagggttaaaaaaagaaaaaagtcacataaaacatgagacttgaaagaaaagccattcaggcaccttgagttattcattctttctctccttccattcaagatacatggtgaaaacttttaaaaatcccagtgcctaccccaacttccctaccaaaatctgacaaaactaaaagagaacagagaacatgacacccaaagtcgtcatgtataattactttttacatatccagatagatccagcgtggttgagaataaagcaagtgagggtatcaagctcttctcagatagtttactgagcatctactacaaatctgggcctcacttattcactctattattcaacagacacatatggaacacctactaggagctagaagctatgacatgctctgttgatattgagatgaatagagaggggaaagcaaaattaaacccacaattacagtgtgttagattacctgctgtagaaccaggtgttatggccacaactactcaactaggatgactcagagaagaatcaaagtggaaatgacattgggctgagtcttgaaggacaactgggagtttatctaatggaataatggaaaaagaagagaaaatagtggggacagcccatgcagaggtattaaagggtgaggagtcatctataagcagttgaagagaggatccagagaagacaatattatagacatgagcattgtttttgtgccatctagcacaatgtggccaaagccaaacaagtttttaaaataataataatctaccctccttgagcaacagactgtagaatggtgaatgaaggagcccatccttgagaactggcttcagagtgaaagaaatctattcttatatttcctctcttcaaagccttaaatgccttcccagctttcaaagtccacctcttccagcaaaactgctaggatttccagaatccaaacagaatccttggaaggaagaaatgatcaaatcaaagaggggatattatggatccccatgattaccgtaaaattttgtctcctaagttctttggtatgtagatcatagcagctttttgcattggtgagaggtggtaggtgatagacatgagttccaggtttcactactttaaaaccgtgtgacttcagggaagccacatacctcttgggacatttttctcatcgcaaacaccctgctagttcaatgtggagcttaaacatgatgtgaggcagagcacctgttacaaggtctagcctatcctgggccttctatggggcagctgctaccagtattaggcagtttcattcattcattcaacaaatctttactgaggacttaccatgtagaagccagaaggaatacaaaaataaatctgaattggattttgctctcaaggacctcccaatctatagaagagatacaggaccaagccaaatagctataccataaataagaaagcatttaccaccaagagaaattactggggtagttgggaggatgggcaaagattacttgtagagtggagggatttggtgaaagagaaggggaaaggattaggggttgaggataaaagagaggaaaaatgtctgagccaggcactcttacgccttctgatgtgggtatagcgagtatccatcggaccctttcacaaatgaaataaaaggggttccgggaagcgtcacaactcactcaattcagaactccccacctctaatccaaaacatttgccattaaatctctttacctcctatagctagggccatttgcagatggtaggggacaagacaggggaaagtagcaggaaggaggttattgggtcactgggcactgtcgcaggtcaaggcagagcagactcagcggggtgcgcggtaagagggggagggcaggggcgggccggcagggaagggtgtgtggaagggcagccaaggggcggggagaggggtgcgggccgcactcagaggccgtccaagacactggcaagccgcagaagcccagttcgccggccatgaagcagcggttctcggcgctgcagctgctgaagctgctgctgctgctgcagccgccgctgccacgagcgctgcgcgaggcgctctgccctgagccctgcaactgcgtgcccgacggcgccctgcgctgccccggccccacggccggtctcactcgactgtgagtacacagcgctcccgtcgcggcgcccttgatgcaggaccctccatcgctctatgccaccttccctccctactcctttggccccctttccctggaagcttggagaaaaacgctttgccctatcaaatttcccccacgttttagggtgatgagaacccaaaacttggtggttgtttttaccaccccatgcctctgagagccccagccccattctttacccctggttggggctgtggccgggggagtagaactattcaggaacctcaggggaaggcctgctctctgccgctgcttgaagggaatatgggtgtgacgctcctcaactcctctggcaggggtctctgccagagaagtcttacaggcctttgagccttgggccagccacgtcagggaaggtgaatgtgagctctggcaccctgtggtcctctaggaatggagtgctcaggccctatggccaagggtgacctaatctgtcaactgactgctggcagtcacacgggcatcttagtgagcacacaagccgctgctccaccgtgcccagatgtgcttgaacttcagtctcatggtctaatggaccaaaggccctgtgccctgccgctggcacccgcgcaccacctccacactcacaggcctgattgagggattgtatacatcagcaacctgggggagggcgttgtttctggagtaatggggtaaagaggagaaggggagcctttagtactagactatcagggtgtcatcaggtctcctttctcctatttagaaaaaaaagtaccacatattttataatactatttacatgaaatgtccagataaactgaaagtagattagtagt

SEQ ID NO: 8402 - DNA, 6000 bp, Homo sapiens
cacagaggaacacactcaggtgtaagtgctgccctagatttaaaaacactgcccatcaaacacgctgcagggtttccacattgaagcctttctagcaggtgcatcgttcaaaacttaactactgttctcaaggacctatctacgtgctttctctactgctgcttgataccttaataattatcattacattaatgatttgcagccattttaaatcacattctaccttctgattacagaaaatttacatactcaaggaaaagtagcctaattttactatgtttaagattttttcaagtagtaagaaagtatttaacatactgagtttgcttatttctcctgaaagttacttagtaagcttaataggaaattatgtgtctttttgtacatgtaaatcctagtctgtttattccattttatagctgagtctcaaaccctagacttgattacatttccttgcatttttaaattcatctagttgtaaaataaattttatatggcagcatgttcaatatctattcttaaacttttgtaaccagaaaactctaattggttcatataaagaaaactagagacatttaactgcaaacaaaaaatggattatattattaaaataaagtcatgagctaaacaatagaattccaattgtgcagcactgataatgtaattggttagagaaatttgatagcaatctgaaatttagttgaattagcacgtaatattttcctgatactgtgattattttagtaaaagtggcttcattttgatcatctataggacagtaaatagaaaatcccctcagcgataaatcttactgttttttttgagttgtttctcatcttaagtgaaaatgcatttaatgtatatcaactggtatttttcctcattgttaccatgtgtttcttcttctaccccttatatcagtaaagcacccttcataactgatatcaatattggaattcataggtatctcaaagcttccactttaccttaatgttaattgagaaagtaggtgtttacattgatttcctaatgttaaagcacagggtctgattgcagcaataaacacagagcatctctgctgcattcgtttctcagtcaaaaaaaatcttactacttagtttcatttatttttagtgtagcattagtctccatgttagaattctcattaatattaataacctatggaaatatacttgctttaggtgagcatgcatttccattttcattgatgcaaaatgtttaccagtttatggcatgagatattatttatgtttccatatttgggttgccacaaattctcccaatcagacataatcataaacaagcaccttgatttcgcagttacctcatttgttctgagtggtagctaggggcaggagttgaaatccttaacatatttctgtagcctaaaattagtagattccctaaggtgattcaggaggaattaatcctacttcccaccttctagaaaaatactagattgttcttacaaatgttagattgcttcaaattcagatctacaggaatcacctcacatcttgcccagaaacaaacaaaaaaggtagtaacattgaaaacacgtcacctataatatgtaacaaagtacatgaatatcatatatttcatacagtattagtcattaaggaatgttatggcaaaattctggagttgactgtttagtttcctagactcctcttgatgaaagtcttagaaaggaaaaggaatgaacaattacgggcatctgcattctgccaagcactttgctacgtatatctgatgatccgttcaaagtcagtgtagcaagggggttaagattacagaattgagtttggatttttcctcacactgttgcttgcttactagactttgactatctggactaatctctctatgcttcactttttctcattggtaaaatgagtgaaatcctagaacctacctcttagagttgctgtgaggttagaataagttaatgtaagtaaagcacttggagcactgtttggcgaggagtaggcacaaaattaacattcaatgttgacattatctccaccaagtcatataaatggagatgccattatctttattttactgatgacaaaactgccacttagagagttgaagtaatttatggagaaacaacagaaaaactcatactttaaaataaattaacaacttttatcattaaattatgttgtgatatttgcattctaagctacaaactgatacttttctctatgcatatttactgaaaaaaaaaagatcctggggctgtccacttccttggactacatacagtaagtaccttaaacctgattgcaaaggggattactccaatacatcatctattccttcagtttatatagtttgtgtgtgtgtgtcagggaggcagtggtgaagagatgtgggaacactggtctttttaatctgaaaattcacacatgcagcataagaatgtcaacattttttttaaatcaaaacaccacagaagacatctcaaggaaaaccttgattcagtggaaacactgtgtagcccaattaaagataaaataaaaattcacaaagacgaaatgaaataaagtaggaaattgttcagatcacatgcactggtggtaaataatgagtttttatgaatccaggtaaaaggcagtgctttgactcttaagagtgcctctagcactaccataatgttcactgatgcatgttcacaccagatcttaagagcatcatggaaccaagttagacttgatttttgaaagtgggctgtccattccacttacttttgcaataagctttagctctatactaaacacatcgcggtgtaccttctgtactatttgtcctataacctaatggtaggaaaaattgaaaaaggccctgaattaactagactgtttttttgtttcaagttcactgaatgaataatttagataagtaattttctgagtcttagttttacatcatttaaaattaaatttttgttttaagaatcatgttaacagctattatttcattacattcccaaagcaatcttatggaataagctgacaatgactaatacctctattttatagtcaaagaattcgagtttcagagaaattccttccattgagtcaaacagaacacagagtgggttgtagttgataaatatagccaaaattccacaatttggaatccacaattccaaatatgttatgtttatttattcatttcatcttcacaacatcaaacacatgaagagggagctattattatatccattttacagatgaggtgactgaggcagcataagattaagtatcttgctgaggttacaactaataaatggcagagattgaattgaagctcagacaatctatttcccaaacatgtaaccacttgacaaaactgcctctctaagggcgataaacatattaaaacctgtgatacccgccttcaggttatttagacccttttacaaaagtagtgaaagtataaatcggcttatcataggaatgagttctagttttttggaagaatatacatattgtaattgtaatatatattattttgatgttcccaaatttatctagttcttaaattcttgctctatagggcctggaggccaaaaatagtcttgccttacagtatttgaggttcagactattaggtctgtggcgttgcaataaaaatgtctgtatctgctccaaaactaacccaggctaggaatatacaggaataggaatttaaatgtccatagggtgcaaaccataatttaaagccacagaccccgaactcctctaccacctaatctgtaagctcccttagatttaacccctttctcaccaaacccagcaatgcctattgggcatgcccagttgcatggttagagcctcacacccagttttactttcaccaggttttaccagctgcaaaagggaggaggagacggagggaagagttaaacaggtagaaaacttggttcaagacagagcacagaaggctggagaatgacgacaggctgcagtaaaaagcaccttgtcagacacagttgatcgtcgtctgcaagttggcatcttaccctggtgggttccttttacatctttttggcacagcctaggcaagtcatgaagatttgttgtgattacccaaggcagagccacagtaaggggtggggcaagggacatcggatctagaagaatgccagtgcctgtgtgagtcttgcttgcccctgcattcctcgaaaagctgcagcttcttttcaagggttccgagcaggagaccaaggtgcacaagtaaagccagagctcatcataattatcgactccttggccccttctctttgactgctggaccctttcctggcaccctctcaggtatccccgcccaatcactaccaaaccccggagaagtggaatctccatacagctttccatgggtctagcaggggcctgggcatgctcagtaggctacgtggttctctggttcgtgttcgttcgttctctctctctctctctctctctctctctctctctctctctctttctttctttccgatggggaagagagggtggtgacaagttagaagcgcttgcggaaggtccccgcccccaggatcaggctccccctgcaaggggacgatgcaaaggtaaaagcacctcgctccgcagcatccagacctggaggggctgcgaccacgggccgagcccacccattccccagccaaaggacgggcccgccgctctccatggtactgcggagagctcagctccgcccttctctttcagaaggacagcacccggcgtcacgtaacccagccttctcaggctccaccaccgccttttccttcccagctctttccctctcctccccctcctcctccttctcctcctcctcctcctcctgctcccctccgttgcctgttctcccctcccgcactcctggagatagacgctcaagcctgacgcctctgaaaaggcagcagcagtcgccttatccatagacctcaggaaattcgctttgaccgatgcatgcttcaggctctggctcgagctgaggggaataaccgggcaggtaaagaagctcaatttgggttggggggaggggatggggcgaggcaagctgaagaaggatatctttccccattgtaactgagccaggatctgccacaaatacacagggaaagatgggtggtgggagggtggaggagtgtagatcttggttgttttgcatgaagccttttaaatagatggcaagaagagatggtggaactggggtagtaacttaaaggctgaatgcagtgatgtattagcaaaagaaagaaaataagagacaggctagatatcaaagcaataaaatatctctccatatatttccttccctacctcatcagccccacactgtgcccatcgttaatttgtgcagtagaccccgagctccaagaaactgcactggtattagagatggagcttagagactgggcgggaaagccagagagaattttggctgtgcattggtattgagagactttgcaaaagccaggggtgaaataataagcacttctaaaatttctctcagagatttcatgttctttatgaagatatatatatatattgaagggtgcatggaaaggtgtaggtgtgtatgtgtgtgtgatatcagaaacattaaaatatgcaactgcagccgatgagcgtactgtattgatcctcctagtgacttgggatgaatttgattctagaaatgaaagaaaagattaatgatgctgttagtctgcttttgaattagagcgcttcttcttttggctgcagtaaggatgtttttcagatccctttatttcatcctctaatttgtgaactggccaggtctttctggcacctagagagaatcctcttttctccatataaatacagatactcgctcacatacaatgagcttcctccaagaactgggaaaaccagttaacctccctgtgataagaatgtatatatatctatatgtacatatatattgctctacggtttt

SEQ ID NO: 8403 - DNA, 6000 bp, Homo sapiens; identical to SEQ ID NO: 875

SEQ ID NO: 8404 - DNA, 6000 bp, Homo sapiens; identical to SEQ ID NO: 3335

SEQ ID NO: 8405 - DNA, 6000 bp, Homo sapiens
acgccactgtactccagcctgggtgatagagtgagaccctgtctcaaaaattttttttaaaaactttatattatagaatagtttcagctttacagaaaaattgtgaagataatacagagagtttctatatacccaccctttcccatttccccgattgttaacatcttatattagtatggtacatttgtcacaattaatgagccaatatttaactgaagtccatactttattcagatttcgttggttttcccctaacatcctttttctctcctaggatcccatccagaataccacgttacatttagccatcatgtctccttgggatcctcttggctgtgacattttctcagtctttccttgtttttgaagactttgacagttttgaggagcccactggtcaggtactttgtagattgtcccttaaatggaatttgtctggtgtttttctcatgattacattggggtactgagtttcaggaggaagaccatggagataaagggccattctcatcacatcctatgaagggtacataccatcaatagaattcattactgttggcgttgaccttgatctccaggctggggtagtgtttgccaagtttattgactccagaattactcttttctcccttttcctgtactgaactttttggaaggaagtcactatatgcagttcacactgaaagagtaggaagttacactctacttttctcagaatgggatatttacataaaatatttggacattttctgccctagagacttatctatttgtttacttactcagacattcatttatgtcagtatggactcacagatatttctcttacactttgggttataatccaatactattttatttgtttttttgttttgtttttgctcaaattgctctggctttggccattgggagctccttcattggttcctgtgtcattttgacatacttccctcagttttttttttttttttttttttttggtaactaagcatctccttactttctggtactacaagatgctccaggctcatcttgagtatttcctgccccagttctagagtcagccatttctctaatgagccctggtttcctttttttggagaatggtgttagaaatcaaaacctgggggctgtgtggctgttgctatttgaacatcattgcctctcccagctgagagagctaagtaatatttgtgtgtacatctaattttttttgaaaagatcattatgcttgcaccatggtgacaggacttgagagggggtaagaggagaggcagggagaacagttaggagacgaacggaataaaagccaggtggtttgcattcaggcctgtaaatgtgttgaattgttgttgctgtattttgtagggtgtaaaatcaggacactttgtactgctgaatacaagtgctcacatcatgtcaagaagctgtccctactattaaataaaatgtcctggattaaaaaacataaagaagaatccgcctctctccctctcctggctctggctccctctggtttggctttagtcccaccaagtagactctttctttctttctttctttctttttttttttttggagtcttgctctgtcacccaggctggagtgcagtggcacaatctcggctcactgccacctccgcctcccaggttcaaatgattctcctgtctcagcctcccgagtagctgggattacagtcacctgccaccatgcccagttagtttttgtatttttaatagagacaagggtttcatcatgttggccagactggtcttgaactcttggcctcaagtgatccacctgcctcggcctcacaaagtgctggtattgcaggcatgagccaccgtgcctggccagttcttgtattaatgcccatttgtttttgtctggccagagaacagaaagcctctcagtgaagacatagcaaccccctggtttttctgccctgctggtagatggtgttcctgtgggaaatagaagagctagggcccggagggtgggtggggaggccagggaagaactatgcccctctcctggcccagactctgaccttccagttgggcaagggatccgtagagttctgccttcgaggttccctcagctctcaggcctcaggaggaaataggtcctgagtaggtccagcctgggcccttcctgtgtatggggaaacagaaaccaagacaagccctttcttttcagccaccagccctgggtgtctgatgggcctctagggaggcacctccagcagcttccatcccattctatgtggcggtgaaggagtctggcagacaccactgggatctcaggcagcgctgttgatagtccagaaataggtgccttcacccttcattcctgctgtgccctcctctctaaggtcagttttcaacaaacaggaggtaaaaggcagcaaatggtggctctgcactctacacattgggcccctaacactgcacagttcaacacacacacacacacacacaaacacacacacccccaccatcatgaactgggtgtgggcaaccgctcccttcctgtctgcagatcccctacccacggggcgacttgcttgccgggttgacatcagccacgcatggcacaggctcctcctgggccaaagctgttctcctggcccggcctcagaggaggcacgttccgtgtggcttctccacctttgtggttggtctgcagtgttgttagttggcagctggggacctataagaggctgaccccaggatctgtgcaaaagacatgagaatgggacataggaacagagggtgaaagtagcaaagaaacaacacaacatggatggaacaagccatttgcaaggttgtgagtttgtttaagagttgctatgatggtgtaatatgtaattagactttccaaagtgaaagaaaatgtgatttatttcaaaaagattgtgaccgtttgaagtaatggagacaagaaggaaccaaagaacaggaatctgctggtaaccccagcactggcttttagaggggttccttgaccagccatgggaatattggttctgttcagctggtaacccctgtggcagggacagggacatcacgtttgcacagctccatggcactgtccactgggatgcctcatgccttctcttctaatgctaggcccacccagcagcaggaacccctgaagcagtatctgttcctcctggaagggatagggctcattgaaagccacacattggccccagcctgctccatcagattctttggagttagtcttgagaacctggtcacctcaggaggcatggatccaatcagctaaagttggggcctgcttggtattttctgacaccacttctgacaccaaatgtgtgctttttcctgacaccagccgattctctgacacccgctgggcatccaacaattcaaacagattctaacactaacttccagagttagcacagatctcacagggtaaggcctcagtcccacaagactgccccccttcagatgctagctacaagtgaggtagtgaccccacttctgcctggtcaactacaaatttgggggttctggctaggcaaggtggctcatgcctgtagtcccagcactttgggaggctgaggtgggaggatcacttgaagccaggagttccagaccagcctggggtataaaaagagatcccatctctacaaaaaaataaaaataaaaaattagccaggtatgttggcacacacctgtagtcccagttatgctggggttatgctggatgtgacagaggctgggatgttggggctgagaactgaggatcacttgtgtccaggagttcaaggctgcattgacttatgatcgtaccactgcactccagcctgagtgacagagggagaccctgtctcaaacaaaaaattagggggtttctgcaacaacctctcagttttcataattcactagaacaattcacagaactcagaaaaacactgtacttcctattcttttattgtaaaggacaaaaacagcctgatgaagaggtacacagggcaaggccagtggggtcccaagtgcaggagactctgtctctgtggagtcagggcatgacaccctcctggcatgtggatcaccaatccctaagctccttgaatctcattttttaagagtcgttatagcccagaccccaggccatctcccatacctggaggtctgggagtagggaatgggagtgggtggctgaaagtcccagtcttccaaagtctaatcccatgtttggtctttctgggaccagcctccagcctgaaattatctaagggtccaccctgtgtcacctcattagcataaacccaagtgtagtcctaaggggcttattatgaataacaaaaaacactcctgtcacccaggaaactctaagcgttttaggagttctgtgtcaggaactgagatgaagaccagatatattttttacagagttgtcccttggtatctgcaggggatttgtttcaggactcccatgggtaccaaagtccacagatgctcaagtcccttgtacaaaatcatgtagtatttttatataacctccgcacatcctcctgtatactataattcagttgtgagtccccaagtggctggtcaccccgcttcctcctttgacctgcaaatatcggccgcactgacctggcccctcttttacctgactccttttacttaagaggttctgaggctagaattaaaggtcagccatagtcataaggatgttttctgtgcaaagctgagacccccttcctaggtgccagtcccagcccccagagaagaagaggtgtgtttggggttatgctggatgcggcagaggctgggatgatggggctgagaactgacgggaaggtgctaatgggaagaggaagaaaatagggcagatgggtatctgggagcctctaggggaggggcccactggggcgggtttctgcagagtcaggcagggagggaggaagagctgggagggtggtcaggagcatataagtgtgggtgtctcagctttgcttccactgccattggtccacgggacggcccttccaggagccagtggctgggagcagtgctggaggatcaaggaagcagagatggacggtgaggcagtccgcttctgcacagataaccagtgtgtctccctgcacccccaaggtgagaaaactggggccccagctcttgcccagtgagggagtagcctgcctgtcctttggccctctgccataaggcagcttattgctgtcttattgctctccccagacccttgtccttggggatgcagacctggcaagagaaaggggatgaactttgaattcagatggtcctggcttggaatcccggctctgcacactgagctggtcctgtgaggcctccctcccttcctttcttctttcattcaaactacacttttgttgctctgtgctctgtgccaggttctgtgccctgtgcaccaccaaagcctccttgagatttggagatcggtggtctcggtctcagagctcctcagctctgtgttgctaccatatccacatctagctctggtgaacagcccaaagtgttttgtcttccttctccataaccacctgcatgataagcatggcaggagttatcatccccattagacaacccaggaaacagaatcagagaggctgtgtctcagcctgcacagcaccctcttaccttgcacagcaccctctcaccttggacactgccttctcccctgcagaggtggactctgtggcaatggctcctgcagcccccaagataccgaggctcgttcaggctaccccggcatttatggctgtgaccttggtcttctctcttgtgactctctttgtagtgggtaagcccccaggtgacccaaatctcactaactttctctcctttcagcacaaagtccccaggggccccagatgcacactctctgggcctctctgctcccagaaagatcattccacctccagctccaggcccaagccacagcttccctgggaacagataaaggccactgtccaag

SEQ ID NO: 8406 - DNA, 6000 bp, Homo sapiens
gaggagagctaccttcctacccaaaccctgggcacccatcattgcaagttgtcactcctacacctgcgggtatctaggatcagcagccccatttgaatcacaaactgaaaaaatttcccaatggagggggatttttggtatcagaaatgcaggagaggttgggcgcagtggctcacgcctgtaatcccagcactttgggaggccaaggcaggtggatcacaaggtcaggagattgagaccatcctggttaacacggtgaaaccccgtctctactaaaaatacaaaaaattagccggatgtggtggcagacgcctgtagtcccagctactcaggagggtgaggcaggagaattgcttgaaccctggaggcggaggttgtagtgagccgagatcacgccactgcactccggcctgggcaacagagtgagactctatctcaaacaaaagaaaacaaaacaaaaaaacaaaaaagaaaggcaggagaggtggggaaggatgctagggaaaataagcaggaattgtgttgtgaatatgtatataatatatgcatagttatgattagacacagctatggctatagatatagatgtgtatacatatacacgtgggtggttaggaagactgaactatgggtacaacatttgttttctctacgatggttttgttgtgttttgttttgttttgaaacagagtctcactctatcacccaggctggagtgcggtggcacaatctcagctcactgcaatctccaccttccaggttcaagtgattctcccgcctcagccgcccgagtagctgggactacaggcacccaccaccatgcctggctgatttttgtatttttagtagagacgagtttcacttatgttgggcaggctggtctcaacctcctgaccccaggtgatccacccaccttggcctcccaaagtgctgggattacagacatgagccactgcacccagcctatggtgggtttttttcttacttggatttttttctataattaattatcattaattatataataaataaaagatttaaaaagaaactatgcacattttttttcccaaaagcctttcattactttcctgacatagatttgcccttcccactgaggctataggcatgagttctttgacttatgacgtagtctggggcagcctcctctgccgggtacacagcagctcttccatgtggctaggttgccagcctatttacatatcacactatttatgatggcactgggtgaaataccctgatcagtagggtctggcttattgtcactgttccaaagagacctgtcctcatataatgtcataaaagaggaacccgttatcagggtccaaggagacctgggaaggcccctatagtgtcgtcagtcatttttagtctcgggagagccttcccttctccccagcattaaggatgtcatattttttcaacaataggaaaaccattcctgagggcagggtctgtggttgtctttttccttgctgtgtcctggtacctagtgcacagcaggactagaggagtgaatggtgccacctatgctccttggtttctctgccctatcccctgtgcccagggcgcatgtccggagggtggcatggaatcccttgattttttggaggctgtgggccaaatcccgcatcacatcacaggagtccctatgtaagccaggtgtgaccagctgtaatctcctctcatttcagagtcattctcccctcctccctctcttctccttccctgtccccactccgcaatttggtgttcactctactttcctccatgacttgactgagggacttgggtgactcctccctggagatgactcttggcactgctggagcatttcatacaacccaggtctctgttccagtcttgttgattaaacccatggttctcctccaagcataaggctgggcccaaccatagtctcaaccagagaaagggaaaaagtgaccaagctgttttcttcctccatccttatccagagaaaatattagaaccccaggaacacaggaagaggagaaactaaaaaaatgagcacagacttcccgttctcatcacagcggtgatttttttggtcactaggtctggccagagttcctcttctgtttggaagagcagggcattgtctgagtgcccgggagaactgcccaccttcctgactggaaagtgtggccaaggcacctgcctgcttctctgtcttttctcctgccaggccaggtgccagatagagcatccagaggtttgcacaggagaggtgctcaggaaagacctgtagatgagcatgataataggaagatggcttctgactccctccctctccacaaagtgggaaatgaaacttcctatggtttgggacttttacatccacctcctctgaaaccccagaaggcccacagcccaggattccatgcctttgctcagcttcctcatgctggaacagcctttcgcctagcggtagctattctacctacctcagcctgcatttccatcacttggagtaaatgctccctgctccagccccttcctatgccatgggcccagccgctaaggcttcctcatcctttcctgggaccaatgagagggcatctggggggctctataaagtataactcataccacaaaccagcagagaaaacccaacttcctgaccgagcggaaatggacaagacacttcccaggcacactgtgtggcggcttctttcccgcaaatgcctcaggaggagacatggacccctgcaaggccccttctaccagggtcttgagtaatttggattcttctctatccccaggcccagaaataggacaggctatggatgaagggccaggagccaggagcagaagggcagagatgattctggagttaggctgggtcccaagcatgagagtccagaagtggaacattctaatcctgtctaagccctgatggaaccaaggctctgcaaccacacgagccacctgaagagagtaggaatcttcatggacacccagaggcaggcagtgatgtggagccaggccctcatattcgggactatcaaatgttaaaatttagagcagacagcaggcctggaagttacagacaggctgggtagggaagcgatgggacagaacaaatgagacaccatctttgctacccagtttccttcccagagcttcccagtgtggggtcctctctgggttccctcatccagtccgagaagccactccagcctgaggcccggttagctggagagagagcatcaagggcctgtaactacaatgagctgcacataggcatgggctgagcgtgcagccactatcctcccaagtaccaaaggtggcagtagcccctgaaagcataggtagatatttccttggccctgttaacttaacctctaatcctggtccctgatacaggctgtcatccagctccactggctcagcctcagcaggcccaggacagctttcttttcctgcggccagagcttttgttcattcctgggtaaggagtaaatcacacttccccttatgcttttgcattgaagatgaatgagaacttctggagacagtggaaaaaagcagcagcttctagaaggcagatcccaggccccagactgtgtaaatgtctgagtggcatgatcagctatcaagtctccaagtcacttaccattcacacatccatccatgcatcctctatccatccattcatccattcacccatcctccaattatctggaccaatttccttcttttttctttccttccctccctctttcctctcctctttcctatattccaagaaatatttgtctagagtctgccatgtgccaaatttctcagatttggcagacttcttcaaagcatgagaagccgcccaggagaaaatttagtccttcattgagcccaaatcagctcttctgtgccctgagcttcttgcacatatggaactctctatttaggactacaaagaaggagagaggaggtgcggacagagagagaggagagagaaacagaacgattcctagtctgaggttgctgagcgcccctactttttttgaaaatctcacatggtgcaggaagcagggaggagaacccaagtcttaggtttacactttgaatctccaagttgcatattataaagggatattgtatcagccaagatgcattaataacaggaagcaggatattctattgcaatggttgcctatttggtatctctgcttccaggcttctccccaccagtctgctcctcaccaggatcagagtgatgtttctacagtgtccctgtccttgtctctctcctgcctgaagtccttaattggccccatgtcacccacaagccagaggtccagctccttgacatgatcagaaggatcttcatcatcagaccccaggtgcctcttcaaccccgtgtgcatccccttcctgttggaatgtatattttacattccagcaatattgcaactatttacaatttgccaagcactccatgctatcttatgctccatcctttggcatatgcttatctttctactggatttttttttttcccattactccatttcatatgcttctttgaactgggcatatttgtctcttgtgctcatcaccttgcaatttatttgctcatgtctgtctttcctaccagactatgagctgcttggtgcaaggactgcgagttattcatcactgtggccctatgcctggtagagcatcagtacctagaaggcactcagcctgtatttgtggggtgaatggatgggtggatggatgacgagagtcttacaagagaaatgggataggtttgggacaagatggttaatgtatccatgtaacagacccccagagaagacaacaaatggcctcttcctgaaagctcagacttctgaggatgggagtaagccagacaaggtatctagtcaggaatagggaagttgggatgatatggtgacctgctgtgggactgacttcctgtttcctctagataagagcccttggagagacaggcagccagaagcacctgtgctcccaggataagggtgagcactcaggatgactgtggagaaggaggcccctgatgcgcacttcactgtggacaaacagaacatctccctctggccccgagcaagccacatcgctgctgagaacctgctccgtgttctgtgtgcaaacctgccctttgctgctccttcaacacacattttcttcttcttccaacagagcctcctcccaagtccggtccatctctggtcccggggaaaacacccacagtccgtgctgcattaatctgcctgacgctggtcctggtcgcctccgtcctgctgcaggccgtcctttgtaagtcctcatgtttcatcgtctgggcttagcccctctctgtggccagccggctcccttcagatcgagaccacttccctgctctccgggtttctcctgcctgtggctttttcatttgtctccttcctcctctttccatgtgcagtaacaggctgtgctgcccccagtacggtgagctgatgctctttccctcccaatttctgggagattattgggattagcatttgcacattggtgctcaaggatacattcttttgtcctcaggaaacattgatctagttttacatcctgtgctattttctccccgtccaccccccaccaatctgagctctgctccttggatctagagccttgtggacagtccttgacagtgcaatgtctcctgaccctgtgaaggaccgagcctcatgtatcattggccccagctcaccagatggagagcctggccaacgagccaacagatctccatgactcagtcccctctccccaggactcgttggtgctgtcttcattctcctgtccctgtgaagatcacatctagggaggcttcctgctcatttgatgttgcatggtttatctttcttccttttctggctctgtcaggcttcatggcctttgctgctggcagagccttcttcctcctgccagggctccaggaagcagagcaaagggacc

SEQ ID NO: 8407 - DNA, 6000 bp, Homo sapiens
acaggatctcatggctcctggagatgtgtgcttgtgtggtgggaggggaaacaggacaatacagtgtgtgtgtgtgtgtgtgtgtgtgtgtgtgtgtgtgtgtgtgtgtgtatgtgtggcgggagtgggcattgagggactctggccctctgttttctcatcaatgcaaaatgtaacaagtaaatctaatatctaaaaatagtattatctcactattttatctcactgaaatataatagctgtggaagagaattactggctacacaggactgcacgcatgtaagggacttgtaaggggtaatgccttcattctcctgggtgtagcaagtccagggcagacagtaccgctgtgtagctttgtgtctttgtgagcagcaggactttaggcagacctgcccctgtatgcagtgttttctgagctagggaagtgggtgcagaggctgtgcttgcccattgcctgcatattccgagtgcctgaggcctaccttctgtatttcccaggccctttctgccaaagactgcaaatgtcaccaggcagagctccacttgaaccagcatctccttactcatgtcccaggctgctctgactgatttcaaagtgccagaaaggctacagggtcgtgtgacgcaggccctgaactgcagcactgcaggcaatagctgaagcctgggggtatgctctgggcctatgggaaagagttgtctctgtgtgtgtgtgtgtgtgtgtgtgtgtgtgtgtgtgtgtgtgtgtggtggggcgtggcagtctgggagttcctacaaccagcccggagggagagggatgaccactaggcaacaggcttatcatcccaaggctagaatgaggcaaatattccctcctagaacacacttgtgctcccaagtgcctcaggggttgagctgtgccgcagctttggggcagtctacaaggggccagtcatacttttgtagccaaagtgatacttggtagtactgggattcagtctggactttgagacagggtcaatctttgaccaggattaaggatcattctgggattagactcagaggtctgttttaggtcagggttacaggctagactgaggtttggagcagggctctgtctgggatcagagtcagaagtctatctgaggttaatgaaagaaagtcctctgatggaatctgactggcaaagacagttgccgagctttctctgtcctagccaccctcttcacaagcctgtccatggcctcagcacccccactctccacagcacctccaggaagtcttagagtggagtaccatgctctccttttcatctttccgaagtactttttgagatttgagcagagaggcggttctaattaggaaatccagcaactattgctgtggggctgtgacatccctgcagactttccccaggatcccacttggcacagggtgtaaggactcagaatttctcctccacaaccctcccaactcctcctctatacctgaacaggaaaagaggctgagcagtggaggacaaaagggcacaaagccacccccacccaggagtgaggggatgggaggaaggcaattggcgtgttgggggacttctggggctgtgatccccacacggcagacacctcctgtggtctcttgggttggtggctggaaggtgggtgttttgtgactgtgacaatgatcctttgtgtgtgtgtgtgtgctcagtatcagcctgtacatctatctgcatctctataaagctgtgtgcatgtctgtcctttaggagatggagatttccacaggtgagttttcctgggttaccttgcccatttcaccaccttgtggccagtgctgtgtctgggggtcaggctagattcttagagctcttcaagccagcaagaccttaacaatctcccccaaccccattttatgttagcctcatcctcagatagggtgtggggtggctctggcactttgacgtgccctgttcagatgtgactgttttgtgaaaccaccctgcttcgagggtgcttcctagccccctgtttcaggaccacagtgatcctgacagggccttcgtaagtgtccggccccaagcatcctggggtggacgtctgaggtcactgacacaggagcggggtgctttgggagcctacaacccggccctttggagctgatctcccactatgaagggcgagtgcggaaagggagcagagggaattgtttccccgaatctgtagtactataactgcccaccaggtggggttccagggcagagagtgaagccgaggtgacccagcgctaggagctagaccagcgtttagatctcctgccacaccagcctcggaagcgctcacacagggagggacaacacatctgtgcgcaccttagacgctcacacacattctcgtctcgtgaactctaaagcagaactcgtactgggtgcaggcaaggtgttaaaagcggagtctagtatcgttgacacacacactactctaaactaaagatgggatatcgactctggctccgggagtgtgagagtgaacgccagagccaaggggggctgagggaagcaggatgcacgggagagagaggggcagacattagctagaccaatgtcggggttgctgtacgcagctccatgttaacacaggctcgcaggaggagaggccagatgacagatgcacggatgcgcagacacactcatggctctacaaagaatacacaaacccacagacataccacgtcgctcctcagacgtcgggccgacgcaaggccacgcgcgcgaacacacaggtgcggccccgggccacacgcacaccgtacacaggcacgcgcgccgggccctctgctgccagcgctgagaaggtggccgtgctcacccagcatgtttatttactcatttgtatcaatgaacgtttgtgcccgtcttctcccgcctctgggtaccggggccgccgcgtttgtccccgcgcaggacacttgccggaccagtatcggggttccccgacgctgcgggcggtggagggggactacaaaagcaggggaggggggtcccaatgtgcaggaaaggaggggctgcagagtcagcagcctgggacgctgacggggacaggagaacctccaggttccgtagggtaagagacatatggcgggggcggaccttagcatcggaggtgtgaggatatagggatcgggaatgggggatctggcttagggggattgggactggtaactcaggggtccctggagataagagccagcgggatcccgggggttggaagctcgggaccctaaggcacagtttcgagggctttgggcgcctgccagtcgagggggcagtccggccaggacctccgctgccggggcttcggcccaggagggactgctcggagctggaggaggggaccgctgacctgggaaggaggaaaagaggaagggaaggagcctagaagccaagcaggcactaagcgagtgcgcaccgtgtgtgcggaggtgtgtgtgttgtgtgtgtgcgcgtgtgtgttgtgtgtgtgtgcgcgtaggtgcgcgcgcgtgtgtctcatctcgtccgtctgtaggcgctgggctcagcgagacgccggcgagaaagaagaggaggcgagaggtgaactgagtttgatcctgcggcggctacaagtgggtcccgggcgggctgcgggcggcgggcggcgggcggccggggcggggcgggaggccgggctgcgctctccagctccggccgcgggcccggcctctcaccacgcctccggctttgtgagcgcgcgggttggggcgggggggtgctggcggggcgcccacggcgcagcctcccgcctctatataaacacacgcatcgcctcgctttggactcaaattcacattgagagaagcttttaaaaccaccagccctgaaatcctgcctcctgcttttccccctctttcattccttttgccttcctttcttttttccccatttcttcccccagcagcaactccagagccgagagaccgcgtcccgggacggactgccttttcttaattgatacaatagcccagctcgggttttccacctcctcccccaaccccaccccgcctcacccctcccgcccgctgccgccgccgccgccgccgccgccgccgccgccgccccatcgcccgcccggggctctgtcgccggctgcgtcccgtcccggccgcggcccgccggctccgcacccgcgctcgggccgcagcgcccgcctcgccgcctcgcccgccgctcctgcctcgggggtgctgcggcggctctggggctcgagcgcgccgccccgggcagcccagggacttttaggctccggcctctccactcgcctcagccagggagctttctccctcgcccccaaagtttctgggttcgttggaatttttggattcaggaattttttctttttttctttttttcacctaggaattttggggccatactgcaatacttttgacaaatcgaccgcactttctctctgctagctctctgcccccttctttttttccgagcaggggaaggggcttacgagagagaggctccctctggacaaagttttccaaagttttccgagtgtgatggtagcggggagagcaaacccaccagcttgactcacggcttcatctcaccaccccttgagcagcccctaagcccgctataaaggaacaaacaaacaaacaaacaaacaaagttgcaccccagtcgcctcgtgtttcctctcttcttttaggcaatttttttcctccctctctccgctcccctcgcagcctccactccctttcccttggccccttcctccttctctgtttcggctggaggtgccaggacccccggccgcagcctcccctcccccgccgctccggtcccctcccgtcgggccctcccctcccccgccgcggccggcacagccaatcccccgagcggccgccaacatgctctttgagggcttggatctggtgtcggcgctggccaccctcgccgcgtgcctggtgtccgtgacgctgctgctggccgtgtcgcagcagctgtggcagctgcgctgggccgccactcgcgacaagagctgcaagctgcccatccccaagggatccatgggcttcccgctcatcggagagaccggccactggctgctgcaggtaagggcgcgctcgctccgctgcactccggggtccgctagctgcgagcgcggggcagacggagcggcgggccggccagggggcgccgggagcctgaaggcactggtccccgccccgccccttccctcctctctgccgcagcagcccgggcttccccagcccgccggcagcgcggttccgggaccactggcgcccgcggcgcaggttcagggggctggtaagaggggttcccggacctgagggggctcccaagatggacttgcctgggtcgcggctggcctggcagggggcgtggagcgccccgggggcgcctagcgaggcgcggtcccgggggagggtccggtcctgagccgctttcgcctcccctcggtgctgcaagcccccagtcgccctcggctttctggggttggctgtgtcgctgggagccgaaaattgagtcgggagaggagggggctggtggcagcttgaattgccgatttaaaactgtgttcctgcggcgccgtcggcagcgccaggtacagtgtccctggtccgcggtccgcgcgagtgtgtctgttttgtggtggaagaggaagaaggtaacccaaggaaaaatgagaatccagggctctaggctttcggggaaaagggtctatttacttattgggtggggacagtttggcaggagagggaaacttgggagaggtgagtgtgggatccatagagagagagtgcgtgtgtgcttgttagatgccgcacaaccccactctgctggtgataacgggggtgaggcgcgtcagggaccagacccaggtaggtaatggggagattaacctggagttcacctcatcaagtgccagacaatcgcttttgcaatgtgatacacaccggttt

SEQ ID NO: 8408 - DNA, 6000 bp, Homo sapiens
aacccctagagagagctggttgaccaagtgtcccagtttgcccaggttttagcactcaaagtctcatgtcctgggaatcctcacagtcctgggaaaactgggaacttgggagggttggtcaccgcactagagaaaggttacagtatagaagagaaaggagggaagatggctgggggagggtgtccctgacagagggtgggtgcaggtgcacaggagtctgtagcatggcctttgctgtccctgtgaaagggtcagttcacccggtgaatgagggagtgaaatggggagggagcaggtggtggggtgggaattgaggccagcccagggggttgctgaggagtactggacaccgctgccctgaaaccttgactctgtaggggcagctaccacccagtgctgggctttctgtccagcagacctggaggctccacagggaaggcagccccacctttgacccgtgccacccttctctctgtgtaacccatctcttgtatgtctttgcagtccccaccccgtgaagcccctcagtgccgcccctgtggagggcagccccgacaggaagcagtcccgctccagtctgagcatagccctgagcagtgggctggagaagctcaaaacagtcacatctgggagcattcagcctgtgacccaggccccccaggctggccagatggtggacaccaaaaggctgaaggtaaggcccagcagggtgtgggggccatctgacagaatgtgtggtggagtctcagggcttggtcctggtgagggtggggcagggagcaggccaggtcccccatatcagagtcctgaagccagttaggctctgactttggagacaggcagcctggggccctgtggtggtgaaacttaggtgttggtgggcaggcgggcgggcgggcaagcgggcaggcaggcaggcaggcctagggctgccctgctcactgtcttcggtccggcctcaggactcagctgtgctggaccagtcggccaagtactaccacctgacccacgatgagctcatcagcctgctcctgcagcgggagcgggagctgagccagcgggacgagcatgtgcaggagctggagagctacatcgaccggctgctggtgcggatcatggagacctcacccacgctgctgcagatccccccgggcccccccaaatagccttcctcaccctacccccaggagggttggcatggacctattgctgcctgccctctctcctcctgaactctctcatctgcagtggggcatcgtctgtcttgccttgtcactccttgctcctctccctcctgcctcaactggggctgctggaagggggccctctggattccctttggaggcatcaggttctgtgcacaacttgtgtgtctttgggagccctgggtctttcccacctgcctgttttcatatccctcagctttgggggccccagggaattggaactcttcccccaagacagagcaggggtgaactgtagcttgatgcagtaatctgggacaagactggttgctagcacatactttattatcccccaaggatggtcagccatttcttcccacagccaaagccccatccccttcatttccctccagtccctggaggggcttctagtattactgggacaatgaccacgctgcctgtttgtctgtgagttacgggcaaccagcctcttcagcctcacacccattcccctgagagcaagaagcctgtgtggtctgggccagtctctgccatgtcctgagtctgcttcagtctggagctgtttgtggggcgagtgccatgtggacagtggtggatgatgtgtgtgcttcaggctgctccctgacccctctgacctttccacgagtgtcacatgggaatgtgtggggcgcaggggcgggtgcggagagagcacctttttgcttttcgagctcttgaccacctccaatgtgtaggtccctccaggctggggcttgggactgcttatgatttggggatcaagcctccatgtctattcttgttgcctgtccagatgccaaaactctgtgttgctgcagggtttgaacttttggaaaccaattaaaatgtgcctttggtgggcggggtcaagagcccctggatgtcgacctctcccgctgtgtggcgtccccctcccacctgttgaatacatagggatggctctctcagggccctgggaatgggaatggacagcactgctgtgggctgttcccctcccctaaagttaatctcttggtctggccaagttgctgctccctcaaccttcctgctgtcttcccctccctcaaccccaataggaggatcccaggataaacactgctgggcaggcgggcaggcaggcctggggctgccctgctcactctcattgtctggcctcaggacttagccatactagaccagtcagcttgcctggaagagggaggtcccactatgcctttgggagacacctatacttaggaaaaagcctttgttgtcctcccatccatccattaagctgctatctcagcctgtcccttctgccccaggggcttgcctggcttggctgcagtgcactttgaaatgaagtatctgtcctttggcccagcccctggtttgcttgtagaaaacatggtaggcttccccaaggcatctgcagggaactttggcagcttggggcaccctgaattagcaaaaatggggggtgatgaggtgctgaagaaggatacttaacagcttagtgaggaggcaagagctcctctgggaccaccacttcttcaggagagggcctgtgggcttgcttttggaaggcctcaggcagacacgtgccctctgggtgatgtctgtctgctgccaggatggagcagaggagcgccacacatggaggaaagcccctgtaacgttacctaccttaaactccactcatcaaatctgagaaaagtatccactggtccccagggtttcagtcatgcttttgggggtcattgggtattagagaagtaagtatcttttctgagagagggggagtcaccccccctactggggattcctctgggctttattcactcccagccctggccctgacctttgtgggcctccctaatgcccagggcatggatggcttcagaggagtttttgaatcgaagcccagggtccttgttgatgtttcttctcctagccacacttggaggaaagttgcaggtgggttgggcagggagcaggcatggttctgctttgctgtttgtcttcctagttaaggctctttataaagagcttgttcttcatgttttaagcactttatgaagaataaaacattcatgtactgcaggtggctctgttgtgttcctgttttggaatgaacagttacaggaggctgctgtgggagaaagcaccttaaatcaaggtgatgggattcttggatgacactgtccctgccccttataagggggcagcagcacagtgttgcccagcagcctgaacttagtcttttctgactcccagggtacccacatttattgcgcacctaagatgggcccatttattggtaatacagagggtaagaaatggattcctattctcaagttgcatggtctagcaggggaagataagatacaaatccaagatacaaatagttcttcatggctagatagaatctctaagataagatacaaatccaagatacaaattgttcttcgtggctagctagaatctccccctagctttatgaaaagtgtttcttgtggttcaactactagaggatgaaaaactttgactgctacagctcatgtagtgtccagaaacactggcagacatgagccaaccctgcactccaccacgagactaatgagacccaaagtggagttccctagaagaccaaatatttctactgtcatcttgggcaaaacaggcagctcccgaagtctggctcactgaccaggtaattcagctgggaatcttcagctaatccattctacaactgtatgtgtttattatccatactgatccttactccacaatctgtaatactcccccttacctaacaccctccccacccaccctagtcccaagttctcctcctgcccaggaattaggcccaggagggatcttccttggttggccagacaaggtgaaagctgccagggctcttaatcccccactgatgaactcacagccaacacttatttgagtctctactgtgagcccttttatgtctggctctgaaaactgaagtgaatcaaaaagtcatagcccctgccctgtgaactttacagtaagaaagactgtccagaacagtaagtagttgtgagtgcaaaagagaagtgctgggtgccacggagcctctgtgggattttgtgcaagcagagtgatggactgggaaatgcaatgtttaggctaaagccagaaagccagcatcaggcgaagatttagtcttccgggtacagaatgttcaggggtcgggaggcgggcaggcccagcatgctccaggaactgagtgtcagggcagccggagagcacaggacgagtgggcagggtggcgacggaggaaagtacgagaaggtccgcagtgcaactccttggagaaagccttccgaggttaaccctactccgcctggagtctttgcccatctggtcccaggttcccccttgaatgggacccttctgcgctgcctggccccaggagcgacgcccacggcagcaactctaacttctgggggcaactaagcagcgaggggtggcccgtggtcgtcgtacaggaacacctttcctggactgccgaccttgcaccttgcaacgcggacagcgggcaccgagacctctccggacggccgcaactctccgcagtctacggttgtaagcgccgcgacgcgaaaaactacactccccacaacgccttgcgcctcccgctcgctgcggttgattagggccaatcgggagaggcagctgtggcgggggccgaggagggacattttaaaagggccggagattgcgggcgtcagtggccatggcggatacagcgactacagcatcggcggcggcggctagtgccgctagcgcctcgagcgatgcacctcctttccaactgggcaaaccccgcttccagcaggtgaggaccgggctgtggtctgcgggccggcgggtggcaaagagaggacgagcaaactcccctccaaagtccccttccgcccaagggtctcccacccgcggccagcggagcctgcagctagcgccagggggggaacctcggtcacagtcacccttttcccattggtcaacggggcgggcgcggactcccatcttggcttcctattggcccttggcgccgtcactccccgactgcccgcgccctctagcctttcccgcccgcggcgccctgtgattggccaccggcggctgcggtcaaggtcccgagcgcccggcttcgagcggctgctcagggtcgctccgggttgtgcagctgcccgcccgggacgcaaagttctagtctggccctggatgggaagttggcgtggccgggatgccttctaactttttcccccggtggggactgacgttcctttcgagctgctggcggtgccgccgggcagcgtcgcgccccgcggtcactccccagccctggcccccaagccgggctcggcgcgcgcagcaggttgagggggcgagtgccgaggcgagcggcggtccggcgtcccccgtccctgctctccatctcgggctgaggattcgctgacgcagcaagccggccgatgccctgaggggacgcagccagggcgtgcgggggaaacgctgtgtcatcccctggggccgtcgtccctccgaggggctgccgcctgggaacccccccccagcctcttcctcgctgtgttctccgcggagggtctcccgcgcccgggcccccgcgccgccggggactggctctgggcacacccgctcaggctcttcggggcacggcgacaggggtcctttccctccgggacctcctctggggcgtcgccgactcggccctagactgcggaggcggggg

SEQ ID NO: 8409 - DNA, 6000 bp, Homo sapiens
ttcccaagctcaggtgatcctcccacctcagtaggcatgtgccaccacacccagctaatttttgtatttttttttttagagatagggtttcaccatgttggccaggctgatctcaaactcctggactcaagcaatcctgcctcctcagccccttaaagtgctgggattacaggcatgagtcactgtgcctggccatgttactattcttaacatataaagcatttgtataaataataagaaattaaggcttcaaagaaaaacaagcatagaaaataggcaattcagaaaatagacaattcattaaagaaggaaatacaaatgactaataactgaaaagaagttcaatctctctggcaatcaaagaaatgcaaatgaaacaacaaggaggcagaagcttttgccttcagcaaagagttctaagatgataattcatgctcattactgcttagggtgtattgagatagctctcatactaaccctatgaggtaatttcttattagcaggcccattttacagaggtggaaacagactcagtagggttcagtaatttgcccatgcttatacagttagtaagtggtggcaccagggcttagacctgggcatgtggttctgctataaagagggcctggaaaatagctgcaggaaggtgaggtgaagaacagagggaaatgtagctggaagagcaggacaaatacatgtgaagtgtctacatggaaaagcaaatgggcttagtggtactgaagagggggcaatgagtggaagctacacataggtggatgcttttcaagcaagaactgtctccaatggactagagaggcccaggaaggcagtgaggacacccagccctggggaggcagaggaaactgatgcttttggggtcttcttgtctaactcttatgcaggctgctgcagggagtgggggggatctcatcttatagaggaggaaacacacctttagatggccaagacctcagtatctggtgtttctgctcttttctcaaccacagacagctagcagacctggcttttccttctagggccaggcaacgtggggtgggagccctggctggtttcgttcccctcctatagccagccacagtccagagccagcaggaagcttgagcttgccaatctgtgagggccaaggcaggaggaaagagagccagagggcaggtgaggcagaggagccatctgagtgctctccaccttttcccctttcctggtgctttgctcctccttggcggaggaggagggagggaggaggtaggagcagtaacgttggagaacaggcaaacagatgaaacagacccgctgaaggagtgacacatttatgttagttgaagtttagtgatgatatcgtcacttgcaaagtccttgaagaattcactcttaaagtgggaggttcatcctgactcttgtaaccttggttgcctcaatcttcgtctgtaaaatgggtatgagaacacttccttctttattgactttaaatggatctagtgcttggctgaccaacaagctggtgtgagagcagagtaccacagccagtagagccactcagtctctacaattttccggttggagacttggggaaaatcacccaagctcttcctgcttctgtttcctcatcagtgaaaccaagggtagcacttgctttaaatggttatcttcagggttaaacatgactatgtgtgtgtgtgtgtgtgtgtgtgtaagtattatatgtatatactttttctttagtatacagacttatagccaagagtgataatatatataaagtaatggtagaaccaggactccaaagcccacagatttaataattatactttagatgtctcaaaaaccataatgtatataaaacaaacacatacagtataaagactagaaagaaacacaacaaattattaacagtgtttatttatggatggttgcgttatgatttatttccattttttctttttttgagagagagtctcactctgttgcacaggctggagtgcagtggtgcgatgttggctaactgcaacctctgtctcccaggttcaagtgattcttgtgcctcagcctcctgagtagctgggattacaggtgtgccccaccatgccctgctaattttcatagtttcagaagagacggggtttcactatgttggtcaggcaggtctggaactcctgacctcaagtgatccatccgcctcggcctcccaaagtgctgggattacaggcatgagccaccaggcctggccccattttttatttttttgagacaaagtctcattctgtcgcccaggctggagtgtagcagcacaatcttggctcactgcaacctctgcctcccaggttcaagtgatccttgtgcctcagcctcccaagtagctgggactacaggtgcccaccaccacgccaggggaattttttgtctttgtagtagaggtggggtttcaccatgttgcccaggctggtcttgaactcctggcttcaagtgatccaccagcctgggcctcctaaagtgctgggattacaggtgtgagccactccgcctggcttgaggtaagaatcattatcccattatccaaatggagaaataaggccaagagaggttagagagttggcttaaacttcaggtttcatagctactaagaggcagatggccaatatctgtaggcagatctggctgtctctaaagctaggtgctatcgtcagggttgctggaccatggggctggtgcctaggacttccccactccagtcttctgatggaagagttaaggtgggaggctgtgaggactgggcctgtgctgggtgtgctatcatgggtctcctctgcctactctactggtttcctaggttcatattcccagtagaggacatggcctggaaggtggacagttgaggggtactgtggagtctccctaagaagaaatacatgtttctcctgttgggtatcctatagagcactggttccccacctttttgacaccagggaccaaaatgtaagtttccacagactgagggtggcagggatggtttcaggatgattcaagtgcattacatttactgtgcactttatttctcttatcattacattgtaatatataatgaagcaattatatgactcaccataatgtagaatcagtgggagccctgaccttgttttcctgcaaccagatggtcccatctggggatgggagacagtgacagatcatcaggcattagattctcataaggagtatgcaacctagatccctcgcatgcacagttcacaatagggtttgtgctcctaggagaatttaatgccacagctgatctgacaggaggtggagctcaggcggtaatgcgataggaagcggctgtaaatacagatgaagtttcaccagctagcccctaccaccactcacctcctactgtgcagcccagttcctaacaggacatggagggttaccagtctgtggcccaagggttggggacccctgctatagaggaactaaaaataatagcataactacacaagattgagggatggaagtgggtgtgagccagctaaatcattatctatcataggaggaaggcaacagacagtggccagtcctgataaatgcagatgtagctatgtgagcatcttaatgtagtgatgtggaggtaaccatcagacctgaaaacaccagtggctttaagcagcatccctggattgaaggatggagagggagttcttgcttttcattgcaagccattctgtcctatttgatttttttaaaaaagctgtgtgtattatttttaaattattattttaaaagtacaggctctgaaagttaaaaaaaaaaaaaacgctctgggggcatctagtggattcacaaccctcccccatctgagctgacattttatcttctggaaaatagggataaaagccatactcaccccacagagttgctctgaggataaaatgaggtaatgcatataaaagcgcactgaccagagttggctgaaattcagcatctataattactaaacatcgttattatcaataataaaccaagtatacgttaatacttaggccctggcacacagtaggcacttaataatgggtggaagtagttatttaaccccccaccagggcctgtaatttcccccaacccgtgacacactggccccaaggctccgagtgaacacttaaatattgatgtggttactcatttattcatcactcggctctccgccgcagagtctgaggagggtgagccccgctctcgggcctcccgcgccgccgcatggccgcatcccggccccctgcgccgggagagattggaggcggcggcagctcacccgcttccaggtcgccgatgcgggaccgtcacgtggcggggcggcaatcgctccagtttcactccggcattttcccccgcaggggcggactggaggaggggagagcgcggcccggggtcaggggagcggcgggggtccccatcaccccaagtccgcgccaagaggctggccatcccaggaactgcgggccgggacccttttacggagagggctttccggagcagggacttttagaaggaagacgtgggattggcctggaggcgcagagcgggtttttcgtacctggccgcgggtgtagggctccccacaagcgaggccgggttgcttcgggcgcccccagccaggggcggggccaccgcgggaactccgcccaccctctgcagaggccgcgcaccgccccttcccgctccgggctggtctgcggctgccggggcgcgagctgcgtgcccgcatccctgtcgcaccgcctcgccggttggggcggcgggcgcggggcggggcagggggcggggcgctgacgtcgcggcgcggcccgcggccagcggcccggtgaggcggggaggcggcggccggtcggcccggcccagcccagcccgcagctgcggcggcgctcagagttggttcctgaccgccttctgccgcggccgggtttgtcaccaggtcctggggtctgcaccggctcggccagacctcgccccccgcttctccgccatggccctggtgcggggcgcggagccggcggcggggccttcccgctggctgcccacgcacgtccaggtgacggtgctgcgggcccgcgggctgcggggcaagagctcgggagcgggcagcaccagcgacgcgtacacggtgatccaggtgggccgcgagaagtacagtacgtcggtggtggagaagacgcacggctgccccgagtggcgtgaggagtgctccttcgagctgccgccgggggccctggatggcctgctgcgggcgcaggaggccgacgcgggcccggcgccctgggccgcgagctccgccgccgcctgcgagctggtgctcaccaccatgcaccgctcgctcatcggcgtcgacaagttcctgggccaggccacggtggcgctggacgaggtcttcggcgcaggccgcgcccagcacacgcagtgagtagggggcgcgggggcacagaaacggctaaaggcctaacagggcggggctggtgggggatcaggaccccgaacttcagccgggccagtgagcccttgcctcgtgcttaagggcgtaaaccgacagaaacgttggttcttcgcatttcggggtcgtcttcaagcttcccaaacgtgcgctgtgtggggctcagccactggtggtccctgggaggcctgggggaggtttaagtggtggcgaacgttaggagtagattgtcaagtaaagttaggaatgagattcagaggctttggggctatggaaacctcaagaagggaaatcttggggccgttcttagaacctccgggcctgcctccctttcctcaaaggggaggggaactgcgggcgcctgtccggcaggggagtggagaggcgcagccttgccctacgggggaaggaaagccaggtgtcttcctccagggcgaggttgaatgttgattaccccgctaaacgtagaagctggctgcagggggcatctgcctcttgctctcaagatg

SEQ ID NO: 8410 - DNA, 6000 bp, Homo sapiens
tgaagtgctacagccactctggaaaacaatgtggccgtatttaacaaagataaatatgcacatactgaatggcccacaagttgtaaaatataccaagcaaaacaaacaggaaaaaaaaaagaggaaagaattgtcaataacaccagatgtaatagagaggtctatcaagcaaagatctgaaaagtgtccactgtctaattgtccacttggcaattagaagtttgatgatgagctttgccacagaaatgtctgtgaccagtaaggagcagaaatcagaacacagtggtttgagggatgagtgagtggtaagaaagggaaactgggcacggggcctactatcaggttggttggctgagaacagactcaagcacatagaaacatcagtatgtgatcaagcaggatgggtcccctcggctggatttcagtctgcccctttgggaaggagggtgtaggatggtgggtacagggtacataattttacaaatggtgatttaacacttgggaaaaacaagttaaatcctcatattacaccatataccaaagtccagatggattgaatatttaaatatacaaagcaataccggaaaagaactagaagaaaatttagaacatacagattttctatataaagaaaatttattttgtatataaagttggggatggctaaaacttttctaagattgacaacaaaactagaaaccttaaagaataatatggataaatttgactttattaaaatacacacacacacacatcgtattaaaccttcctgtaagaaaaagaaaaagactgcaaacaaaattgaatgacaaatgacaaacagaaaaatatctataattgggaggccgaggcgggaggatttcttgagcctaggagtttgaggttttagtgagctgtgatcgcgccactgcgttccagcctgggtgacagagcaagaccctttctctaaaaacaaagaaaaagaaaaatatttataacataaataagtaacttttacaaataaataggaaaaagaagctgggagtggtggctcatgcctgtaattccagcactttgggaggctgaggcaggtggatcacttgaggccagaagtttgagaccagcctggccaacatggcgaaaccccatctctattaaaaatacaaaaattagcctgacatggtggcgcatgcctgtaatcccagctacctgggaggctgaggcatgagaatcacttgaacctgagaggcagaggttacagtgagctgagatggtggccagtgcactccagcctgggtgatagagtgagactccatctcaaaaataaataaataaataaataaatagaaaaaagaaacacatcaatagaaacatagatatgaataggaaattcacaaaaaatacacttaccaagttaaatcaaccttaagtaaaaaattcgttcaagattgtaaagtgaactgttaacatttacttctctttcctccctaagtccaactggaactacattttttaaatgaaaaaaagtaaagtatgcaacctcatgagagaacttgaaaaaaaaaaagtaaaaaggaaaaatatccaaagcaaaaaaaaaaaaaaaaaaaaagcattccaaagcagtgctggaatacgaggaggggtttacagtatacttctttggacctgacgcctagcacttttcccttctgagagaaaatctgccatccccactttagtcgcctggttcatgtgggaaactgaggcttagagacagcagagctggggagtggcagcaggatattgtggcaggtggtggcagtcggggacttcaggctgtggtctcacaccgccacactgcctttcccttttctcacagagaacattcaaatggctgtctttctctggcaaggtagaaagcctctcaaataagtaaggaacatgctttggttaacagctaacgaggcattaggtctggacagggagacaagcagtgcagcagccaaatcccagtggacactagacacgaggaagaaagcacggtgctgccagggcaggtcctcctccctccttcctccttcctccattaggaggattcctgagcctgcaaacctgttccctttgtgcatcctggagggacagcccctgccccataccttccaataccctcaccaaaccagatgaagctcaccctcaaattcctgtgtgaagtgagagacaaaaaaaccccaaacctgaagtgtctgaaataaatgtccaaattatttgaacaaaacctgggtaggtagaaaccaaagggtttcacttgaatgcttggcagtaacgtctcaactggtctttccacctgtgctacaatccactgtgaagtccattattccattcttgtaccaagtccccttccacattcctttcacttcagacatgtttgctgatgtttacacctctccatagactacccagcctatcgtcgcatgcccaaagctttatttccccaaacctgccctgtgccagggaaactgctctccagttctcaggatatttatgctatgttctcccacctcttatgtctatattttttgtggcttcttccctctgcctcagataccccttggtagttctactgttctaaatcctacccctatcctatcccttcactgcatctccaaggccattttctccacaaagcttttctttaacacatggggctggtaggtaagccatgaacatttgtggaacaaggtaatcctccaaacaagggtgatttttctttcactgaacccttccctccctttgtgcttctttttggagcctcacactcttctgaatttgttgaatccccaaccagctggaaattccctaaggcccgaaactgtttctggcctaggctgtgctgatcttcctgggactaaggggtttcctgggtcacagatcttctgtgctaaaaccaggaaagcctctggtgacccagcatgtgttgatctccctagtcttgcctgtctttgattccatggattattaacagaaactataatgttgggttaatgtgttggcttgggcatggcctccgaaacatgttttttacatgtctgccaccagcaggctctagatccaggaatgaggcttttccactaagggaaaactccacgtgatctaggaagaaagtgaggatatccaaccagatgataaatttcctatctgaaagagaaggtcaaccctgaaataaggaggctgaagacccttagagaagccacagaagagactggaagaagaggggtagagttgcttttttaatggggcttccagctcctacttttcttcctgtctgtaagtctctgagcttctgttccagctctgtaaggttggggacgagaatgctctccccactggactgttgagagttcaatgaggggaaatgtgtgcatataccaggccccatgctgggtgcccagagacgctgcgccttcctggcatgcttctcttccccatcgctcagcaccgcgtccctcactccctccactcccgattctcacttcctactcactggcttcttccttcccatcttcctccaaacttcccattttccactatgtctctctcaccgtatctttttcacttaaacaaaaatggaattcataaaaacagaggccaaaagtcaggataaacctggaaaaatcaccaagtacgcaaagtttttcttgcaaggtttggttttttcaaatgccttctttgttttccttgcccatatccttcttcggagagtcaggatttggggtttgcagagctgtgtggcagtggaatgtggaatgttctcctgaatctcagtcccatgaagaaaagaggcaaaagtcctgacatctttcctgaggattgtctgatttaaaagagctgattctccccaggcaaatgacttacctttgttgtgctgggacaagctgaacaggcaaggaataaacctccctagaacacactgattagattagccagtgagaaccactgaagacgcagacattagattaaaaaacagaaaaatgaatgttacttttacagtggctatgaatagacaaagactttttggtttgaaaatagttggtgaggcaatagaggaggggctatgttaatagcagagatagaaaaaacgagaggtggatggttccaactgcaaggtccaccctaaaggaattggagtcagggcccaggagccacaggccactgcactggggtaagtagagtggattttacataaataaagttacagagtggttgtaggttctggtttggagatgtgagtgaaccaactgaatagaataggcagattccccagcccaccaagagtcagatgagaattttattgctttttgctaaaggcctgtacaagacttagagcaaagataaggagtaacctgattgttgaaactaatctataagtattccaacatagcaaaggacaagtaacggaatgacgaggttttcctgtagtagtgttgcgattttgttctgctgtgtccccctactccagtttcctctgtgaggggagcgtgtagtgtgtgcatatctgtggaatgtcagacttctaaagtcaggggctgagacctatatctagttagacctctgtgcatattcttgagccatgggagtctcagtggttgatagtacttcacacttcttccagttcaataagggttacctatggtgtctcctctgagtctcctaggagtccagaaaacatgagacttgtataagaatccacacttcaactaagctttctggcccaaagaaggcattgttaccaaggatctgtttcttgaggtctttagggagtgagagggaaggaacgcatgaggaaccagagctagtccccatctctctccctagaagtgacagactgcatagctcttatgtatcaggagtcctggagatcagctggctttccttaaaaaagggtcatccagccgtgatgaaatcctgacttagaaacccagtgcccttagctttgtgggcttctgtccctgagaaatggtgttttaccctccctccaagcaggcatcccaggatttggaattcagctgtgagctcatgagctgatggatgtttccaggagtaccctgaagaccacccaggtatgctctccccacctcctttattttggatggaccagtctaaggagagtcatcttttcccacaccattggtggcactcagtgagtggcttgttgcttgactgaatgcctgcccacaccctctccagtcaagtttatcttgagtaactaaacacttagcaatggagacactcatacatctccactgcactagaagtagggatggtggccatgccaacaaaggagataactttagcacaaaggatgtcacaagaaacagatagtagagtgtgttctccagtgttatcatttcccaaaccagaatcaactggtcttgggtttccttccctcatccttcatctgtagaaaactttgtttcttgagctacttcagatctacttccctatcttaagaggtgggctatgtgcttcttctgctaatttattatctcagaagtacataatttgagcaattttatatagttttgaggacaggagccctgtaagagtctcttactcagaaatggattcagcttggtttgaggtttaataggtcattgcaatgctcccttctggtatcacaggacataagctgggttgggcggagtcccccttttgtgtcttagccttcctctccttactccagagtaagagcagccctgatggaaaaacaaaattaccatccatgcctacttcatttctgcccctcttactctaagtctgggcaatccgcaacatctttttatattggacttcctagatcacagactctttttttaggaagagtcaattcaagccacccaggacttatgatcccttgctctgtgtcgggcacagtgtgagcacagtaatggcatgggctgcctgatgtggggcagtccctcttggtcagcaattcactcagcagccatctcagtgccccctgtgtaaatttgaggcactttg

SEQ ID NO: 8411 - DNA, 6000 bp, Homo sapiens
catatctggtcactcagttcagaatattctgtcttttaaaaaagtgcctgaaagttgggcaaggtggctcatacttgtagtcccacctactcagaaggctgagacaggaggatccttttgagcctaagagttcaaggctagagtgagctgtggttgcaccactacactctagcctggtgacagagcaagacactgtctcaaaaacaaaacaaaacttctgaagtgatctctccattcccattcactctattcatcattattgcattctgctacccagtctatttcctaaatatttttgctgccacttaattttatccttccaaaacatgcgatgggttttatctctcactactccctgtttaagaaaacagtgccggccgggcatggtgcctcatgcctgtaatcccagcactttgggatttggccgaggtgggtggatcatgaggtcaggagttcgagaccagcccaaccaacatggtgaaacctcatctcttaaaaatacaaaaattagccgggcgtggtggcagttgcctgtaatcccagctactcaggaggctgaggcaggagaactgcttgaacccaagaggtggaggttacagtgagccgatactgcaccactgcactccagcctgggtgacagagcaagactccgtctcaaaaaaagaaaaaacattgcctaaactgtttttcatacttcctcaacactcattagtgtggaccatgcaatcaatttagggagttaaaccattctttttttttttttttagatagggtttcgctcttgttgcccaggctggagtgcaatggcacaatctcagctcattgcaacctccgcatcccgggttcaagcaattctcctgcctcaacctcacaagtagctgggataacaggcatgcaccaccatgcctaattttgtacttttagtagagggggtttctccatgttggtcaggctggtctcgaactcctggcctcaggtgatctacccacctcggcctcccaaagtgctggtattacaggcatgagccaccgcacccagcctaaaccattcttaaaaaaataataataataaaataaaataaaaaaagtaggccgggtggagtggctcatgcctgtaatcccagcactttgggaggctttggcgggcagatcacttgaggttgggagttagagaccagccaggccaatatgatgaaacgctgtctctactaaaaataaaaaaataaaaaatagctgggtgtggtggcaggcacctgtaatctcagctactcagaaggctgagacaggagaatcacttgaacccaggaggtggaggctgcgctgagtggagatcatgccactgcactccagctcggttgatggagtgagactctgtctcaaaaaaaaaaaaaaagtagaatagaataaaaattatcagactgaggctgagtttaatggctcatgcctgtaatcccatcactttgagaggccgacgtgggcggaatcacctgaggtcaggagttcaagaccaacctgaccaacatggtgaaaccccatctctactaaaaatacaaaaaattagccgggtgtggtggcgggcacctgtaatcccagccacttgggaggctgaggcaggagaattgcttgaacccgggaagtggaggttgcagtaagccgatagcaccattgcactctaacctggttgacaagagcaaggctccatctcaaaaaaaaaaaaaaaaaaaatcagactgcatggcacttagaataggaagtttaaagagattaagtcatgctttgtcacccaggctggagtgcagtggcacaatcgtagctcactgcaccctccatctcctgggctcaagcagtcctcccgcctcagcctcccaagcagctggaattacaggcgtgagccaccatgcctggcctaattttttttttttttttttgagatggagtcttgctctgttgcccaggctggagtgcagtggagcacgattttagctcactgcaatctctgtctcctgggttcaagcgatttccagctaatttttgtattttcagtagagacagagtttcaccatgttggccaggctggtcaggaactcctgacctcaagtaatccaccctccttggcctcccgaagtgctaggattacaagagtaagccaccgtgcccagccctaatttttttttttttttttttttgagacggagtcttgctctgtcgccgatggtgccatctcagctcactgcaacctctgcctcccgggttcaagtgattatcctgcctcagcctcctaagtagctgggattacaggcgcgtgccaccatgcccagctaatttttgtgtttttagtagaggcggggtttcaccatgttggccaggctggtcttgaactcctaacctcaggtgatccaccgcctcagccttccaaggtgctgggattacaggcgtgagccaccacacccggccaaccctaatttttaaattttttgtagatgggggggtctcctcatcttgtccaggctggtctagaactcctgaactcaagtgattctcctgccttggcctcctaaagtgctgtgattacagacgtgagccaccacacccagctaaaagtattcttttaggtaacttgttttaaataagttgtgtgtgtatgtgtatctgcacatactgggttgcactatggaattatttcttattgtgagttgtaggaaaatggttgaaagccactgctttagacaccttcacaatgctcagctaggtaacaaaagatctgtagacagtggcctgctgtgtactttgccagatacatttcccacgaccctcctacagcagcattactataccttttcccggtctaaaagggtgctatcttcaaaggaccgtttttcccctccccctttaaaaaagaaagctaggaggaggcagtatagtgttgtaatgagccagactgcttggggttgagatcctagctttgtttttatgtagctgtatgactttagacaaattatttaatctatcagtgcttatttcatttgtaaaatgaaaataatagtacttttctcataggactgttaaggagattaaatgaattaatatctgtaaagtacctaaaacattgctgggagtgtagtaactgctgttatctaagaggccttatttattcttttttttttttttttttttttttgagacaagagtttcgctcttgttgcccaggctggagtgcaatggcacaatcttggctcactgcaatctctgcctcccgggttcaagtgattctcctgcctcagtgtcacgagtagctgggattacaggcatgcaccaccatgcccagataattttgtattttttagtagagacggggtttctccatgtcggtcaggctggtctcgaactcccagcctcaggtgatccgcccgcctttgcctcccaaagtgctgggactacaggcttgagccactgcgcctgccctaagaggccttattctaaagtcaaaagaacaacctggatttgagttccccagctccataattaactggctgttattttgggtcagtcttaactactctcctcatctgtaaaaatgggggtggtctggccaggcgcggtggctcacgcctgtaatcccagcactttgggaggccgaggtgggtggatcacctgaggtcaggagttcgagaccagcctggcaaacctggtgaaactccatctctactaaaaatacaaaaattagctgggcgtggtggtgggcacctgtaatcccagctactcgtgaggctgaggcaggagaatcacttgaaccctggaggcagaggttgcagtgagccgagatcatgccattgcactccagcctggtgacagagcgagactccgtctcaaaaaaaaaaaaaaaaaaaaaatgggtatggttcaacatgcattgagtgctggcattgtgcttctagactgtgaacttgaggttggggccattttctctgagtccccagcaccttgcataatgcgatatagggtgtacaataaacatgtgttgaatttataaatatttagcatctgccttatgcctataattgattagtactgtgatacaaagatgaaaaatgaaacaggtatgtaataagtgctacaataaggatgtcgacaaatgcaacggtagcaagaaagacaaaaacaggactaaccattgggtttggtcagatgatttcataagcaaaaagtctaccactagtggagagtggggccaccagtcagattatagtgaaatataagtggtcgtgttgcataaagcatcagtctctctctctctctctctctctccctccgtccctccctccctccctccatctctctctctctctctctttctttttttttgaaacagtttcactcttgttgcccaagctggagtgcaatggcgcaatatcggctcactgcaacctccgcctcccaggttcaagcaattctcctgcctcagcctcccgaatagctgggattacaggcacccaccaccacacccggctaatttttgtatttttagtagagatggggtttcaccaagttgaccaggctggtctccaactcctcatgtctggtgatccacctgcctcggcctcccaaagtgctgggattacagatgtgcgcctcggtgcctggccacatcagtcttttttttttttttttgagacgaagtctcgctctgtcgcccaggctggagtgcagtggcacaatctcggctcactgcaacctccgcctcccgggttcaaacgattctcatgcctcagcccaacgttagattggtttttccgagcctgtgaactccatggggtcgccagataaacgcaatcccggtggaccaacgcccaggacagacgctacgtaccaaccctgtgtcaagccgcaggcagcggttccggactctgggacttaacctaacgtggcggggcgggacttccggcgggaggcggaggcggaggcgcaggcgctggctggcaggtgtcgctaaccggacggtggtcgccagggcgagaggcgggagccggagaggtgaggcaggacccgggctccactgccgcctctccgagctcttgtgacgcggacctcagtgccaggatggctcggggcgagcggcggcgccgcgcagtgccggcagagggagtgcggacagccgagagggcggctcggggaggccccgggcgacgggacggccggggcggcgggccgcgtagcacggctggaggagtggctctggccgtcgtggtcctgtctttggccctgggtatgtcggggcgctgggtgctggcgtggtaccgtgcgcggcgggcggtcacgctgcactccgcgcctcctgtgttgcctgccgactcctccagccccgccgtggccccggacctcttctggggaacctaccgccctcacgtctacttcggcatgaagacccgcagcccgaagcccctcctcaccggtaaccgggccccagggcgggcaggcaggcggactcctaatctgggcgccccagcttgaagcgagagcaagggtgggaaggaatggatcaggagagttatgaagagggatgacccggagacccggagggacaggtcccctgctctttgacttacgtggccattctacccccaggactgatgtgggcgcagcagggcaccaccccggggactcctaagctcaggcacacgtgtgagcagggggacggtgtgggtccctatggctgggagttccacgacggcctctccttcgggcgccaacacatccaggatggggccttaaggctcaccactgagttcgtcaagaggcctgggggtcagcacggaggggactggagctggagagtgactgtagagcctcaggtcagggcctcaggacacccttttctcagcccagaccccctccatccttcccttgctgccagcaaatgcagcatgaagtgggctctggctgcctggcttaaatcctgccttaaacaactgcctgtataaccatttctatttaccatctctaa

SEQ ID NO: 8412 - DNA, 6000 bp, Homo sapiens
tcccatggtctggatattgtaggattgttttataagcaaaaaattgtaagcaaggaagtgtcaaaattggaaagaagcctcatgttactcacatgcagtgttttatttagttgtctttttttctcttaacatttaattgtgtctggggtaagaaagagaagaattcttcaaatccagtccatcactagcatttctttgttaagacaagttcacctttggagcaatacatctattaactctaggtagagtggtgtgctgatgaaaatgtttaacaactggctttccaactgtcattccaacatgagtattgtctgatttttttaaattaatgagtaagacaaaagtgaaacaagacagatgtatattgaaatttcacttgtttatcaatgacatgagttacttttttgttcaatcagaagatagttttcaaaaactggaagaatttttctcattttcatgctatttacatttattagtttggtgtaaaagtaattgaggtttttaaaaatgtcattacttttgcaccaacctaataagtagcttcgggcacagtaccttttaaaatttaatctatattattaatattttctctatcacttaagtctagatacacaacaaaacaataaatcacacttaattttttttttttttttttttgagacagagttttgctctttttccccaggctggatgcaatggcacgatcttggctccctctaacctccacttcctgggctcaagtgattctcctgcctcagcctcctgagtagctgggattacaggcgcccaccaccatgcctggctaatttttatattttcagtagagatggggtttcaccatgtttgccaggctggtctcgaactcctgacctcaggtgatccaccatccttggtcttccaaagtgctgagattataggcgtgagccaccatgcctggcaatcacacttaatttttaacctttgctgattttgttacagtaggtagctagtcagacatgaacagggcaggagagggcccacctccccaacccagaaatatcagatgaccatcaggtgatagtcaggcagttgctaattttctctctaaaataataattgatcacagccagcgccagggaagggccgtctcccagtagatggaaaacacatgaaactggtgatcagcagcttcccgataagatctcaggaagttgggtgagttggctcaagcatgcacattaagagacaaaatgacggagtttaactggtgtatgaccttcctctaggaacattctactagtaagggaagaaagccaaaagggactatgtgtagaactccagtaaacacaccgcacatgctcccctcccaagttctagcaggccactgcacatgtggcagatcacttcacaggaagaatcaggagagaagtaacacaagaccccagaagtgtgcaacatatagaatctcaagtcaaaatgtcaaatcggcacttgtctttgaagttgcccacttggccctcttccaagtatacttccctttcttttgttcctgctcaaaagctttttaataaactttgattcctgctctaagactttcctgggtcactacttcgcccttcagcctcctaggtcgaattccttcttctgaggaggcaagaattgaggttgctgcagacccatttggatacagattcaccgctggtaaccatttctaggttgtaaatactttcaacaatgtcaatttcaagttacccaaggtgtggtctctaaatgctctttggggtaacagagatatactattatcttcttagtacgtgaagtctcaagttggtaaatcaaaatattaagtccatcaagtatgatcaatactgtatataaattggaagcattttcccccattcccccagtaggaccaggtgcaaatgggctatttgctacctaggaaaaaagagaaagtatagtcaacttctctcattcttgctgaccccctcccacacttcctaactgctgtttcgaactgcccgggaaacatcttggttgactggtattactgtaaaaaggatttgttatctctgagcctaagagatgttgaaacatatttctttttttgtgaatgcattgatagatccttagtagccctattagcaataaaagacaaagaatatactttttatctggatttatgtggtgcctgtccacacttgattggtttctgtttgttttctgtttatttgcttgatttggcaatgcactcacacactctttccgttgtgggatggggggatctcatcaggatttgaaacagctccaaactgactctctcccacatagccctcctctcttccatggaaaacacatgtacctattttcatccagacaaactttgaaaatgaaattcaatttcaacacaacactaacttttctttgctctggaaaacccattgtttatcctctggatataccaacagaaatcagataccatcccactctgctaggctcactgttggcaacacataagaagctcttcaaggtgcctgtggaagtccctatcactatagttaatttaagctgaggagccaagaaacctaccactttttcttgggtgaagggtgtgtgtgtgtaaagatgataccaaaacagcttcttccaagcaaatcttccacacaacatcctctacttttttcaactttctttaccctttatatcattacaatgtgttcaagagacttttggccactttctttgtaaattctgcatacaatctagcacgtactttggaaggtagcacctgttagatcctggtactttgaacaaaatttgcattttagccagttattacactatagatgtgccagttattacactatggatgtagagaatatcctggggttttcccaacattctagcaaagctgttttcatatcctgaattcaaacaaagaaaaagttatacacacacacacacacacacacacacacgtatattgatagatatcacacatgacatattcattatatttaaaattagaaaacacagacaattttataataaaagatgaaatcaaatacttctataatccatcttccaggaaagtctgctctgaatattttattttgctctatttacagtaatagactccctttcactgcccttaactatctgagttctctgccccaccttgcttactttatacatggtggtctaatttcctatcagcatatatcaccctttattttaattttaatggcagtgtgtgttctattttattaatatattaattttcccttcactcatcctctaccattgatatttgggtgggttttgtgtttctatattaaactacaccactatgaacaaatcgtatgtgtacatttatattgatatacttattttcagcaaccacaataatcctgcctcttttggcgtgcatttgcattttaataggtattaagccttaagccaaaggcacacatttctaagatagaaattcaagtatcagttagtggaaaaggaatatatttgggggacatattattcctttctgttcctcaagaaatcttagtaatgagacaattgcctgcaactgcctactcatacatctgagtcaaattatatgtgttatttatatgataagcccccttaattattaatattttggcaaacaatctaaaaccaaggctctttctaaaaatatctatttgcgatgatccacagcaattctaaatgcttatgtgaaattcatttaaatttctcacgtctgctaaattaggttagcagtcttacctagcagtctctccctgcattacattgattcattctcctggattattctaaaaattgttatctgccagaggattatggaataaactagtaaaaatgaggaaaaaatggaggtgatgcactatgtttttcaacgtctgtccaagcttaaagaaagtgtgtaggtccttttaaattatatatatatcaggtgttttatcatgtcatcccttctaattctgaggatattctgcacattttagagtaataccatgataatgcagaactcaagtgcttttgtttttctggaattgcacattacaataagtgatttgcataagaaatgatttgcattctaaatgtagatgatttaaggataatggctgcactaagaatgtcaagctagaattctactcttatctcttagttaccttcacatttggtaatatactatagattataactgctttaagactaaaaatgtaaacttttagaaagtagtgttctagactgttcaataaaatgcacaaaattgtaaaatgcattttatgtcaaaggttgagaatttgaaaatcagacttaaacatgttaaatgtaacctgtttaaaattgattaaaattgcatttttcccttgaataagatttcttccataagcggttagtttaaaacaatataaataaataaaacaaaccaacagcaacagtgaataaaacttaaatttcaacaatttctgtcatttgcaaaagatgataaatctccagtgacgtgcagaaaaaacaaatttcaggtcatggcaactttgaaaaactattaattgcataacatttagagaagcagtattttacttaatatttgctataactgaaaggaactccttggcataaaccttttaaattattggagagaaaaaaatagtgattctgtgcctttaatttccctttctgagcaagggaaggctgcacaccactgacaggctcacttgttcccgtctttaatgtgcaatctgttttctccagcggagggcactcagtgtatcacaaactcaagcattagcaccaacaagctctgagcatcatcagtctctggaaagccttctgaattagacaagggctgcctcccagcacagctacaaaacactttaaacctgaccagctaaatggataaacctagcctgcatagcttttaaactggggtctcatacagcacaggaggcctacttgcttcaagaactgaaaatccagaggatgaattgctttatctgggaatggcaaaagccagcacaataaggaatgccaggtattctgaagattttctttttttcctctctttttacagagaagttggttacctccgagatgggctgtagctcttttgcacagattgccaattactgctgatgggtctctggtgaattacacaatggtcctcagagcctagaggccctcccccatccctatccccccaacggcttccttttccctgcccccacaaccatcccaccctgtgctgattttttatatatatatatatatgtatatatatatatgtattttttttttttttttttgcctgtcctctcggggaagtttgtatggggctactagctcacatgcgggatcagaatggtgtgaatgacagccgcactgtgtcatgaaggtggtggtggtttccgcacaagagaccaaataagaagaaagctgagagaggggggaaacgtttttggatgacaaaggatgggtaagtgaacttttgttgtttccttctgagcaaagctgatcctcttggcttcctatcctcagtcgtggcattagcagataaaagacggggaaacaggcaaagagcagcagcctttgagtttgccagttgattcactatagttgctattatatttttagatcattttcctttttgcagtgttttttttttaatctataaatgcacaacacgaacttaaacagactctagagaaatatctttaagactgtttctactgtctgcgtatccacagcttgggaattcagaaggagataaatactgtgtttgcttctatttcttgataatattaacgaggcttgtgtttctggtagctgtcaggatgactattaacactttgctgcgtgtatgtaggggtggggtccttactttatcagaggttgcacaagggcttgttttatctttgaagctggatcctgaacacagcttccgaatttccagcagtcatttgccagtcttattttttcgagtgtgactggcttttttcc

SEQ ID NO: 8413 - DNA, 6000 bp, Homo sapiens
aaaacctgtggagagggaggacaggcctcatgaactggcatttctttcttttctttctctctctctctctcttttttttcttttttcctttttctgagacagagtctcactctgttgtccaggctggaatgcagtggcgtgatctcggctcactgcaacctccacctcccaggttcaagtgattctcctgcctcagcctcctgagtagctgggattacaggcacccaccaccacgcctggctaatttttgtagttttagtagagagggggtttcacaggtttcaccatgttggccaggctggcctcaaactcctgacctcagatgatctgcccacctcagcctcccaaagtgctgggattacaggcatgagtcaccatgcccaggagaacttgcatttctatttattattattaattcatttattatttcttttattatttattctcatcatttacatcattcatagagcatggcagttagtttcttattgctatccatgttaccacgttgctttaagagttggacaaagtttgataagtagaatgacctcaatttctaatttgtttctcctaagtggatctcctgagagcagccttggggcccccaccctcagcctctccatgcaccttttgagcattctgtaaaatgccagctgtatggtatgtgcccacagaaacaacaaagttaattctctctttttgaaattgtgactcccactctccgccaattcttctaaaggtttccttttaaagaaaagccatggttcgctgccactgaaaattaaagacaacagcataaagatcaaggtccaggctggtgctagcgatgacagaacattaaaataatcactcaaatttccttccttgaacattgacaaagattgctaatggaaagccaatccccagaatgcagattcatttcagactttctgcacttgcacctctgtgttcacaaattattttgactaaaatgaacaaattggaagtgttgagataaaacagaagtaatgacataccaaaaaaaaaattgtatgttactcccccactccacttcacaacatagagtaccacgaaaaacaggagggctcattaggcaaaggctaatttacaaggttgaagagagaaggaattaatcgactcttccctccgtcaagctatacttctggcctctctaactacaacgaatttgctccatgagcttctctcttctacctccccttagttccagattatgtttggccatcagattcataactcatataacccagacttccttcccatttgctgaatccatattttcaagattcttatcatttcttaccccaaactggaggtctggcctcagtgcccaatcacatgttggcatgatggcttgggatggtattcttgatgcccaactattagtactagacttgcagctatagcggttcagctagatgagctcaggttccttcccctgacaaacatggaaaatgtcaagggtattttcaaagcatataaagcatctcttatccaatatacaacatttgaagaagaagtttgccaacagaaatctatggtcacccgggaagaagagattgatccagtacatgcaatagctacattgtaacctggtgaatcagatattttcaaaagacaggtacagacatatgagagaataagcaggaggaaagaaaaaaaacttcaggtgagctttttttttctttttttccttttttagttcattggacacttacaggcatgaaattaaaactcatgaaaaacagccatatcgacttgctgtggtgactcaaaagttgtcgtttctcgattcaactttgctgaaacactcgattcatgttgttcttatttaacctaatttgcattgatttaatcagtgctggtatgctttaaatacataataaattgggattctgcaacttagatgacttagaatagctaaatttcaataaagctcatttcaatctgttaatgtatacggttctgccaaggggtttaaaactgtagaaaagatgcaaacttgccacattagaggtgggaaaggcttaaagataccatatagatgaaatgatttgcaggataataatgcaaaaagcaatatatagaaaatatatatttatatataatatatatatataatttatttattttaattacagcctaggagcatcttgtaagttttgagtagcacacttagaagaaaactcacatataaatcagtgaatttaattttattccctttctttcttgccaacactcaactcttctgcctctctgcaccagctctacaaatcaagtgacatccaaagtgggacctcttcttgcccatttggcagcctctgtcaccactttgccaagcagccagcattaggaggatttttttttttcctagcaaccctagggattgggtggtgtgtactcacagtactcgctgaatggctggccgctgtttaaccctgcgggtgcctcctcaacacccctcccccacctcccaaccctttagagtttatggctccatcagctggcctgctgtcacgaataattgtcttggcaagaggtgaaaccacttgatggtgaatttgtttgtctgtctgttaaagtgttccgcagcaccttggaggtgccaggatgaaacatgcaaatgcctgatccagagttaggtaggcagcaagagtgacagagaggcaatcatcaagaatggcaaattaagaaagaaagaaagagagagagagaaagaaagaaagaaagaaagaaagaaagaaagaaagaaagaaagaaagaaaagaaaagaaaagaaaagaaaagaaagaaagaaagaaaaaaccatctgtgccagttgcaagctgtatgaccttggataaaccatgatgtctcttggcctcagtttagtcacgtgcaaaattaagggggttgattttctaatgtctcttctaactcctaagacagcatgtgatgtctaggacatttcagatttgtgttccttccaattaaatgatacatctcagagatgaatgaccagggcagagctcagatgaatacaaaatggaatgattcatgcccctgttcatatgacttttcctgaaaagtaccaccagtctttggtgactttgattccattggttggcctcttcagcttagatgctaaggaccaatccagttacttgtccagtctatctaccctggctctggtaatccaccctcattcctatcaaagtaagtgccactacatataatgcctactgattttgacttccttagaggcagaaacgatgggaattcaaacagtggagctggagactcacatttgactctccctaccatctccctgggcatctttgtcaagaaggaaggcttgcccacactcacttcccgcaggctttctcagccatcttggaggactttgtttaaacagatgaccaactgaccctccccagggcagaccctctacagaccagtaggcacaaggtgtgtgtgtggggaggtggggggagagctcattgtaaggactcctatctataaatgattatgaatagaaataatgaggcaaaggcttctcgtcatactcagaggaaaaagtggcacaacttagtgcagtctcaaagattaattaggatgtgtgtatggagacgggtaggcttcattatggcttaaactatcacgtccctacacattcacactctcttggagtggggtgcactgcagggcccagtaatcaccatgaacagcacaagtcagggtaagccctccccatgtcagacagtacaatcgttctttaatccactctgtaccccatatgtatctgtggagcctgatgaagccccggagggatctcagtcaagtctccctgcacacagacatacctttttgccacactggatctcacaccaccgggacttggatggcttcccaaactaggtgggtttggaaagcatttcccctctccacctcaaaaaagggctggctgactgcagaattccagtacccgcaagagggggaaaaaaccccaaaaatcttagccaagccccaaatcattgccttcctgtgtcttctctcaagttgcttttctaaagcaaaggtccaaacgttgatttctctacagattcctacgtatctcttacacgtagacagttttaaaggggaaaagaatatatccccaaaaggcaagggggagagcacagaacatttcagtttcccacttggaaatatcttgtcgtggatgatgctacccctacctccacctccctcccccctcctttttttttttttttttttttttgaaatatggacaaaaaagctgaaagtgttttccgtttcatcaaaaaacatatattactttagtggttcggtaaaatgttggttttatgcccaccccttttcaatctgcccatgtctgaggtgctcggggaagacgcacaatcgtgagcagcttacgacactcagtgagcagtaggtgcctgtgcaagctcgcgccgcacactgcctggtggagggaaggagcccgggcgccgctcgccgctccccgcgccgccgtccgcacctccccaccgcccgccgcccgccgcccgccgcccgcaaagcatgagtgagcccgctctctgcagctgcccggggcgcgaatggcaggctgtttccgcggagtaaaaggtggcgccggtcagtggtcgtttccaatgacggacattaaccagactgtcagatcctggggagtcgcgagccccgagtttggagttttttccccccacaacgtcacagtccgaactgcagagggaaaggaaggcggcaggaaggcgaagctcgggctccggcacgtagttgggaaacttgcgggtcctagaagtcgcctccccgccttgccggccgcccttgcagccccgagccgagcagcaaagtgagacattgtgcgcctgccagatccgccggccgcggaccggggctgcctcggaaacacagaggggtcttctctcgccctgcatataattagcctgcacacaaagggagcagctgaatggaggttgtcactctctggaaaagggtgggtaagacactttttaattaaattctttcccgaagattttttttttcctcccttttctttgctgcagcatctaacatggaccaaatcaccatctctttgatctttccgtggctgtgaactttctatgctgcccagctttctgcatgcttagaggtgaacgtgtggtttttggggaggggggtccttctttatttctatgtatttatttgattttttgcccttttctccccctcccccgcttcccctccctcggaataaaatatgatgtagatttctgaccgagcgcttccaatggacattctccagtctctctggaaagattctcgctaatggatttcctgctgctcggtctctgtctatactggctgctgaggaggccctcgggggtggtcttgtgtctgctgggggcctgctttcagatgctgcccgccgcccccagcgggtgcccgcagctgtgccggtgcgaggggcggctgctgtactgcgaggcgctcaacctcaccgaggcgccccacaacctgtccggcctgctgggcttgtccctgcgctacaacagcctctcggagctgcgcgccggccagttcacggggttaatgcagctcacgtggctctatctggatcacaatcacatctgctccgtgcagggggacgcctttcagaaactgcgccgagttaaggaactcacgctgagttccaaccagatcacccaactgcccaacaccaccttccggcccatgcccaacctgcgcagcgtggacctctcgtacaacaagctgcaggcgctcgcgcccgacctcttccacgggctgcggaagctcaccacgctgcatatgcgggccaacgccatccagtttgtgcccgtgcgcatcttccaggactgccgcagcctcaagtttctcgacatcggatacaatcagctcaagagtctggcgcgcaactctttcgccggcttgtttaagctcacc

SEQ ID NO: 8414 - DNA, 6000 bp, Homo sapiens
gttctcagaacttactaacattagtatcactacactttgtattaatatataacaccccattgctaaatttgattgtctttaaaaaatcccaattctgattctatctttcctctacttaaaactctagcggtaccattattgttaagataaaatacaaaaccctggacatgccccatgagttctgcatcatttggactcctttcctctattgtctagtaatttggacaccaggtcaggcttaataatttactgttccctcaccagacacacatacccttgataagccaatatctttaaatgttagtcaaacacttatttaggggaggtagaaataattttcttttccttttttttttgagagagtcttgctctgtcgcctaagctggggtgcagtggtgcagtctcagctcactgcaacctctgcctcccaagttcaagtgattcttctgcctcagcctcccgagtagctgagattacaggcatgcaccaccatgtccagctaaattttttttttgtatttttagtagagacggggtttcaccatgtatgtcatgccggtctggaacacctgacctcaaatgatccgcctgcctcggcctcccaaagtgctggaattacaggcttgagccaccgcacccagccagaattttttttttctcttgtcttctcttttttccgttttttgggacagagtctcactttgttgccaaggctagagtgcagtaacctgatcacagctcactgcagcctccacctatgacgctcaagcaattctcccatctcagtgctgctgggactgtaggtgcacaccacgcccagctcatttttaaaattatttgtagagacggggtttcgccgtgttgcccagggtggtcttgaactcctgggctcaatcagccagcctcggcctcccaaccaaagtgctgggattacaggtgtgagccactgcacctcaccagagttttcttttagaaacaaattaatttaccaattcatttcttttagcctaagtggagtcaaggttctaaatagtttggcaaaagatttctcacttcctgtgattcttattttctcttcagtaatgagtgtatgtgtgagagacattttcttatgacagagaaacatattgagaacataattgttttttaaattaaaaaatatccggcctgggcgacagagtgagaccctgtctcaaattaataaataaacaaataaaaataaaaataaagcacttgttcctgaaaattatatgccactatatgcactattctttgaaattctgaagaactctgattgactagaactgcatatcatgtaagccaaatattgccctcagtagactccagaggagttatttcccctggcagctatagttctttctggcaggagagggactagtttacatttcaatcaaagttaactggcatacagcagggcgcagtggctcacgcctgtaatctcagcactttcagaggctgaggtgggtggatcatttgaggtcaggagtttgagaccagcctggtcaacacggtaaaaccccgcctctactaaaaatacaaaaattagcccggcgtggtggcgggtgtctgtaatctcagctacgcagtagtctgaggcagaagaatcatctgaacccgggaggcggaggctgcagtgagctgagatcacgcactccagcatgggcgacagagggagactccatctcaaaacaaaacccacaaagttaactgccttattttctgttgtactttttgtgcttagtagattcatgttctagacaattctcaggtcatttgttctttaacctggctctgctccagcctctttcctgcctttctccttgttctctattacctgacaatcatagtctttagacttacacaaaataccaggtccccacctgtctgcaggccattgtattaggttggtgcaaaagtaattgctgtttttgtcaaacagcaaaaacgcaattgcttttgtaccaacctactacatgctgtacactcagccaggaaagctcatcctcctcttcccttcatcttcccagtatgtacctgggacatagctacatcctttggtcctcatcttaaaggtcccttcctcaaatgatctcatagtttctataattttctttctggcagttcttggaatgtgcatgcacatacacacatttgtgtagatatttaatatttatgtaccgcaaactgcatgctccatgaagttaatacctaccttaaaaatttgatatagggccgggggcagtggctcacgcctgtaatcccagcactttgggaggccgaggatggtggatcccctgaggtcagaagttcaagaccagcctaacatggagaaaccccatctctactaaaaatacaaaattagctaggtatggtggcgcatgcctgtagtcccagctactcgggaggctgaggcaggagaatcgcttgaacctgggaggcagaggttgtgctgagccgaaaatgcaccattgcactccatccaaaaaaatttttttttatatagttgtacatatttatggggtacatgtggtggtatttttatacaggtatacaatatgtaatgaccaaatcagggtaagtgggatatccatcaactcaaatatttatctattctttgtattgggaacattacaattcttttcttttaaaatatacaatgtttctgttaactatattttcctaccgtattactgactacagaacttactctttttatgtatctgtatttttgtacccattaacaaacttctcttcatctttcctcccatcttcccttcccagcctctggtaaccacctctacttccatgagatccactagtctcagctacttggaaggctgaggtgggggatcactagagcccaggagatggagattgcagtgagctgagatcgtgccactgcactcaagcctgggtgacagagtaagaccctgtctcaaaaaaaaaaaaaaaaaaaaaaagagagatgggatcttgccatgttgcccagtctggtctggaacttctgggctcatgtgatccccctgcctcagcctcccaaagtgctgggattacaggagtagatatcttagatatacttatttcctttcttttgtacatatccagcagtgggaatactggatcatatggcagttctatttttagtttttgagaaactctgtgctgctttcctttatttttttatagagacaagagtcttgctacgttgcccaggctgatctcgaactcctgggctcaagccatctgcctgcctcagcctcccaaggtgctgggactacaggtgtgagcctccatgccctgccaatactgttttccataatggctgtactaatctacattctcaccaacaggctattagcattcccttttcttcttatctttgtcaccattttgtatttttttttcttttgataacagtcattctaactggggctaagatgatctcttattgtggtttggatttgcatttccctgatgattagtgatagtgagcattttttcatataccatttctatgttggccatttgtatgtcatcttttgagatatgtctattcagcaggtcctttgcccatgtttttcttttttctttttctttttttgagatggttgcctaggctggagtgcagtgataagattttggctaactcactgcaacctccacctcccaggctcaagtaatccttccatcctcagccttctgagtagctgggattacatgcacaggccaccatgactggctaattttttgtatttttggtagacatggggtttcaccatgttgccccggctggtgcccatttaattatattttttccttgagtttattatatattctagttattaatcccttgtcggatggatagtttgcgaatagtttctcccattatgtaggttgtttcttcactgtttcctttgctgtgcagaagctttttaacttgatgtaatctcatataagacctatcatttcttaaatcactgtctccaaagcaccaagcctggcaatcgttgataaagtgatttcaaacatttaatgtataaacataacagtaactgtaaacggtgagatacaaaaccacttacctgattatcccaatatggggagaaaataaatatgcatagaggaaaagagaaatacactaattaagaagggaaagagtcctttttttttttttttaacaaaactaaatggaaacataataaactaatgtaagcggtaacctgtggaggagtaggaagacttttctaaagtctgtttactttaaaatccggttttcatttctgaaacattataatgtattatctattcaaaaacatcaaatgtttagagggcagacaatacactaaaacattaatagtgattatcccggaagggtaggagtcaggctttgttttctgcttctgtatcagaaaaaggatgcactttttggaaaagatgtttggcgacctggaaggacaccgtctccgtggagtcgggaaggaggagggccaggatgcgaaggcaacgctttgcaggtgatcggatggatttattcccacatgggagagaccagagcacagcacgtttgtgtacggccaggagggaaccacgaaaaaagcagaggatagaaacgcaagcacacgatggtggtggccaagaggagcctgcccctagtgacctcacttccgcggccagtgcgagaggcgagggagctccagctctgcctgtaaggtctcggaagtacgaggcggaggggacgaaaaacggggggccagactgttgtggctgtggtggagacgagaaaccaggaagaagaggctcgcctcccactcggcgacagtaagcgaagcagccgaaggcgagcgccgacatcagcagctgccccctaaatcccgcccttcgtcttggcggcagcgggagactgagagacgcgcgcagcaggggcgggactggagaggggccccgcgcgcggatctcgcgagagcattagagggcggaagcgctatccgagcaggatgcggttcgtggttgccttggtcctcctgaacgtcgcagcggcgggtaagaccctccatcccgcatcccactcttgcccccagatcccccattctcacctgggcaggtcacctctaggctcgcttcttccctacccgacccacctctccgctcgccatcgtctcccgccccaccccccaatccccattcccccgctgctcccgatctcttccagttctgaggagttccttcttcccgcctgcccttctccggtgctaactcgtttttctatttcaggagccgtgccgctcttggccaccgaaagcgtcaagcaagaagaagctggagtacggccttctgcaggaaacgtctccacccaccccagcttgagccaacggcctggaggctctaccaagtcgcatccggagccgcagactccaaaagacagccctagcaagtcgagtgcggaggcgcagaccccagaagacacccccaacaagtcgggtgcggaggcaaagacccaaaaagacagctccaacaagtcgggtgcggaggcaaagacccaaaaaggcagcactagcaagtcgggttcggaggcgcagaccacaaaagacagcactagtaagtcgcatccggagctgcagactccaaaagacagcactggcaaatcgggtgcggaggcgcagaccccagaagacagccccaacaggtcgggtgcggaggcaaagacccaaaaagacagccctagcaagtcaggttcggaggcgcagaccacaaaagatgtccctaataagtcgggtgcggacggccagaccccaaaagacggctccagcaagtcgggtgcggaggatcagaccccaaaagacgtccctaacaagtcgggtgcggagaagcagactccaaaagacggctctaacaagtccggtgcagaggagcagggcccaatagacgggcccagcaagtcgggtgcggaggagcagacctcaaaagacagccctaacaaggt

SEQ ID NO: 8415 - DNA, 6000 bp, Homo sapiens
cgagatcgcgtcattgcactccagcctgggcaacagagcaagactccatctcaaaaaaaaaaaaaaaaaaaagagtcatgtaaaactactgtgtttcattagtcagattatcaaagatcaaaaagtctgataacatgtacattggccagagtgcataacacactggagagtaaactgttaccacctctacagcttgatagtacctaatgaaatcatacatgttttgtacatgcggggcctgatactgcattctagtaatttatctaacagatatattcatccatgtgcaaaaccgacatgtttacatttatagtgtgattctttgtcatactgtttataatagggaaaggctggaaaaacctaaatgttcattaatgggctgatttacataaataaaagcacattcactcagtgagatactatatggccataaagacaaatgagaaagtgctttactttacaggcaatatgggacaatttccgtgatgtattaagtgaaaaagcaaaggacagagtctatacactattttaccattttattttttaaaagtacataagcacatttgcttgtctctgcagagaccattttcacagttatacccaaggaagcagtagctttgtctccagcagaaaaactgagtggctggggggacaagggtggaaggtggtttcttcacaatacatatatcgttctgtactttttgcattttgaaccatgtgaatgtattatgccaaggccctggaatcccagatcatcctgttactctaatccttctgctttttttttttgcctttccaactaatgctcattaaacacaactttcatttcttcatgttccagatgcaaggatggaggccaaaacacctcacagctgaccaagctccctggtaaaggagctcatgatggctaagcatttatttcccactgtaatgcaatcaacacacctgctgcagatccctctcctcacttccatccctttgttcatgtagttttcctccagaatacacctccactctcttctctgatcaaggtcagttccacctactcaaggcaacctaccttactagctggggctacaatgctgtctcacacctctaagtccagtaacccttgtatgcagcaaaagttcctctgcaaaaggcctgcataaggaccttctcttatatttcttttttcattttttttttttttttttttggagacagagtctcacttggtcacccaggctggagtgcaatggtgtgatcccagctcactgcaacctccgcctcctgggttcaagcgattctcttgcctcagcttcctgagtagctgggattacaggcatgcaccaccatgcccagataattttgtatttttagtaaagacagggtttcatcatgttagccaggctggtctccaactcccgacctcaagtgatctgcccacctcagcctcccaaagtgttgggattacaggcgtgagccactgcctccaggctcttatatttcttttatatgtttcacaaccattggcacagtactaagcacaaaatatatttctcaaatttttgttgaaattttatctctaaaatatttggtgattcattgtgctgaacaacttcctgcaggcatctgtgtacctgagattcatttcatccttcctttccttctccaattcagtcccctccagtgtccaaagacttccctctttggaacagttcgcatattactacagtgaagaaaatctttctggagacccaaagcaaaggctttgtcccagtctggccactgaatcccacagcctccatttaagaccatttttgggtgggcaaagtagtgtgaaaggtaaggcatgtagggttagctgcccggctcatacaaagacatatcacattgaactgagtcctgaggatgatcaggccaaagcaagcgtttcacagggaagaggctagtaaggtaatgatccaaatcaatgaaatacagatttcttgggtgattcctcaatgaaattctccccactacccaagcaaaaagaaaacaaaaatctcataactcacttacaaaacaagctattaggaaaagcaattgaccctgaggtgaatagaagctccttcttacagaacaaagagaactataatgagggtttctaaatttttccaaatattctcttaatatattcttactatacttaatgatatatctcaaaccaacaccacctttcccaaataagagtgcatgcttacctgtccatctcttaattcttctttactatggaaagagcaagatttttcattcatgactcaaaatcatttgttcatgtgagctttgtccttgggcccagaaagcattttagtaaggtctgagatcagaagctatgtggagagccagagatccagttgctctacctttgccttccttggcagtcactcagactaagagtaagaaaacagtccctttgtgccatccgagggtgtaggaggtttctgtgagtgctgagagaagtcctctgaggtcttcgaagcctcagctctgcacaaaagaaaaaaaagaaattgaaaaagaaaactggtttcaccattcagttatgcctctgttgacaatttttttttttttttgagttggagtcttgccctgttgcccaggctggagtgcagccgtgcgatctcggctcactgcaacctccgcctcccgggttcaagcgattctcctgtcccagtctcccgagtagctggaattacaggcgtgcgccaccacaccctgctaatttttgtatttttagtagagatggggtttcactatgttggttaggctggtcttgaactcctgacctcgtgatccgcctgcctcggccttccaaagtgctgggattacaggcatgagccaacacgctcggcctgttgacaaaatttaagcagctgtgaatttattctgaatgaacaacttgcctcagccaaatgcttacctcttactacccaagccacaggatggccaaaaggggaccacacaggggactgtgagctggattctgtgtccaaaaggcagcagcaccactagaagggatggggtctgtttctgacaatggagttactgggacctgggccagcttatcaaaggcgtgaggctaaaggtgtcaccttggtgggtggtcttagctgaagtgctcaggctttgtttaggcctcacacacaggctgggtcaggggcttataatactagacctggttccaacaatggtagaaattcaaaatgcaacacgatgttctaacctttctcagttatcagcaatactgtgcatgtggcagctggctagccagtttgggcaattctaagtctttcatctgacattgcttccctcaggaaaagggctggacaaggctcatacctcatcacaggggaattggacatccggaatgtctgtcacatcaaaaattgcatcctaagtgggcagatggcccacacacaactgacaatcatagttcacaactttgggtgactaaggaaggagggtagcctctctatgaggtcagccctccaggatgccataaaaactggctgctggtgtcaggatgctttgattattaacactgagaggaagaatacctcctggctcttgggcttgacatgtggctcactgtaatccgggggacagggcaatgcccccttagtcctggcaccccaggaactaaactgctctcactgtggcctctggggcctcaacatctgcctcccctttccttttcctccatcatggcctccatgacagcctatgacaaaacacacattggccagccttggcaaggtgacaggcgggtatggtaatagcaatctcaggagggctcttctgttgctgtgtagaaaatgaaccaagtagcatagaatcgtgaccagctttccacacctggctggagcactcctggggccttcagtagggacagttactatctgtagcagagaagaaaagagcaacaattccattaaacaaggaagtactcaaaggcaaattcctgatagttggacctaaggaaacggccttcctgtaaaaatggatccttctccaatcaagtattcattatgcaccctctttaggcaaggagggggtatgattcttcaactgcttgctggaggttagattctctgcataggaatttaaattagatgggcccttagctgatcctttcaccatgcttgtccatgggcggctccccgtcccccaggttccccacggatggggtgtcattagggacccgccatagaggactccgtcccaggcgggcccccaggacaaaactatgggccactttgaggggcacagagacagacgctcaccggttgtgatgcgcaggtaacagagagctcaattcatcatgacaaccagtcagacaggggctgtgagcagcctttggacagaactttcgcatagcctggaggcgtaagacgaggaaagcaatttaacacctcaaggcagcgagtccagggcagagccaggaccagaactcaggactcctgtctcccagtcgggattctctttcagtcttacaactctcggccttgtctcgccccatagtgataatttccaccggatcacattctccctccctcctcaggccggctgctagctccgcacaggcaccaaccactccccttggcaagtgttaacgcgttctcaccgttaaaagagctttccaaacttgggggtcccgccgcctcggctaggcctcatctgctcatgcgcacagccgcttccgtgccggctcccctggccccgagaactacatttcccagtaggcaatggaaacccaaaagaagtacggagagccgggagggtcaatcatcacctgagagttggctcttcgctggctggctggttaatcagtgctcaaagctgcctccgcctcctgactggagagcgaactagcccgggcggagccacagtcctagaggctgagcgcagtcggagctgtcccatttacccgacccgacgccggcgtgatgtggcttccgctggtgctgctcctggctgtgctgctgctggccgtcctctgcaaagtttacttgggactattctctggcagctccccgaatcctttctccgaagatgtcaaacggcccccagcgcccctggtaactgacaaggaggccaggaagaaggttctcaaacaaggtagcaggagggaccctggggtccggggctgcactcgaggctttctcacagatttgggttctcattttgccaaggcagccgctaccagacgtgggccttagtttccccatatgtaaagtactaggagggcttccttgcacgtggaggagccccgctttagtgtgcaacactgtcgatagcctttgccctagtaggccccgggaatagtagtcccaagggtgtggtcattgtccttggtttgcaaggtgttggcacccgccctgccacttgtaatccccgtggctcgtggaactgataatccccgtgactcattcctccacttggttccaggaccttaactttttcacctaccctcccatgcgagctcaggggtgtgggggagcagcacagaaatgcgtaggaaattgcgttttgcccgtccggtgatttaacaggctttgcatggtcccaaatcgtaaggattgaaccctagttctgaaacattggcagaggttcaacaaggcgcctcaggctcagagcctgctctccactctcatctttaaaacatattttgtggttgcttctagagtttaaagagttctgctgctttaaaaaataatggatcacctgtttgatctacggagtccctctcacttgtaaattttagaattctccgtgtcatatcttgctacacaatcggagacagtactgttctaagtggaaggactaatcatctggacttctgagaactgagttttagcttggactctgtcactaatttgctgcataaccattagcacctacctgggctggtctaaaaatgagatgactagcttaactgcttttcaaaccggattgtgatctattagtgggctatga

SEQ ID NO: 8416 - DNA, 6000 bp, Homo sapiens
tggctcacgcccataatccaaacattttgggaggccagggcaggaggattgcttgagatcaggagttcgagaccaacctgggcaacatggagaaaccagatctgtacaaaaaattagctaggggtggacacctcacccggctacttttttgtatttttttgtagagatggggtttcaccatgtcatccaggctggtctcaaactcctgacctcaagcgatcctcccaccttggcctcccaaagttttgggattatgggcgtgagccactgtgcccagcccctctgcctatttttatttgggttgtctttttcattgttgagttgcaggagttctttacatattctggatactagaccctcatcagatatggttttaaaatactttctctcattcttttcactttcaagtatccctttgatgcacacacccaaaaaagcaaatagtgtccaattgcattctttgatgaagaagaatacaagcagtaagtcaattacagcctatttttttcttttctttctttctctttctctctctctctttctttctttgagacagggtcttgctctgttgcccaggctggagtgcagtggcacagtgacagctcactgcagcctcaacctcctgggctcaagcggtcctcccacctcagcctcctaagtagctgggactccaggcgtgtgccactgcgcctggctaatttttgtattttttgtaattttttgtagagatggggtttcaccatgttgcacaggctggtctcgaattcctgagctcaaataatcctccctcctcagcctcccaaagtgctgggattacaggcatgagccactgtgcccagtctatggttgtttttaaattaacagactaggccgggcgaggtggctcaggcctgtaatcccagcactttgggaggctgaggcaggcggatcacgaggtcaagagctcaagaccatcctgaccaacatggtgaaaccccgtctctactaaaaatacaaaaattagctgggcatggtggtgcgcgcctgtagtcccagctactcaggaggctgaagcagaattacttgaacatgggaagcggaggttgcagtgagccacgattgtgccactgcactccagcctggcgacacagcgagactccatctcaaaataaataaataaattaattaattaattaacagactattctggggggacaattttagccttacagaaaaactgagcagaaagtacagagaattccaggctgggagtaatggctcaagcctttaatcccagcactgtcggaggccaaggagggaggatcacttgagctcaggagtttgagaccaggctgggcaagatggtgaaaccccgtctctacaaaaaataaaaaaaattagccaggcacagtggtgcacgcctgtagtccagctacttgggaggctgaggttgaaggatcacttgagcccagaaggacaaggctgcagtgagtcaagattgtgacactgcccctccagcctaggcgacagagggagactctgtctcaaaaaaaagaaaagaaaaaaaaaaaaagaagaagaagaaagtaccgagagttcccatatcccccttcaggctccccatttttcctattattaactttttgcattagtgtggtacatttgttacaactgatgagccagtattggtatattattaacatagcccagccgggcgcggtggctcatgcctgtaatctcagcactttgggaggccgaggcgggtggatcgcctgaggtcaggagttcaagaccagcctggtcaacatagtgaaaacccatctctactaaaaatacaaaaaattagctgggcgtggaagcgggtgcctgtaatcccagctactcaggaggctgaggcaggagaatcgcttgaaactgggaggcagaggttgcagtgagccgagatcgcatcattgcactccagcctgggcaacaagggggaaactccgtctcaaaaaacaaacaaacaaaaaaacatagtccatattgatacattataattaactaagtccataagttacattaggctttactcttttccacacacaagtatgacatgtatccaccatgacactattacatcatacaaaatagtttcacttctgtaaaactcccctgtgctccacctaccatcccttcctccccccaactccacttccctggcagtcactgatctttttattatctccatagtttagccttttcagaatatcatacagttggggccaaacgcactgcctcatgcctgtaatcccagcactttggaaggctgagcaggaggattgcttgagaccagaagtttaagaccatcttgggcaacatagcaagaccttgactcaaaaaaatacatatatatatgtcatatggatggaatcatagtttgtagtctttccacattgatttctttcgcttagcaatatgaatttaaggttcctccatgttttctaatggcttgatagctttttttttttttccttgagatggatcccattatgttgccccggctagtcttaaactcctgaactaaagtgattgtcttgcttcagcctccagaaaagctgggaatagctgagactacagaaacatgccattttttttcctttgtagtagaagttagaaagcttttttttttttttgagatggagtcttgctctttcaccctggctggagtacagtggcgcaatctgggatcactgcaacctctgcctcccgggttcaaccgattctcctgcctcagcctccccagtaggtgggattacaggcacgtgccaccacacccggctaatttttgtatttttagtaaagacggggtttcaccgtattggtcaagctggtctcgaactcctgactttgtgatccacctgcctcagcctcccaaagtgctgggattacaggtgtgagccaccgtgcccggccttttttttttttttttttttttgagacagagtcttactctgtcacccaggctggagtgcagtggttcgatcttggatcactgcaacctccacctcccgggtacaagtgattctcctgtctcagccttctgagtagctgggattatagacgcctgccaccacacccggctcattttttttgtatttttagtagagacggggttttaccatgttggcgaggctgatttcaaattgctgaccttaagtgatccaaccgcctcggcctcccaaagtgctggaattacaggcgtgagccaccgcgcctggcctcaaaaaaaaaaattttttttttcaggacggcgtcttgctctgtcgcccaggctggagggcagtggtgcgatctcggctcactgcaagctctacctcctgggttcacgccattctcctgcctcagcctctcgagtagctgggactgcaggcgcctgccaccacgcccggataattttttgtatttttagtagagacggggtttcaccgtgttagccaggatggtctcgatctcctgacctcgtgatccactcgcctcgtcctcccaaagtgctgggattacaggcgtgagccaccgcgcccggccaaaaaaatttctaatacggcaaatattgaaagatataatccacataaacaaagcttttagggtcttctataatttctaacactgtaaatggttcccaagacccaactgtttgagaaccgcttctctgggatgccttcttcttttcctgctggctaatcccagtggagagatttaggtatttaattctgctccagactcacctctgagaaccttccctgatgggccacactctactcactgcccttgctctgtatcccctcttcagttatgttgttcctgtttccctggctgcttttaattttctttctttcttttcttcccgccttttcttttctttctctttctttttcgttttttgttttttgagacggagtctcactctgtcgcccaggctggagtgcagtagcgcgatcttggctcactgcaacctccgcctcctaggttcaagcgattctcctgcctcagcctcccgagtagctgggattacaggcgcacgccaccatgcccggattatttttgtatttttagtacagacggggtttcaccatgttggccaggctggtctttaactcctgacttcaagtgatccgcccgccttggcctctcaaagtgctgggattacaggcttgctgccgcacccggcttgtttttttttttttttttttttgagacggggtctcactgtgtcccccaggctggagtgcagtggtgcgatcacagctccctgcagcctcgaactactgggctcaagcgaacctcccacctcagcctcccgagtagctgaaaccacaggagcgcgccacgacacacagctaactttttttttagtgttttttctttttttgttgttgccttttttttttttctttatcgatcctcccgcattggccttccaaactgttgggattacaagcgagagcagtgcccggcccctactgctttgaaacctcggttctttgcaggtcctggaaaagaaagtgaaggggtcgtgcaatggctcaaaacccaggcaacatttccaggcgcgtcctcaactcggcgtcactctgacaaaaagtttgccctttgcgcccgatccctcacaccagagagcaccgcagggacgcagggacggagaggactaatggggtcggggaggacccaaggaagttggggaactcagactcttttcagtgtttaaaaagcagaggccccctcggaaggcataacaggcgagtctaacaatgcccctggagatcaacggcactaaggggtacctttgccccgctccaaggctccttgttccgccccctgccgccaagcaaggaatccggcgccgccggtcgtgggtagtatttacgacagtgctggcgctttgcggccggccgcacagccgctgacgcgtcgggaggcggagcctagggaagcaaattctcctggcggcctccgttcagacgcggcagctgtgacccacctgcctcctccgcagagcaatggcggtgtctgccgggtccgcgcggacctcgcccagctcaggtaggcttaggaccccgccctccggcggagagttcctaggagcgctggtctcagaggggcgggggcgggaggacgcccagtgtctcccggtgaggcggggggggggtcctctgtggggaagggggcgtgctgtgagacatttgcagcctgcggcttctgaatgatgatgacattcgggaacactgcggttaggggactgtagtctgaggggttctgggacattaggggatcgtggagagggggctgcactgcagggatgtttcctatagtcagatcattgaggcaacctcattgagccgacccgggtgggcggaagctctgagctgttggtgcagtgatttctttgatttgaggtggagcccacccccgcacacatattttctccatttattgattgcagataaagtacagaaagacaaggctgaactgatctcagggcccaggcaggacagccgaatagggaaactcttgggttttgagtggacagatttgtccagttggcggaggctggtgaccctgctgaatcgaccaacggaccctgcaagcttagctgtctttcgttttctttttggtgagtccagtttatgggtgggagcaatttggttgagagtggagaatgacaatctctattttttggttgcaagtagacttagctcccttttcctcagagctgaagacattggtataaaagaagaggtctttgcgaagtttaggattaaacctgctttgtctcctacagttaggatttacttggtggccagaaatgcttttttttttttccttagacggactttcgctcttgttgcccaagctggagtgcaatggcgctatctcggctcactgtaacctccgccacccgggttaaagcgattctcctccctcagtctcccgagtagctgggattacaggcgcccaccaccacacccggctaatttttta

SEQ ID NO: 8417 - DNA, 6000 bp, Homo sapiens
caatgcttcagtaagtaacctgggcctgaaactccaacacgacaaggttatgtcacagggcaagggacccctcacccctcctgcctcacagacttcctcggtcttggctgccaccaacatctttcttcccgcctttccttctggccacctacaaatcagtcacatcagcatcacccctaacagtttcaaagacactgggccctcagggaaggcacagcttctgtcatggcatgggatgagggccatttggcaggcaaaaagaaacaggccgtttggagagacctctttgagacctcagtaatttgaaccaatgactccctacatttttacttattgcaaaaaacaacattataacaacattaaaacagatttgttaaaaaggaagaaagattacttgtgatcccaccaccctaacacaactattttctttttccaagttctcttccagtttttggccacatgatagatgtttgcatacgatgtgttgcctttttaatttttttcacttaatattatatcctaagtcttttccagtattgacatatgatcttcacgttggccacatttttctccctgcaaatattccagccaattagactgaggcataattaatgatttcttaacctttggggattcttgttcatcccctggaatctctgaggttggctcttggcaaagctgtaaatgaaagtaagtttggttttggggcccatctgcatcccttgcaaatcttctttcttccctgctagcagttctagcctaagagttctattgccatatcccattccccaacctgttctctaatattgcgctgccagtcattgcactatcaaaaaaagtaataatataggttctaatttttcctcagtgtaaaagcaatacatatgcatgttgaccaatatgggaaatacagaaaagcaaaaataaaaataagaagtaaaaatctgctataatcttgctgcttacgatcatatgccgctgaagatcccatttgcctgagctaggtactttcctcctggacccttctctgccttccagcctcatttcatcattgcaacttgtgttgcataagtaggtacatagcgaatcagttggggcatctggggttggctagttgaaaccacagaggaacttactatctcatacaggtgaaatgtacggaggcaagatggacttcaggactggtttgatttagtgactcaaaaatgtcataaaggaaatggtttctttctaaccgtggtcttctgcttcccacagcattactttcttcctaaaataagctcttcttgtagtccaagatgtctgtcttaccaacagcttctgaggctacttactgcctagttcttgtctagcagaacatgaaagcatctctcccccagcatccaataaattcctgagacttcctctgattggatcagtgtggttcctgtggctacccatgaaccattcctagtggcaaggaggatggggcaatggggctatctgggtggctgagaccagtaagtctcaaactctggtctcaggatcaatttacacacctagaaattactgaggatcccaaagaatctttttgacatggtctttctcttgatatttgccaaattaaaaattaaaactgagaaatttttaaatatttaatttaatttaaatatttaaattttaaaatatttattaagtcattaaaataataaatctggctgggcattgtggttcacacctataatcccagcactttgggaggctgaggagggtggatcacctgaggtccggagttcttgaccagcctggccaacatggtgaaaccccatctgtactaaaaatacaaatattagctgggcatggtggtacgtgcctgtaatcccagctacttctggaggctaaggcaggagaatcacctgaacctgggaggtggaggttgcagtgagccatgattgtaccattgcactccagcctgggtggcagagcaagactctgtctcaagtaaaaaataaataaataaaataataataataataaatccattgcatgttaatatatattgataaaaaataacttcttttttttagacagagtttcgctctgtcacccaggctagagtgcactagcgtgatctcggctcactgcaacctctgcctcctgggttcaagcaattttcctgcctcagcctcctgagtagctgggattacaggcacatgccaccatgcccagctaattttttgtacttttagcagagacagggtttcaccatgttgtccaggctggtctcaaactcctgacctcaagtaatctgcccacctcggcttcccaaagtgctgggatcacaggtgcgagccaccatgcccagccaaaaaataactggttttggctgcatgcagtggctcacatctgtgatcccagcactttgggaggcccaggcaggaggaacacttgagcctaggagtttgaggccagcctgggcaacagagggagactgctgtctctacaaaaaattagaaattagcctggcatggtgttgggtacctgtagttccagctacttgggaggctgaggtaggaggattgcttgagcccaggaggtggaggttgcagtgagccaagatcgtgccactgcactccagcttggatgacagagtgaatctgtctctaaaaaagaaaaaaaaaaaaacgctgctgtcctggatttgtaagtagcctgagtgactctttgctagtcactattcagaagcttctctgagatcagccactgacttggagagataacagtaaggctttgagatctagaggctgatcttagtctgctgtttggagatctctgccttaatccagaataatagctgaggatgtctctgtggctgatgaagaaaaggaagtttgcaggcctgcttgtcttgctgcccaagtgggtcaacctaatgtgagtggagtgaatgaggtagtaagggcttaacagatgtcttgtgattctgggacaggaggcagcttcaagttccttttcttcctcacccccaccttacacccatccttggaagctgggatactgctgactctcatggcagccataacgctatcagcgcctggctttgccgacaaggggaatctggaagagaaggggaaggacaggggagacaaagagaggtaaagagtgttgcatcaagcacatgtgtcagaagtgttcaaaccagagcgcctccattttgagtgagggctagaaaaatgaggctgggacttgctaggctgcatttcctgaaagctaggcattcctagcctctaggtgtttatggttaagagaacaaattaataatgcttactaaacagacccagacttgagagagtccagatatcccgatatctggagaacaaaggcattcctaattttgctttaaaaataataatattgattattgcaaaatatagtaattagggaaaattaatcctttatcacaaacccttgtagcagaagacatctgcccatatatacaagcattacaagcattgtaccttagttggatatgtccctcctcttattttcaggaatgccctgctggagtgcagtggcgatctcggctcactgtagcctctgcctcccgggttcaagcgattctcctgcctcagccccgtgagtagctgagacaacaggcttgcgccaccacgcccggccaatatttgtatttctagtagagacggggttttgccatgttggccagctggtcttgaactcctgacatcaggtgatctgtccgtctcagcctcccaaagtgctgggattacgcgtgagccactgtgcccagccaccactttactttcttaataaacttgcttttactttgcactgtggacttactctgaattgtttcttgcgtgagatcgaagaaccctctcttggggtctagatcgggacccctttcctgtaacacatgggccttgggctgatctccaagattaagagggcaagatactcagctgcaagggtcagctgtcgctgaccccagcagctgctctgccttggccaacttaccggatttaaatcgcccagtgacagcttttcctccagtattttcaaaatgctcccaatatcctcacgttagaacaatccagaaatagtcttatggtaaaactcttttgggaaatgtgaaagtagagtcctcccaccttttcctttgcaacgcttttgccccaacctcgatcgcccaggcagcacattttttccggcacccccaccaagggaagaacagagacatctccaaaccagctgccctgcgccaagctgttacaaaatagagccacaagtctcccggtttatgcaaacatatttggctcggtgtctaggatcttctttttcaaactcagaaggagatcacaggcacacggccgcggtgctgtgtacgcccctctgaaaggaagttctgcaagtcgaccgacttcactggcttcactgaagtccggtccgaaaccaccggaaagttgcaggcgcacagtatacgttcagctgtgtccaagaaataacctatcaatcactgccttaagctttgtttccttcctgaattttcttattttcacgaatatttatgctttcacaaactgtatgtcatttcctctccagaaccaaggggggctcgccccagcctggcccccgccccgggtgcgtccctgcagggggcgccctgctctggcaatgcccaccgcaccgcagggctgactggccgcgcgcccgggggcgggggccgccgcggaggcatcgtgctctccgattggccgtccgcgtcctcgtgacgtcagaccccgcccacgcgcccctcctccgcatctgagcgggggagcggcggcccccagctgaatgggcgcgagagcggcgctgggggcgggtgggggcgcggggtaccgggctggcggccggccggcgccccctcattagtatgcggacgaaggcggcgggctgcgcggagcggcgtcccctgcagccgcggaccgaggcagcggcggcacctgccggccgaggtacgtggcgcagccccctcctcggcgtcgcgggggcccgcgggctgggggctgcggcggcgacttgtctcttcccgggccggctgggcgcggcgtttccgcctcgaaccccgcgggcagcgcccagggcacgacaccctcaggcgagcccggctggggcgcgggcggagggtcgtggtcccgggccgtgtggaccgggcggggggtcccacgcaggtgtgtacgcggtagagggtggggcggaccgccgggtgtcgggtcccgccgcagtggccctttccccgccgctttccgctgcagctcgggatttaattcattgctggaagcttcggagttagcagagccgagttaactcgttttcctgggatgggcttagggaaccccctgcaaggttactagcagctcctgaaacctctctctgcatccatcggggaggcgtgatgtggggccgctggtagaaatttgccggtgaccttccctgcaccctctctgcagccagccttgcggagaagacaggttttggcgaccttttgatttcttctgaattgtaagccgtggcttgacgcgggtgtgcattcattgtacgccttgcgtgtgtaagtaacgcagggttttccgagagcatccccgaggagccctgcccttgcctcacacccgcttggtgaccttggcagacactgatccccctgtggggctcgggctcatggtctctcctgagaagcttaccctgccgatggccgaggtcccttccaggccccgggtttttctaatcataaaaaaatacgtttacgagggtagaggatcctgcagaatctctagctgactcggaagacgaattttatatcctcatgtcttaagtcatgcatgcggcttttgcttaattaggcatcgttcatttgaaggggaaaatggttttatgtgctgcgcttcatctggcaccagtggttgcctgctcctcgtggcagggccgtgctgggtgtcacagagaggaaggagactcatctcc

SEQ ID NO: 8418 - DNA, 6000 bp, Homo sapiens
tgacctgagtgttaaacaggtgtttgctttagaactgttaaatcattcatgcatactatataaaattttcttcatatgtattatatttcgcgaacacaaaaaatactccacataaaaaaagcttttctctaacggtaaaatttacatcgctgcattttcttgactgatctcgtatattctcccacaaaatgttatcctaacaatatattttgtgtgaaagtaacttactgagcatcctatggtatttggatgatttttaactttttgcaaaaagtacttaacgtcacggcaacttaatttagtcgcctttacttctgctatctctcagtcaagaagtcctcataccagcccttgtgccgggggctgtagttaaaaattaaattagccttcaagcttaccatgtgtcaggcactgcccaaaacgctttacgtgcattatctcatttaatccccaggtaggtggttatgacccccattttagaggtgtagaatcttaagttaggagacattaattctcaaggttaaaggtcgtgaatggcaggtcgtagcctctaaatcagaaagttaggtgagactttttggtttccctcgccccctccgttccagtttctctggcttcttttctagggaaaaaaagctggtaaggaagcggcaaatgcgtgacacacaggcccgcgtgagtccgagtcgggggacttggtacgggctgccggtcacaccgccccagagaaaattgggcgcaaccttcttaacttaaataatgaccctttttgcttgttaacctccagtctaaacgcccattccatcccgcaccagtttccccttctgtgaaggcatgcatggagtatgtcgctctccactgacctgaagctgctctcactgcaccagcaaaggcagaggcagccatcttcaccttcgcctacggcggccgctttgggtttaaaagcacaagagcaaaagagaatgaagggaaagcaaggaggcggagtcaaggaagaggaaaagaacaaagttgtccactcaacatttattcaatgtcatctgccgggttccgttcttcgccgctgtaaaacgactgcctatagaaggttctacaaaatttcttattaaaaaaaattcttggggccgggcacggtggctcacgcctgtaatcccagcactttgggaggccgcggcgggcggatcacaaggtcaggagttcgagaccagcctggccaacatgatgaaacccccgtctgtactaaaaatacaaaaagtagccgggcttgggaggctgaggcaggagaatcgcttgaaaccggaaggcggaggttgcagtgagcagagatcgtgccactgaactccagtctgggcgaaagagcgaaactccatctcaaaaaaaaaaaaaaaattcttgccgggcgcggtggctcacgcctgtaatcccagcactttgggcggccgaggcgggcagatcacgaggtcaggagattgagaccatcctggctaacagggtgaaaccccgtctctactaaggggtacaaaaaattagccgggcgtggtggcgcgcgcctgtagttccagctattcgggaggctgaggcaggagaatcgcttgaacttgggaggcggttgttgcagcaagccaagattgagccaccgcactccagcctggggtacagagcaagatatagggtgtattaccttggaacactattgttgccaacttgatctcccacctatggtggccactttgagtccaaaaacaggcacatacgctagacaagtatattgaaacattcataaaagctctttgaattggcaacgggagtcattgcgcacttttttttttttttgagactaggtcttggtctgttgcgaaggcttgagtgcagtggtgcgatcacagctcactgcagcctcgacctcctaggctcaagcaatcctcccacctaagcctcctgagtagctgagactacaggcacacacctggctaatttttaaattttttgtagagacctaggtctcactatgttgcccagggtggtctcaattatttggtatggaatcaaacaggtctcccaccttggcctcccaaagtgctgggattacaggtgtgagccactgagcctggcctcactgcacatttttgaacaagtgagtgacttgatttaaattttgttttttagagacagggtctgagtgcagtggtgcaatcactgcagcctggaattcctgagctcaagggatcctcccaccacagccttccaagtagctggcaccacaggcatgcacaatcatcccctgctaatttaaaaaaattgtttatagagatgaggtttcacttttttttttttttttttttttttttttttttttggagacagactctcgctctgttgcccaggctggagtgcagtggtgcgatcttggctctctgcaagctccgcctcccgggttcacaccattctccgcctcagcctcccaagtagctgggactacaggtgcctgccaccacacccagctaattttttgtattattattattttttttagtagagacggggtttcaccgtgttagccaggatggtctcgatctcccgacctcatgatccgcccgcctcggcctcccaaagtgctgggagaggtctcactcttttgctcaggcaggtctcaaactcctgggctcaagtgatcctcccacctcagtctgccaaaatgccgggatatgagccaccacacccagcccctggtaacaaattttttttttttgagacggagtttcgctttgtcccccaggctggagtgcagtggtgtgatcttggctcactgcaacctctgcttcccaggttcaagtgattctccttcttcagcttcccacatagctgggattacaggcgcgcaccaccaagcctagctaatttttgtatttttagtagagacggggtttcaccatgttggccaggctggtctcgaattcctgacctcaggtgatccgcccgcgtcagcctcccaaagtgctgggattacaggtgtgagccacagcgcctggcctgcctgataacattttaaagcaaaaatattgacaacttccaagtggagagtgaggactctccacgtaggttatgaggggttgggaggctaattttgaggtttgagatcttgaagctagagaggttgctaatgatgttcaggcgcaagttgtggctgtgacgtacatgactgaagcaggatgaaaacattcactggcattgacaaattcaaagccaagggtgttagaaaagtcatcacacgggcaccacatgactgaagcaggatgaaagcgttcactggcattaagaagttcaaagacaagggtgttagaaaagtcatcacaccggcaccactgggcatgacagcagtgggcagggaggcagcaattcaattgctaaaattactaaagaaaacgggagactgctctggaagctaagtgaaagagatatgaaacatatgtaattactgtagtcccctaaaaaccatagaacatagaacatatacaaacataactattgctttcagataattttcaagtccatctctccatgctacaagtcatagcgcagtctacctctagagagaatacatattgtaataaattacccagttaagacttggaatactttgcaaatccaatagaagatagaaaagttagtttccacgatattgcaataagatgctaatagtattaatacgaacatattaattctggagtatacatggagtattaataccatgcttaatatttaacgtgttttattttgattacagaatcaatggaatacttttgttttttgagacagagtttcgctcttgttgcccaggctggagtgcaatggcgtgatctcggctcactgcaacctccgcctcccgggctcaagcaattctcctgcctcagcctcccgagtagctgggattacaggcacccgccaccatgcccagctaattttttgtatttttagtaaagacggggtttcactattttggccaggctggtctcgaattcctgacctcaggcgatccacccgccttggcctcccaaagtgctgggattacaggcgtgagtcatagctcctggccctacttttctttttaaattttttgtttgtttatttttctatatagagacgaggtctcactgtgttgcccagcctggtatcgaacctctgggctcaagcgatcctcccgcttcggcctcccgaagtactgggattacaagcgtgagccaccgcgccctgcccagtggaatactttcaacggtgcttctgcattgacttcccatcttccaacccatccacaaactgcagccaaaatgatgttactacagtaacaacttggagaaagcagtgtggcttaatctggaaggagcagaagctgtggagtccaaaggacccgtgttcctatccttgttgtgccacttgacacgtttagcacaagggtccccacagtgttagttcaccgtctccagcaatcactatgactccctggagggctgtcaaacgaaacaaaggcgcaaactgagacaattccattgtttacgtaactttcgccaaatcggctccttcctacgaaatatccagctcatagagcaggctgagatgctttgttgctttaattctctttaagagtcacagctgtccattttccacgtgcggctgaagaatggatttcagagcgctctccctccggcagtgttcacctagtaaccccttccggataaggacctgcagcccgggcgcgacccggaaagggaatccgcccttttcgcctccttcgcgccaatcgcctggagttggcgtttccgcagccgggacacagcccaccctctaagagccgcggagtcggggacggtagaaggggccgcgcgtgcgcagtggcgtccgctgtgcttccggtgcgccgggcgcggacgcgggcacgcacacacgcaagcacgcctccacttaactcgcgccgccgcggcagctcgagtccaccagcagcgccgtccgcttgaccgagatgctgcgggcctgtcagttatcgggtgtgaccgccgccgcccaggtgagcactggggctcccggaggcgcgtgaggaggctgaactagaaccgtcagcgaaaaacgggggagccttggtcgctgcctagcctccaggacaaaggcgagcctcagggccaccctcgtcgggagaggcccgggcgggcagctaggcagccaccagggagttcgccggactgggatgacttgaggttattgcagcagcggggtggggtgtggagagtagcgggaggcgcggcttcgtgggcatgtagtccaatcagggccgcgctgcccccgtccaggaccaatcctggctgctggcgtctgggtcgccggttgggcgcgcgataggttttcagtgctgaaggtcgacgggcgagaactacagttcccgtcaggacgagcggagcggcggcttgttgcatccttaataaggaggtgcctggacttctagcgagagtccacattttaggggtcaaggttgtaattatctgggagggagtgcctttcttttcgcagctgagaacacttctgagttattcttaatccaaacaaaagcgaaagattttcatttgtggagctgaaactcctggtcttcaaggaaagacaggagtcatgaccttgtggctcatttctgagattagggcagggatctgtgtctccaggcgctgggactactttgacattcaaggagcctaaatacccagttacttctagttttgcgtaattgccaaagttactttctaaaattgaaaattaaaaagcctgtttccactgctcatgattttcaggaagttgatattttggcaaaatgtagatagcaaaccaagtactgtgactcaagcagtaattgaacagaatccctaggaatagtgagttagagatcataaaagtcaagctttgttttttcaagttcgcttctcttcctatttgctgctaggtaacagaagcagccccttccat

SEQ ID NO: 8419 - DNA, 6000 bp, Homo sapiens
gaataaagctgctatggacaagtctgtgtggacatgttttcatttttcttgggtgaatatctaaagaatcgaatttctaagtcatatgtaagtgtatatgtaattataaaagaaactgggccgggcatggtggctcacgcctgtaatctcagcactttgggaggctgaggtgggtggatcacctgacatcaggatttcgagaccagcctggccaacatggtgaaaccctgtctctactaaaatatattaattagctgggtgtggtggtacatgcctataatcccagctactcaggaagctgaggcaggagggttgcttgaacctgggaggcagaggttgtggtaagccaagatcgtgccactgcattccagcctggggaacacagccagactccatctcaaaaaaaaaaaaaagaaactgtctgaccagtttctaaggttggaacatggggagaatcattcaccaaaaaaagtagagagttcttcccagaagaaaggggaagggtgtgaggcaaaagtaatttccactttttttgaaatatagaaaaccatttttcaaagtagtatcattttactttcccaccagcagcatatgagagttccagttgctccatatccttgccagaacatgaaatgatcagtctttttcattgtagccattcttaaatgtgtgcagtaatatcttcttgtgatttcaatttgtatttccctaattaatgattaatgatgttgaatatttttttcatgtactttttgtttttccatttgtattttttctttggtgaaatgtctgttcaaatattataaaattgaaggtatttatttgcttattgcattatttctgtcacttcatggtctgtttctattggttgatttttcaacctgcttacaagtcattttctttgcatgcctgataatttttgtttgcatgttggacattgtgaattttatcttattgggtgttgggttttgttgttgtttgttttgtaactaatcttggacttttttttttctctgagcacagttaagttacttgagatcaatttgatccttttgaagattgcttttaagttttgttaaggcaggaccagataagtgtttattttagggctaatttagcctccccctgcattaagatgatacccttctgtggactctggccaatgctttgtgtataaaaggtctctgttttggctggtatgaagacaaattacttccagccctgtgtgagctccaggaattgtttggcatactgctttctggtagttcttcccatggcctcatagaatttcacccatgcatgcctaggacagtattcagctaatgacttgaagtgactgctctgcagatctctgcaactctctctctaatcatctcccatcactcttatattctgcttcacaaattctagccactttggcttccctggactctgatctgtctcctgtgttctgtgaaatttctgggctctgtttgggttctccatccctacagtgatgcctggaaactgctttgagacagtaagctcggacgtaagactcacttcatttgtttctcttctcttagttatcacagtcctgtgctctgttgttcaatgcttaaaaacagttgcttcttgccgggcacggtggctcacacctgtaatcccagcactttgggagtccgaggagggtggatcacgaggtcaggagatcgagaccaccctgactaacacggtgaaaccccgtctcatctctactaaaaatacaaaaaactagctggacatactggtggctacctgtagtcccaggtactcgggagactgaggcaggagaatggtgtgaacctaggaggcggagcttgcagtgagccgagatcacagcactgcactccagcctgggcgacagagtgagactccgtctcaaacaaacaagtaaagaaaaacagttgtttcttttttttgatcctgtttttctagttgtttgcaatgggaggacaattcccacagcagccaatgcttcatagaagaaagtggaattctcttttttctattttcaactttaaaaatcccaagggagatcgttggcccagtttctgtttggtgatcacccataagccaatcaaggtagtgaggatatataagaaaatcacagtttctaaggttggagtatggggagactcattccccagtgaaaaacagagagctcttcccagaagaaaggggaagggtacagggtaaaaacagatgagagacatctattatcaaagcagttcttatgaaaaagaacttgaagtcaagaaactgatagagctgtaagagttccattgtctagaaggtggagtccgttccctggccacatgttttccagggccaaggacaaacaagagcaggtccaggatagagagatacaataagtgtaacagttacactgaaagagacagaatgcagtacaaaagcaactttctttctttctttcttcttttccctcctctacccatccaagtccgctctatggacaagttctttctcatcccttgtgagaaatatgtgttggtctcactagttttctggtcctcttcagctaatgaaaagacctcaagatattttaaccccatgaatagtttcattttggtaattaaaatgctcagtcctgtgcaatagtcaaatctgagaattccacttatagggagtagggaacaagcatgtggtcacctcttctttattttcccaccaacagggtctctttgaaccacagtagtccatccctccgctgctccccctgcaagatgggtaacagcctttctgacgcagggagcataggtgaggggtatggatggaggggaagggaggtctcaggaaggtcctctgtgctgggtgctgtcctgatctagctttggtgttctctttgcctagtaagtatggaaagcttttccccgtggagcattgttttacccgtataaccttaccttgagtgagatatggtggggccagacacagatcaagagagagaagctagaaagagttttagagctttttatatccacagtttcctggagagatcacagcacaccatgcaggtccactcagggccagggtctgtcacagagagagggagagaggggaattgtggacaaacatctttatcatggtttctgagggaaggaaagagtgaaataaggcaagcagatataggataggctaatttggataatttcagcgggttctgaagtacaggggctgtaactagttgtttggtgcctagccctggacaggtgtatagtgtcccgcgtgtgagagcctgctaacggaagtggttgggggtatgcagttaatagactgctggagaaggggaactgaccagcctccagcctgagcctcaaaactgggtcaaggcagcatgaaaaaactgctacattacagctattttatgggttctttggagacctgagatatgagagcatgtctcatctgcagtccctttgttgtccgtgaagtctttcttctgactatatcaggcacacgcacgcacagattctgctacatctgagagtactaagctgtctcctgcgcttctcacatctgacactgaattatacatgacaccatcatcagcaaaggacagggcgctgggagcaccacgcagaacctaagctattggagggtgggaaaagcagcagcagagcctaggagtagaggacaaagcgtttccagtgtaacagaataatgtactatctgcggccgggactagggtgagcagagtgaggcgctcagtgagggtgcaacatttaagaggtgccataaaattcagcaactaaaatacataataggtggctcactcctgtaatcccagcactttgggaggccaaggcgggcggatcacgaggtcaggagtttgagaccagcctggacaacatggtgaaaccccgtctctactaaaaatacaaaaattagctgggcgtggtggcgcactcctgtaatctcagctactcatgaggctgaggcagaagaatcgcttgaacccgggaggcggagcttgcagtgagccgagatcgcgccactgcaccccagagcgagactctgtctcataaaaaaacaacaacaacaaaaaaaaccaccataatatttaatacggtattttaaaaaatacataaaaacgtttatatagggtgcacaagttcccttttgcctaagagttcaacgtggctcagcggggcactggtgctaagcagtcgcagcttctagtctcctcctagggcccggagcagcccccaaggaaaggccttccctaggaagaagtagcccttcagcccagcctagaagaaggagctgaatcaaaccaaggcaggacgatgaggcgtggcgtgtactgacagggaagaagaaacagcaaatatttgagtccaagatgcctggagggaaaagagctagaggactatttgggggaatggtcttggcaacacggttctaggcaggtaccacgatcatatagggactctgtagaattttaagtagggaggcaagcgcccaggtttgtttcttatgcagaaagtgctgagcaacggacagactgaagaggttaggtctggatccaggtaaaccctttatgaggctaacgcactagctgaatgagggatgacagcatcccacctagacaggtgcagacagattcccgaggttcaggttcggacttcagtttctccgctggaacgctgagggtggggcagcacccgggtccctgccctgcaaacggggccgctgcagggttcctttggcggggccggtgccccggggagcgcgcaggacgcgcccgccttcagccgggggccagggcgagcgggacggggcgggcccgcgggtgccctgaccagctcaccgcccaatcgctgcgggcccgccgagccccggggggctggggccgccgccgccgccgccagaacgtgccgcggctgcgccaacgcgcgaacgccgggcagggcggcgggcgcgctcagtctggcggcggctgccgtgagctgactgacgttccgggaacgccgcagcagcccgcgccgcccgcagcctagccgagccgcgccgcccgggcctcgcccgcccgcctgcccgccatggtgtcatggatcatctccaggctggtggtgtaagtggccttctcccccgcgcccctccgtcccctccctccccgcccccggccccgggctgcgcgcgcccctacagcgcccggtcccagtggctcgggctattaatacccggcgcagctaaatttagcaggtacagtagccgccgaggacgcctgcgggcggacgggcggcgcaggacgcggctgctgcccaggaggcagccggcgccggcggccgcttgcggggggctgggccgggacggcgagggctggggcgctcgggggttccgtgggggctgcgtctcgccgcgcgctggccgctttgttcctcagctcggtcgatttgcagaggccccgaatgggcgcaccgcggacacgcgtctctctcctttggcagaaatgtgaggtcgcccggcgccgcgccccgccgccccagcttttgtcaggtggaaaggacagcgcagacgaaccaggggcgctgcctggagggtcagcgcggaacgggtggagaggcagaggcggggctcccagtggggttggaaaaatcctcctttttaggtgtctgcatcgacagcggcaaaggcagctgggacatgggaagacgcatgtgaatcttggagtaaacgcctggagcccccggctccgactccttttgcaggggattgagagacaggggcaggtacctccaggaatgcacgggaaattttcaagtgacagccacccgcatggtggcgatgacacctcccaggccttgcaggagagcgcagagtcatctagggtgaggtctgtgtgaagtcattgggggtgggcgtgggggccgattttctccttcaagccccaggacctgtaggcgtttgaagagcttccccggtggatttattctcctttggagatagacgtggctg

SEQ ID NO: 8420 - DNA, 6000 bp, Homo sapiens
cctttagtggtaaaaatcgtgctctacagggcaatgtgaggcagccacagtgatttttatgattcccggggggaaggtgccacttccaagctagggtcaagcctgagagctctactttcccttcctgatcatggaggatagaggtctgtttattttagaaggattcagctaaccattctcccctcaccctctatcatcctcttttttcttttctttctttctttctttttttttttttttttttttgagatggagtctcactctgtctcccggccaaagtgcaatggcacaatctcggctcactgcacccttcgcctcccaggttcaagcaattcttctgcctcagcctctggagtagctggaactacaggcgcgtgccaccacacctggctaatttttgtatttttagtagagacggggtttcaccatattggtcaggctggtctcgaagtcctgacctcaggatctgctggcctcgggctcccaaagtgctgggattacaggtgtgagccaccatgcctggccacactcttttttctttaaggtgaggcacccatatgtgtctataagggttgttaatagattgaattgtgacctgttaagattatgttgaagtcctaacccctagtacctcataatatgacccttatttgaaaataaggtataataaccgcagatgtaaacagtaagttgggataaggtcatactgaatttaggattggcccttaatccaatatgactggagtgagacatatggggagaacatataatcgggttatatgttcatagcagattggagcgatgcagcagcaagccaaggaatgctgatgattgacagccatcactagaaggtaggaagaggcaagtaagaattctattcagagtgtcagagggagcatgaccctgctgacaccttgattttggacttctagtctccagaactttgaaagaatacatttctattgttttaagccacccagtttgtggcattttgttatggcagtcctaggaaatcaacacaaggattattgtaagtttggtggagaatggttggaaatggacaggaggtgactcaaggtctgtcttcgccttatctcaagtcgtaagttgtgggttgggagacccttggtcctgaagtttagtcataaagataaatccactccaaaattattatataagtcatgggagggagttcagtttccaaacattgatttatatctaacatttccagggtccatctgttgtataaaacaaggtgtatcttggctttagaaagccaaaagtcttgccaggaattgggttatgattttcttgcccaaagcatttcatttaacaatctacctggcaaatggggaacagttgtgagccaggaagctccctaagactggatatcttagtgaaatgagcaaggaaaactggaaggtggaggaaaaacagtcctttctgtttttcatttcaaattcaggggaggatttaaagcataggcattgaagtacctctcaaggatacacatctatttatatttttcagagatcaggaggagaatgcacataaagcctttgaaaatgtgtgtgaacaaacgtctatgtgaacatatggcaggggagtgtgatcctgttaaacacttgctgtgtttggcaggagtaaagagctagaatgcctgctcacttagttcttcccacccactcagatgtgtgagtcttagcaggtgggaggatctgtagcttgcttcctgaggtccatgtaggaaggacgaacttgagccccagccgcaactaaggagtgctctgtccaatgcaaaagcagtatcaggacacaaatggagagtacacgttactctaaagatagagcctaaaaaatgtgtggaagcaagatgcacggtgcagaggaactgcactgatgtgttgatagggctctgtcagtacctatgagctctgtacgacattgagaggccatgtgccaagtcaaaccttcctccacaccctgccaggcctctctgccattgatggccagctttagaacaactgcagctttaggatctgaaatggctgtggcctaaatcctccacccagaaacagggaaggctctttggcacatgctgtttcttttactctggatactcttcctctctctgctagctcatccttcaggtctcagcttatttgtcatctgttcagggaagagtcactgatcagcactttcttcttatagtcagaattttgcacatttgtagtaatacaatttcgtctataaccattgtttaatactattgtccttctcatcagattgtaggagatttttttctgctcactgccattttcctgaagcctataaaatgcctgacatatagtaggcatttgagaaatactgttgactaattggcgatccagtatcctcctacttgaaaaaaatgcttatagtttattctcaaaaaaaggtgaaagagacttaaaaaaattccacattttcaaggaactccttcacctttaaaatggaaggaagaaaggaaataaggaagggaaggagggagataaatggaaaatgaacaagggttatgaagaagcaagtcacagaagaaattcaaatgaccaacaaatatatgaaaagatgcttatccagactaatagtccgggaaattaaagttaaaaacaatattttatgcccttagattggcaaaaattttaaatattgctaaaattcacttttagcatggatttagggaataagagtgctggtatacactattggtaggagttcacaatagtgcaatgtatatggaagatactggtattaagtttaaaatttttaactgtgcctatatttgcaggattatttactagggaaaaactagaaacaatcttatataatagggaaatggttaaataaattatggtacattcttgctatggactgccataggtattgacactgatgaaagtctacataaaatgtgtttaaaaggaaattgtaggacaacgtatataacataatatcaattaaataaaaatagggctgggagaggtggctcaatgtatataatataatctcaactaagtaaaaataggcccgggcaaggtggctaacacctgtaatcccaacactttgagaggctgaggtgggaggatcgcttgagcccaggagtttgagacccgcctgggcaacatggctaacccttgtctctacagaaaaattaaaaacacagtgggcgtggtggctgacacccagctactcaggaggctaaggtgggaggatcacttgaatctgggaggtagaggctgcagtgaggcaagatcctgccactgcactccagcctgggtgacaaagtgatacccggtctcaaaaacaaatacataaataaaaataaaagtatattttccaaaggaaaaggtttcagaagattcacactatatttaatagttggtgtgaatcctttgagaccttttcccctgaggaagtgagaatgagggtttaacttttcacaatgaacaggcagtgcttttttaaaaacaactttattgaagtatgattggacataaaataaatcgcacatacttagtgtccaacctggtaagttttgatattgtatacatctgtgaaaccatcatcacaatcaagatattatccatcatccccctaaacttcgtgtctctttgtaatccctcttttctgcctctttctgaccccactcctatccgctagcaaccgcccatgtactctctgtcactatgtattagtttgcattttccagaatgttatgtaaatggaatcatacggttctggcttctttcacttggcagaattattttgagattcatccatgctgttgcatttatcaatagtttacttttttattgctcagtactattccttcgtatggatcaatcacgactggtttatccattcacttgttgatagacatttggattgtttccagtttatggctattacaaatagagctgctatgaacatttgtgtacaagtctttgtaagaacatatgcttttttccctcttgggtaaatagctaggaatggaaggctggctttgtttagcattttaagaaattgtcaaaatgttttcaaagctgccgaaccattttatgattccaccagagacaggagtatggggctgaggtaacaaatggtccccttcaccatcctcggatgagttaatgacagtaaccatcagctcaccgtataggcctaatcaggaactgtccgtgctaaaatgtgtctagttctctttagtcagattcctttgagagtgtgattaagctcacggtcagtgtggcgtgtaggacgggacacacatggacaaatgctaggcaggaatcgcccacgctggaaagggcgatggcctgaaaaaaaacgaccgcagttgggatggaaaggggagggttgaagttcagacatattgaagttagaatggttgggacttggtaagaggggagagaggacgatgcctagggtttagtgaccaggtgatggtggtgcaagcagaggggaggagtgggttggcgggaggaaaaagaggttatttttggtttgtcacctgtgagttgcctactggacacaaagatgaagctgtcgggaaagtgatgctaagtgtacacgtctgcgtggagatccagacttctggtgcaacatctaggtttaggtgaagtattagaagcagttgtagccaacaaattcgtatctttcagagcaatcatttctacaccttacgaaaagcaccgaatccgtggtctcccccacacagacatgaccagaacatgtgcgatgacgtcagcctttttgactagtctcccactcactcgattctgcgcaggcgtatggcgcatgcgcaacatcccctagtgccgccgctccctactctgggggttgggactacctccttttccgcgggccccgcccaggcggctgcccgtgacctgcctgggcgcggggaactgaaagccggaaggggcaagacgggttcagttcgtcatggggctgtttggaaagacccaggagaagccgcccaaagaactggtaagggctacggcggcggcagataagcgggtggatctgtgtggggcgtagtgaagttggtaaatgacaggacactcttctccccaccgcctgcccgataccgcccggcccccatttccggggactcccactcgacaggggggccggaggaagagtctttaggagtcggctgtgggacgcgagagctcctggtgccatggctctcgaacaggtagccgagggtggatgaagagtttctccacctcgccactgagcgcgtaggcagcgacaccgtcctggcctcggaaacctcttccccctgcgcgcgttggtacgacccgcccggaaccttttcccagcgtaggccccacccctccagcccggctgcggaccacccggagaaccttctcctgcccgaagcgttgtttggagcgggccgggtcgcgtctgccggaggagccgtctgttctccgtcctccctgttgtgttgaaaaagaggctcagtttcctctttccccagcccttgtgttgaccctaggcacataccgtagcggggcagggactcgacccagaagaatgttacagaagatagctctggacccggcttcgaactctcgttacctattaattgagataatattgggaggcaaacagttgaaaatgccctgcagtcagtcaacctaagtttgaatcctgccttcccacatctcagctctgtgatctctggaaagttcacttctcagtgccttctcgactgtgaagccagaataatagtagtgtcacctcagagtaattgaagattcagggatgtaaagttttcatattggtagttagggctaattctttaaatacggcacagctttgctactcaaatgccaaccagcagcatcaacatcacctgggagcttgttaaatctcggacaccactccagacccactgagtcagattttgaattctgacaagctccctaatgattagtgtgcacatcagtg

SEQ ID NO: 8421 - DNA, 6000 bp, Homo sapiens
agggaaaatgatgtccagcttagaattctatatttggccaaactatcatccaacatgaggataactgcaactaactctcaaacggttcacaaaaaaaaaaaaagtatgcgcttataatctagagaaaagatgtaattcaacaaatagggcaaaaggttaacaattggtgaattggtaaggacactttttgtaatattcttgcaagttaagtcttctccaagtttgataaaaaaaaaaacccatacaactaatgggggtaaaataaaggaatttttagacatgtagggcatccaaagtttatctccgtgcccactttcttactaagccactgtagacgtggaggtgttcatgcaaacaagaaaatgaaagaactaaagtgcaaccatgggatcaagaaaacagagaatccagcacaaaagagaagagacgggaagtcctgagacaacagctgtgggtggctctggacaggagccaggctgacctggagtgggaggactgaggacagaaggtttatttccaataaaatatgaaactaatagattagctgtttgagtaatcttagagttcagagagtttggggatgaataagtggctggggccatagaaaatagaacaaaccaaaatttgagttaattattaactccagaggcaatgaacaattgcacaagaaaggtttcttacatggttcagctatgaacaagatttatatgggcatattaatataaagatgaatatataatataatcatgttgggaatgaggggagggaaatggtgtatgaatacagggcataaaagacagaattcctcatcgtccatagtaagaaatcaatagataatgtataaaatggaaaaagcaagaaaagcagtaaaaacctattctttgaaaatatagaggtaaacatgaaaaaattgctaaaataattgaaggcagtgtctctgaggaatgggaatcagagatggtagggaaaagcaggggatgtggtcttttgttttgttttgttttgttgagacagggtctcactctctcacccaggctgcagtaccgtggcgggatcacatctcactgcagcagcctcaaactcctgggctcaagcaatccttccgcctcagcctcctgagtagctggaactacaggagggtgcccaccatgcccagtttatttttattttttgtatttttttgtagagacagggtctcactatgctgcccaggatggtctggaactcctgggctcaagtgatcctcctgccttggcttcccaaaatgctacaattacaggtgagccacctcttctggccaatgtgtttttttataagcagggtttgtcagggacattctcagtttttcctccctagtctggtataatttcattaccattgccccttttactcccaaagttgtcccagttttgtatgtagccctgaaatgctacttcattttttaaactatgtgtgcatgatattttgataacagtgaaataaaaagagaaggctctttggaccttaaataaaataactctggttcatcaagctcagtcaaagactttaattttcttttttccaaaaaccgattcttggttttttttttttcaatttttaccctctgtacattagaatgtatccaaaaactaattcttcattttaaattaattacaagcaatgtgtacttcaaagcacttttacaatcactcactcatttaatccttacgacagcttcatagggtaagcatcctatcccattttatagataataaaaatgaggggccgggcgcagtggctcatgcctgtaatcccagcactttgggaggctaaggcaggcaggtcacaaggtcaggagattgagaccatcctggccaacacggtgaaaccccatctctactaaaatacaaaaaattagcccggcgtggtggcacgtgcctgtagtcccagctacctgggaggctgaggcaggggaattgcttgaacccaggaggcggaggttgcagtgaactgagatcgtgctactgaactccagcctgacaacagaggaaaactcccaaaaaaaaaaaaaaaaaaaaaaaaagaggttagggaggtcttctgattgtctaccaaggtgacactagtccactggaccaggccctttaattgcagtttgcacactcttgccacaatatcaaatgataaagcatttaagccatcctacatatgaacagaatctgagatataaaaccaataacccagattaatagcctattagaaaaacagattatgaaaatgaataattcatacattcttctgtttttgaaaataaattctaattagtctgcccagctaggcttagtggaaactgaaatcaatctcatgggaagacagcccacacctccaacccctgtcatctttggagtcccagaggatgaaccgctgccgctaaacctccggaccaggaaaacagtcctagtgggtttttttgttttgttttgttgttgttgttttttttttagattacaaagtaatacatgattatttcagaaaatataataaaacagagatatagcataaaagaaaaaatattctaaatcccatcacttagaggtgaatacacctaacaatttagtggatacatctctgtctttttgtaatacagatacaaaaataggatcatatgacgcaaacttctcagtcacctggtttttttcaccaaacactatattttggacatggttccatgtccataaccgtgtgtctacatttttctttttagtggctgcctcatggttcatcatttgaattactgtatttgatcaatcctctgtcactagatatttgggttcttccttttttctttccagcattaactctgcaacaacgacgaaattctatacacacatctttgtgcccatgtccaattattcctcaagataaatttcctgaagagagattactgtgccaaagagcttgtattttatggggggcttctaacccacattgtataccccaccaacatagaatgtgcttgtccatactctcttattcagatgacccaatgtgttctcttatcaatgcttttatccctcctgtgggttaaccatgaatgaaacaaagcaagggggttgggatgggaggcagttgaaacaaacaagaaatttaaaaagagttctttaattccttctttctagtccctcccacactctaatgtttttttccaatttggaactctggcctgactggttccaccctcagctcacacaccaactttccctgcccatgcctattctgtatttttgagattgggtcagtctctcctcactagcgagtacatacattcctttgaggtgagggacatcaccttcagtgtcaaggtttggacaatatcatcaaagggtcaccaagacatgcccaagaattctgaaatttcagaaccaggcttgttagaatcagttgtttaacacagtctcccacactgatctgccagccacgagaacaaagccacatggaagctaaagacacaggggcagtgtccagttgctggctggacattcctacacctcctcctctgattctcaatgctccctgggcccatccccttccaactcctcccccactagcccggcactgaaatgcccttgttcactttattttaaatgggcaccattcggaggctacattctcacagtccattctttgcttcccgttcctcccttgctccatgacctgggatcatgatccctttcttcctaaaactttcacccctagtttcagatagttgacagttttgcacaaatagtaacatttccccgtaattactgttttttttttccttccttatcaaaaggggctggtcaaagccaaccttgttcagtttatgaacccaactccttcctccctcaagactgacacagagattgacgtaaagagtacgctcggcccggttaaatttataagcacagaaccaggtatcgcatgcttgtccatgtgactcttttttttcttttctttctttctttttttttttttttttttttttttttttttgagacggagtcttgctatgtcacccaggctggatggagtgcagtggcgcgatctcagctccctacaagctccgcctcccgggttcacgccattctcctgccttagcctcccgagtagctgggactacaggggcccaccaccacgccggcctaattttttgtatttttaatagaggcagggtttcaccgtgttaaccaggatggtctcgaactcctgacctcgtgatctgcccgcctcggcctcccaaagtgctgggattacaggcgtgagccactgtgccaggcccatgtacaaaataaagcacccggaactttgcacctggacttatctacactcgacaatctttgtcctaggaactcagggagtccacaccaggcttttaacacccttgagactgaaggagggaaaaggctgtaactggcagcgacaactgggcctagtataacgcgaactccagttttggccaaacctcctccaacacacatgtgcaaagccacattctcatgaagagggggcaaaacatttgctttctgggtttaaccttctaccatctcaaaccaactgtgccaaaaatttccctgttcaccaggattcatcaaaaaacgtacatttctattttcaccgattttaagagaataattaactgctctatttttacaaaaaatacacaaagtgatacaatctaaagactaatcctcagacaaaatcaattgctaaacattggaggggcaaaaggggagaccacgccgcaaaagcacggagaggcaactttcggcaccgcgggaaggccccgaccacgctgcggctccgcctctcctcccgcccctcgttcggtagtccggtagccccgcggctccccgaattccccgccctcggcccctgcgggcgcaccctgcaggccccgccccggccccgcctcatcgcgacgtcagttgttatgtctcggctccggccgcggccgccgctgatacacggttgtggagggtacggccgcggtctccggaggtggcgggggtgttggggacgggtgctgcgaccggcactgcccatccgagcgggacgggcgctgagtggccgggaggcagccgggtagccgcctggaggagcagtctcggggcctattattggttttttccctccgagaccgattccatctgcagagaccgcgacgccccatcctgggccgggccgcagtgcccgcccgcctgagaggcgccgcccgccagccggcccgagcgaacctggagccgccgccgtgcccgccgctcttctcgcggagcctgggcggtcggcggggcctggggcctgggcttcgggcgcggcgttgcggcggccgctcctccccgcgcagaacacgctgggccccgggcctggcccggccgagcgccgcgccctcctgacccgcggccgcgggagtccggcccccacggcccctcgggccccggcctgccgcccggatccccgcctcctgggcggatctgagttattttttggtctccccctcccccttgagatcgcggcaccggagggccgaccccgccacctgggtcagtgcccgccccgggggaagcgtccctcgttttgttcttccccgcgagctctccccgcgcccctctcctttctgtgcttaatggatgggggttttgagtttttcccctttatttttgtcggctcttgactgggaggcccggcgcgaggctctgcgtctctgcgtccctcgtcgccgcctcgcgcccgcgcggatcccgtcacctgcttccccgccggggatggccggccagtgacggcgccgggtggcccgcgcgtggacacggggccctcgcccaagctgccaccgagccgcggcccccgccctcgacccttctctctcccgtattccgagctctctggaaagagaggaaactccagggaagatgtggctgaagctttttttcttgctcctctatttcctggtcctgttcgtcctggccaggttttttgaggcca

SEQ ID NO: 8422 - DNA, 6000 bp, Homo sapiens
tttgaaaatctcttcctctctttactctctcttttcctgagttttttaaagtagcctctgactttccagggcccacagtcagaactaggccttacatgggtggctgtgggctctctttcaatcaagagaaaatcagatccaaatccctgtttcaagcagagagcctggctccagccttcctctataggcaaagcactgtgaaactctgttagctgaaggagtcaaactcttggtgcctctacactaagaacagaccctcaagacccaggcccaagaatggtttgctaagaacagatcccagcaagccagcccctgattccagccattgtcctgcaactacatccttgaagacgtttatcttgcttttgagtacatctgccttctccccttcctcctcttcttttgtttttaactataccattgctatatgttaaagcatggtatcagctgatcttgatcagacatatcaaatgcctcattctaaacaacctctctcctaattcttcctttatcttcaaacccaactatatgtgaagcctttcctgaccactcttacttggaatgaactatctaagcctcctctggtctgctgtaccctacttctaccttcctttagcttttactgagcaagaatttcttgagtgtgtgccactcaagtgtgtgccaagccctctgtttggcaccctggtgtaaacatgagagggacaaggctccttcctcaagggaccaagggtttggttgtcaagctggacaggcaaacaaaccattgtgctccagtctgcagatacccaaggtccgggtgacacagagaagagaaggatgtggtctgtactgtctgggagtgggagggggaaggagctaaaccccacaggaaggagatgcttgagctgggtcttaagggagaggagtttggtaagcagagagcagaggtgagaacattcttggctgagggaatagcatgtttaatggctctgaagtggaaaggactagggtccgcttgagaaatgagagatgcggaacctaggaggagtgaagaaggtgacagacaagaggacagagactatgaaaccaagtgtgcagggcctcacaggcaacattagggatccccgacattctactagggacaccaggaagtcctttcaggttgaagcagggggttggcatgatgagattttctctagaagggaccagagcagaaatggggttggccagttaagaggccattgcaaaagtccaggaaagaaggacagcagctagatgaacttggggaactcggggtggaggaaaagaaaggtgacagaagtgaggccaaattgattggtatttccaattaagataaaacaagccctgataactctagagtttctagccctggacaagctaactccttccaagaacagtaacatctccatagacctgaattggcgatggggacacagcaggcaatttcccagccatgattccaagttgtccctgcagttcatgtcttaggagcagtggcacagaaccctgatggatttcctaccactgctctgcccggttttgcattttgaatatgtctttaatctacattaaagttttccatttccatggaccagtttaaatcagcatagaaactggttactatcttactctatctacttctggatatttttttaaataaggggcttgcttaaaggagtgcagtcattcacatttcttcatgccatcccaagtcagtgctacagtgtggggtttgggaacttacctggcagtgatggacaggcccaacccagccctctgcacacctggtctacagaaagtttctccagaacttgtgcaattgcatctgttctgccactgcaaggcggatgtcattgtggtcacatcgaaaatccaccacgttctgcaaaaaatatcactggggtcacaaagcctccttgatgggtttgacatgttgccttatcctccccaccccaacccccatggtgctctgtacaaaggggctgccaccccactggctgacacttttctgagctgcagggctagaaggcccccaagctgatttccgtgagactaagatggaactagtctattttaaagcagtacacccccaaatctggccatcatcacactcaggggcctgattctcaagatccaaataggtggaggttgactctggccccctcagtgcttccaccactgggcaagtgcagtttcgtgtctagccatcttccttaccaccctgttgattgtagcctttggccagcagggccatttgacactcctgatacagtgctggtggtgctgagcaaaatggcaaactaccatctacagcaagaattgatgtgttggtggcctgtctggacttgattgcttccttgtctccctcattcatgtgagttgagggacagcactgtgtctacacagcgagggaccctcataccatgcacacacacacacacatgcatacatcgataggccagttataaccatcattgtaaaggtgttttcttccccaactccctcatctcccatttgaaaaagctgcaggtactggtgcaagccctcagtgatacagatacattatatctaccacagccttgctagtgttgcaataatgagaaatcgcctaaatgtccactaacagcagaattaaattatggaacacccatatataatgcacccatttataagaatggggtggatcttcatctgctgaacgctctccttctactgtgaaacaagataggttgcaaaaaaatatttatctcatacaatcccatgtgtctaagatgatgtataaacatctgtttatgtacagataatatctaagggacacattcaactgtaacagtggttttctgtggggagcaggtgacagtgaggagagttgagacagggaactttgtgtttgttttcgtacaagaatatattgcactgttgtcacttaaaagacatttttaaaaatttctgaatataaaatgttacatgttccatgctagaataagcatcttggatgctttgagggagctggaaggaggtactgaaatcaaaataattaaaaaaaaaaaaaaaagcccatccaggccctgatatggtggctcacacctgtaatctcaacactttggaggccaaggcggggcaaagcgcctgacctcgggcattggagaccagcctgggcaacatggtgaaaccccatctctaccaaaaatacaaaaaattagctgggcatggtggtgtgctcctgtggtcccagctacttgggaggctgaggtggaaggatcacttgagcctgggaggtagaggctgcagtgagccgaggtggtgccacactgcactccagcctgggcaacacagccagaccccatctcaaaaaaaaaaatagcaacaacgacaaagaacccatccaacacttaagtttgtacttcacaaggacaaggagaatgcagttcaacaagcacagctcagcccatgctgtgtttctggggatggaggacacatcatgaagtctcggcatggtcctcgcccagcagaactaatgggtggggcagacacatggaacacagaatgccaggtgtcttgtctctaggatcaagcagtagcaatgtgaggtgcagccactatgggattcaaagtggaaagactcagaaaccctgaagaaatgggaagagggcatgccactggagctggaaggtttcaggacagcaacagtcaaaaaggaaagatgagcctgtagtcccagctactcagggggctggggtgggaggatcactggagctcaggagtcccaaggccagcctgagcaaaacagcgagactccagtcttttttattttattttattttttaaagaaacaaaaaggaaggggacacacatgtgttagggacagaaaagagaaaaccgcctctacccaagcattcacccacatcacccacacctccctgcagagcacccagagctgggggtgaaagaaatgaggtccaaatgagacagcacaggagctgcctccagggcttaaacagaccagcattccaggccgagggaccgcaagtgcaagggcgtgaaagcacagagcgcaggggttgaatgacttcaagcctgtgaagctgcagctgcaggtgtatgggaaaggcagggcagggggctgtgcggaggctgggaggagccagcacccaagggctggtcaaccaagctgggggttgaatttccatccagcaatgcaggccatgggaggctgcagcagtgacgctgtcagatcccctttgtgagaataataatttttataacaacgtggctggaggactgatcaggagagagactggtgtgaattgaaggctgttgcaatggctccaagaagagatgaggctgtgtggtgagtttagccgctggatgaaaggccggaagaatgaggtcagcagcgcactgacaccgacacccaaagcttcggctgctgccgctctcatggaaatctcctgggggaagggagagggtccttcctcggtgaaaactggggctgctctagcgagttcctcagaagcgggcaggtcgctagttcctcttccttttcagccctcagtgcccattttgccaataaaaagtcccaaggtgacagtacaagagacgcctttagtgaaggcaaaggaagggacactcccctcctttgctgcctactctcgccctcacttcttgaaatctttggtctcccttcacccactctgtcactctcacaagacaaccatttccaaggactatttccaagcccttttcctcatccccaaacccgcagttttcagctgcccccagttgcctggccaggctgcctcgacggccctattcacgggccccagcctcctcgccgggctggaaggcgacaaccgcgaaaaggagggtgactctcctcggcgggggcttcgggtgacatcacatcctccaaatgcgaaatcaggctccgggccggccgaagggcgcaactttcccccctcggcgccccaccggctcccgcgcgcctcccctcgcgcccgagcttcgagccaagcagcgtcctggggagcgcgtcatggccttaccagtgaccgccttgctcctgccgctggccttgctgctccgtgagtttgagacgcccgggaaggcaggggatggggcgggcggggggcggggggcgcgggactgcgggctcagcctcgctgcttgccgcctgcagacgccgccaggccgagccagttccgggtgtcgccgctggatcggacctggaacctgggcgagacagtggagctgaagtgccaggtgctgctgtccaacccgacgtcgggctgctcgtggctcttccagccgcgcggcgccgccgccagtcccaccttcctcctatacctctcccaaaacaagcccaaggcggccgaggggctggacacccagcggttctcgggcaagaggttgggggacaccttcgtcctcaccctgagcgacttccgccgagagaacgagggctactatttctgctcggccctgagcaactccatcatgtacttcagccacttcgtgccggtcttcctgccaggtccgcgcgccgggttgcggcacctctccgcgtggggcttggggttcacctcaacctgttttccacacctgggccctgctttcaagcctcttagcgcacctggaagcgacttagatactgttcccatttcacagacacagcaaactgaggctaacgcgaggctgagtagggactggggatggctttttacgtccggccgatctggactcgagttcggattcttgtgtgattctgggcaaatgacttaaattatctgcgcctccgtttgctcgtgggtaaaatgcggacagcaatcaacccgcgctccagggttgctggttcagcccgggagagaggccaggtgcaggggagctggctcctgcgctccggctctgggcgccgggtgcgctgggctgagccgaggcccgagcacaggggtccgcgcgcatcccggggtccccatcctgtctcctctgctatccctt

SEQ ID NO: 8423 - DNA, 6000 bp, Homo sapiens
agtagctgggactataggcacacgccaccacctctgggtaattttttatttttattttttttttggtaaagacagggtttcaccatattgcctgagctggtctccaactcctgagctcaatcaatcctcccacctcagccttctgagtagctgggattacaagtgcaagctactgcacctggccctctttctcttatttgaataatttctttttgttaaaaggctcaccctagagtctggaattggtagaagcagaaaaagagactttcatttctttatgtgattttaaaaatcctggatattctttcttatgttttttaacatttttttttttatttttgattgacagtacaatatgaacatagtgtttcaacattttaaaataaaatcactaaaataagaaaattaatgtggaaaaataaaaatgtgggaggccaggtgcggtggctcatgtctgtaatcctagcactttgggaggccgaggcgggtagattgcctaagctcaggagtttcagaccagcctgggcaacacagtgaaaccctgtctctactaaaatacaaaataaattagctgagtgtggtggcacttgcctgtaataccagctactcgggaagctgaggcaagagaattgtttgaacccgggaggcagaggttgcagtgagccgagatagcgccactgcactccagcctgggcaacagagcaagactctgtctctacaaaaaaaaaaaaaaaaaaaaaaaaaaggtggaatgtgtccttggggaggtagtactagtaaagtgtttgtacgaacttgattttgagatatggagctgcactttgacctccaataggggagcattccatgggcctggtctccaacttggaaataaactctctaaagacattattttctttgctttacacctcatgtcacttctctgagtaggagggattctgctttcatttcttttaatggtaacagtggaatcattaactccctactaaaagaggcttattcaatatatttttgtttgatttgggctccctttgatggtggttagtttgatatttgagactttttcctaaggagactataaaaagcaatctagacttcttctctttgatttgggttagaactaagtgtgagatttccaagtggaaagtgagcatcagcctaataagcttttattctacatggttcaaaatgttctctgtaaaactgatctaaaaatctgcttgtattctggaattttcttattgcattatcttaattttttttttttttttgagatggagtcttgctctgtcgcccaggctggagtgcaatggcgcgatcttggctcactgcaacctctgccctctgggttcaagcgattctcctgcctcagcctcctgaatagttgagattacaggtgccctaccacacccagctaatttttgtatttgtagtagagatgggattttgccatattggccaggctggtcttgaactcctgacctcaggtgatccaccctcctccgcctcccaaagtgttaggattacaggcctgagccaccgtgcctggctgcactatcttaatttttacactagtccttttacctgttcactccttccacagctatttaaagagcacccctcatttatgaatataggaactgaggcctgagagtgggtaaatagcagagaagcgatgctaacaggcactctttctgctataccagtgcagtccaggcaggttatgtattctctgattccatttcccttttctcttgggcacccaactaaactccattttccaggccccttacagtttggttgagtccatgtgactgagttctggccaggcaccacagtggcagcgggtcacactgcgatgacccaatctagcagttctcaacccatcagaccagccctccttcaccagaacgactctttgtaatgatactttcactgtcctgaaatgaatttcacagataataggctctatctacacatgtaatttcaaaacaagtcaacaaaaatcctgaactatataaaagaggagattgctttataataaatggacaagtattttaaccagtcaacactcaggcacagctgcagaagacaatatagtgaggtccccaaatacttataccaacctgtactgaacaaacgtcaaccgaagagaagtcagagcatgagctgatctgtagccaagaccaggaaaatggaagagcaaaggcacaagtgaatggtggactaaaaaccgctacattcagagaaggcaaaacctgagagggaaaggtactttatgttgacaggcaaaactgagttttgttccaggttcagacaattaattacaaacaggttattcacctgaatgaatatccaatggcacacatgaacatcaaaggaaaggtccttctgtgcacctggcttccctgaccccacccactaactgcccacagcccacctcaagcgatatgaccatctccatgccctcaatgtttttccaagccagtcccacaagaaagtgatagcttcatctgagacctgctgagttacctcctccaagttcaatgggcaagcagatcccggattttatttagccctgaagataacccagtgagatggcatggttggtattattttcctcatttatccacgtagaaacagaggcctgagagtgcgtaagtagcagagaagtgatgctaaccagtgctctttctgctataccagtgcggtccatgctggttatgtattcactgattccatttcccctttcctcttgggcactcaagtacactccattttccaggccccttatggtatgattgagtccatgtgactgagctctggccagtggaaagtagacagagtgatgttgatgcttccaggcctggtacccagccccagcaccccctacactgccctggtgaaggcagtcatcctcttttccctttgcacagtgatctctggagccatgagttgaagatgggggaaagaccctggtcccctgcaggactgagtggagcaaatactccttactccctggcacaactgcacttgaatgtcacagaacaatgcaggggatttgtattgagttaaaccactaatatttagaggttaatttatcacagacgcaagagtttccataactaatgcatccaggggttccctgtctatgattttagacaatacctgacaaagcagtgagtaacttttaatcatttactgagaaagttgttccttttgcaatgctgtggcgcccatgagagagtggatagaaagaggtagcttgtgttttctaaacaacaaatactttgaatacacatacaaagaagaaatacaaatggccaacaagcacatgaattgatgcttaacatcatttctcattcaggaagtacaaatccaaaccacaatgagatatcacttcacacccactaggatggaacaaaacaaaaacagaaaataacaagtgttggcgatgatgtggggaaattggaaccctttcattgttggcagaaatgtaaatggtcacagctgctatggaaatcagttggttagtccctcaaaaagttaaacatagaattattgtatgacccagcaattgcactgcctgagtacatacctgaaagaattgaaaacaggcacccaaacatatatttgtacaagaatgttcacagtagcattactcacaaaagtcaaaaagtagatatagtagcccactcaaatgtccatcattagatgaacagataaagaaaatgtggtatatacaggtacatacacaaaatattactcaacaataagaagaaatggtgctataatggggatgaacctgaaaaacattgcgctgagtcaaagaagccattcgctaaagaccacacattgtatgggagccaaggcagtatccagcgagactctggcctctggctgggctgagtgacttcttttcccccagtgcctttgaactctctgcacccaactcagccatgagcaatgctgtcaccagcaatgggcagaggggctggggcaagagtgggatggaaagaatactggatgtggagaccaaatgtgacagtgtccttgcccggctgcctgctttagatctcaggggacacgccatttcctctccgataaactctaagctcttagggtaacccatggacctgcctggctgggtctttgttgacatttacaaggagcctctcccgcagccctccaaggggtccctctcccctgcaggctgcatgcccagttctccctggacctccccaaccccctctctactaacccccgtttgaacaggaagacacagcctgagccaggtctcccctcacaaatctccccaccagggctggatcgcgcaacaaatagagccagccccagggcactcgccggcagggcgcagccggtgatcgtcacagtccttcgaaattcttaagatctaggtcttgctgcacccccacaacctacaaacagcgtcggggccttctctgcacctccagttcccagctcacctccctcagtgtcacagccggttacctttccttcctccctggcaagggagggcaagacttggggcttgctgactccaggcccagcccagcccggggcacccaggagcccctcaattgctactcaaacaagacaagaagcggcccgagttagtggccagctccaccatgcactacacatcctgacctctctgagcctctactgtcactcggggtcacaaccctttcctgagcacctcccggggcagggggcgatgacacacatgcagctgcctgggggaggccggcggtgtcccctcctttctggaaagcggagggtcctggtgggctctggaaacgcagcccagacctttgcaatgctaggaggatgagggcggagacctcgcggtccccaacaccagactcccgccgccaccgcgcccggtcccgccctccccactgcccccccagctccccgacccaggcgccccgcccggccagctcctcacccaccccagccgcgactgtctccgccgagcccccggggccaggtgtcccgggcgcgccacgatgcggccgcggctgtggctcctcttggccgcgcagctgacaggtaaggcggcggcgcgcgggctacccaagggtctgcgctcccggggcctgagcggggaggtgataagtggctgtcctggccctggtcctggcagggtgcagcgtcgagcccgcggtggcggggcgcccgggaggcagcttggcaggcacggtccctaagggtggaaataaaatacccccatatcgcattaccccgggggaccggagagcccctggactgaggccacctcccctcaaaagcctggacgcaggagaaggggaggcagtgaaaaggggagcgagtgagggaaggaaagagagggtcgctggaggtcaccaggggaaggaaacaggtccctgcccagggtccccgcaggatgtgctcggaggaaggttggccaggccatgggtcctgtggacacatttttattacttccggggaagtgtttgtagtacaatcagacaaacatcgggcgttctcagttctcggagggctagggcagggtgatccctctggctcccgttctccctgatgtcgctggtgttgggtgtcatgggtagcgtggctccctaggaagcagcctggaggttgggttgttggagttggatggggcatctggattgtccttctgaataagcccagccagactgccttttggaagaagcctccacacacccggaaaactacccaaactggtcgatttgctctcgtgcccaaaaagcccaaagctggtcatcttgccagggggtgacaaggcctgcccgccgggggttctggcccagtgagtgcaacatcataaatagaaacagcccaggccgttcagagcactaaagtcattactgatggatctagaaacatcaggtccctctgagaatggaattcctgggttaccgaggggaacatgcagtgaggcctggctccatgtccagcacacagcagggcctt

SEQ ID NO: 8424 - DNA, 6000 bp, Homo sapiens
aaagatgatatataatgtccaacaagcacattaaaagatgttcaaaatcactagtcgtcagggatatgcaaaccaaagctacaatgaaatggcatcacatacctactagaatagttagaattaaaaagacaattaccaaatgttggtgaggatatagaacaacttgaactctcgtgcaccactggtgggggtataaaatggtacatcactttgtgaaaatgcttggcagattcttataaagttaaacatccatctactatatgagcgagttattccacatctaggtatttacccaagagaaataaaaacctacatctacaaaaagacctgtacgtacataaatgttctcatagtagctttatgtgtaatcgccaaaaattgaaaatataccaaatgtactccaacaagtaaatggataaagaaacatggaacatataaagcagagtactactcagcagtaaaaaggaactaagtattgctacattcaacaacatgaataaatttaaaaacattatatggagtgaaaaaagtaagacacaaaagtacatactgtatgactgcatttattaaagatgctagaatatgcagactaatctattgtgatggaaaacagatcagcggttacctaggggcctcgtgtaggagggattgaccacaaagggacacaaagaatctcttggagtgatgggaatgttctgtatcttgactgtggtatatacatctgtcaaaactcatccaaatgtatatttccaataggttcagtttattgtacatgtattatacttcaagaaaactgattacacattcttcctttcatcctcactagcagaatcctcattttgcttagcagcagcatggtctggcctgggaaatgtcagtgaaaattccttggtggtgcttcctggagagctctttgataggggcaaattcaggtggttacatgccttttgtcattcctctttgtcctacctataataaagaaatgatactggagttgccatcccaaaacagtgagacgacaggcaaaaggaacaaagtcacccatgaagcatggagaaacagaaggagcataagtttaaataaaacatcactgtagagctgtggtgtcagtaaaaaaaaaaaacccacttcttgcttcacccactatatggcaacgtttttgttattcacaatcaaatatcatttcaacagatgcagtctctctctgttaagggattgaactcactgtttctaaatctcagacctattttgctgattttttgggccacactcagttgtagaatcttggttgttttgggcaaccctggctcagggtacctgagcaccagcttcttttcctggcccagcctcacgggccagctctcatgcccggtccccactttcttacatttccctgaggcacccaggttccagagttcccacaaagtcactgtgaagctccatgctgtcctaaagcaggtagactctcttttctctccttaatttattttcccagtcagcacacttcgactcaggctttttttccaaaatggaaaatttgtgttttgttcccaagtataaagcttgactctccttactggcattttccaccactgtgctcttctgcccgcgcctttttcatcatagcacttatctcagttttaataatatatgtgtgattgttaatgtctgtctccctaactagataggtgttaaccttcagaagggcgggaaccacatctattttgttcatatctttattctcattatttgcaggtggtcatgtggaatccctgaatgttaaatgaataaataaaacttccacagtatttacaggtggcaagtagactcctaattcattagttcagattaatagccttgttcatgccatgatcattttttgaaaaaattacaaaaccatgaagaccaggcccactaaaatatatacactaatttcaaacaggtagttaacaatcatttttcatcttatgttaattttctgacaccttcctcataccaactagtataatcccttttaggtgggcaattttatctcctattttgttgagtagataatggtcaattggtttgagttcgctcatctattttctctacttttcaaaataacttactctctaggaatacctcctacgctctactttcaacatggaaggcagagctgccccttttcctccagatactctggaatcttgctctcgtaatcaaccccctctgtctacagcaactgcagtctcttcctttccagttgtctctttccttctgtcctcaggtattcattcattcattcattcattcaacaaacatttattaaatgcttgctaaacactttgcactgttttatgtcttcgaatacatcaatgagcaaatcttcacagaatttacatgcaagtggaaggaaacacagcagacaataaacaaaacaaatatgtaaattacagtatttacatatttgtaatgtatgtatcggctaagcagaaataaagcaggagagaaataaaggaaggaaggtggtggaggttttaattttaaataaggtagtgaggagggacttcactgggattagcaaagcctcaaataaagtgagggaacatatcttgtgggtacctgggtattatgtgctaaattgtgtccctccaaaatttacatgttgaagtcccaacctttagtgcttcagaatataactatactgtatttggagataagatctttaaagcagtgattaagttaaaatgaggctgttaaaggtagccccacactccaatctgactggtgttagaagaataggaagagacatcagagggaagaggaagtaagagggctgtcatcggcaagccaaggagagaggcctcagaatcccaccttgatcttggacttctagcctccagaacttcgagaaaataaactagttttgttcaggccacctggtctgtggtatttgttagggcaactctagcaaactcatatacctgggaagtttcctaggcaggcaaaacaacaaaggaaaaccccccaggtgggtcttgattggcccagtggagtgagcaaagacagtatgaaatgagatcagaaaagccataggaaccagatgctgtagcaccctgtagtctattttaaggacttgacttttatcctgagtgaactgggggaccttttgagggttacgaccagcactatggagaagcaagaagaccggtgaaaggtgttctagacaggaaaaacttgagttgctggatcaaatacagctgataaaacaaagattatcctttgaatacagcactggtggcctcagcgagagcagttttggtggtgtgaatgcctgactgtagtgtacttgggaatgggagaagaggaattgaagataaggaattttgaacacttgagttttgccatacagaggagcaaagacacgtggtaggagctggaaggggaagagaggtttcttgtttgttttgggctggggagagattagagcatgtttttagcagatgaaggataatctaggtatacccatattgccaacaccttaacaaatcttcaccggttttggaccaggtgcggtggctaatgcccgtaaattgcagcactttgggaggctgaggcgggaggatggcttgaggccaggaatttgagaccaacctgggcaacacagaaaccccatctttacaaaacaaaattaaaaattggcctggcatggtggcacgcatctgtagtcccagctactccggaagctgaggaaggaagatcgcttgaacgcaggaattcaaggttatagagaactatggtcaagccactgcactccagcctgggcaaaagagcaagaccctctctctaaaaaaaaaattttttttaatgttcactggttttgatgcgggtaatagcctcccggccagtctcctcctcgttgatgctgtcactgctgaagatgcattttcttatcacttcactcatctgctcaaaaatcttcaggaagtcttgacttgcagcattaaaagttcaaatgccttggctgaacattccagtcttctccactctgcccttttgcaatttcatcactgtctttggtgaggtacaaagcgtgccaggtcagagtcagaagacatgaattaaagtcatgattctgtgaccaaccagctacgtgatcttaggctaactacgtcagtgcactgggccggggctccttcccgttcctaaggaggcgggaggcgtgtcgggcagactggattgtcacaggtcactgccatctctaacaagcggacttctgagccccgttgcggccacaagtaggaccatctcctgcatcctccttacccttctacttctagggaccacacggcttctgtggccacttcttgctgcttcgcttttgccttcctaagtagactaggctttagaagagctacaataccagctcctttaaggtcgacctcctcccggtcacaaggcacttgcctcccactcttcacttgggacagtcctcttcacagtcagaatccgccacgtagtaagtgccgcttccaaccaatcaagaggcagttagcgcagacctttgagggacatccacttccaccaatgatcttcaagtcttctccagcgcctcgctttgtggggcgaggccaaccaccgcgatggccaatctgttgtaggaaaggtattccgggaactgatgagcgcaccaatcaggtaaaaagacgtcggggaagggcatttctcattggtaattgcgtccggaagagggacgggcctcgaacgacgaaattacgatttgattggtaggtgcgatgttgaccaccagggaaagtccaccttccccaacaaggccagcctgggaacatggagtggcagcggccgcagccaatgagagagcaaacgcgcggaaagtttgctcaatgggcgatgtccgagataggctgtcactcaggtggcagcggcagaggccgggctgagacgtggccaggggaacacggctggctgtccaggccgtcggggcggcagtagggtccctagcacgtccttgccttcttgggagctccaagcggcgggagaggcaggcgtcagtggctgcgcctccatgcctgcgcgcggggcgggacgctgatggagcgcgccatcagcccggggctgctggtacgggcgctgctgctgctgctgctgctgctggggctcgcggcaaggacggtggccgcggggcgcgcccgtggcctcccagcgccgacggcggaggcggcgttcggcctcggggcggccgctgctcccacctcagcgacgcgagtaccggcggcgggcgccgtggctgcggccgaggtgactgtggaggacgctgaggcgctgccggcagccgcgggagagcaggagcctcggggtccggaaccagacgatgagacagagttgcgaccgcgcggcaggtgaggggctgccgacccgggggaggcaacttgtttacgcgcgcgagccgcggaggatgcggtgtaggggggcggagatccgggacccgggcgggcgtcttccctcggctgcggagggcagctggcgacctggggacgagcgcggggccacgacgccctcccatcccccggccagcgacctgcctgggctcggctcccgagggcctggtgctggccgacgggtcagagcagcatcctcgcaggtgcgggagaatggaattccagggttgcaaagaaacgccacttcccctctttcattgttttcgggcattgattctcttccaaggaacctttccctctttttccttacgcacatcacctcctgtctgtgctggcgtgacagctgttttgagaaaggactttagcaaaagacgtctgcattttctttcaaacacaactctgtagtgcccccggacaaggattgagatcagtgtctaattgagatctgcggaacacctgcatccgaatcacctggggttgctggtgaaatctacagttttctaggccctaccccagttttactgaatgagacattccctgggtaagagcctggcatctg

SEQ ID NO: 8425 - DNA, 6000 bp, Homo sapiens
agcttgtgcttctgaaaagcacctacagtaaagaaattccccatccttttgtcttccttccatctcactttgtagactccgttgtccaggctggagtatagtggcgcgatcttggctcactgcaacctctgcctcccaggctcaagagattctcatatctcagcctcccaagtagctgggattacacacacgtgccatgatgcccggcaaattttttatgtatttttagtagagacagggtttcaccatgtttgttggccaggctggtcttaaactcctgacatatgatctgtccgcctcagcatcccaaagcgctgggattacaggcatgagccactgcgcccagctgagagatggctgtcttaacggactaccctgctctggaatatcccaagataagacccacttccacccttcctcagtgactcagataagaccctctccatccttcctctcacgaaagatcccttgtttacctggattaccccaggtctccttccttttgttttgctttgagatggagtttcactcttgttgctcaggctggagtgcaatggcgtgatctcggctcactgcaacctccgcctcctgggttcaagcaattctcctgcctcagccttccaagtagctgggattacaggcaccatgcctggctaatttttgtatttttagtagagacagggtttcaccatgttggccaggctggtctcgaactcctgacctcaaatgattccgccctccacccccacctcggcctcccaaagtgctgggattgcaggtgtgagccaccgagccccgcctgtccttcctttccttttttttttcttttgagatggagtctcactctgttgctcaggctcgagtgcagtggcatgatcttggctcactgcaacctcttcctcctgggttcaagcgattctcctgcctcaacctcccgagtggctgggactacaggtgtgcactaccacgcttggctaatttttgtatttctagttgagatggggtttcactatattggccaggctggtctcgaactcctgacctcatgatccacccgcctcagcctcccaaagtactgggattacaggtatgagccaccgggcctggctcttccttttctttgatacattcctcattaataagcattcttcctattgcaacagtctgaacaaaatgatttgatttatagtccagtgcatctcacctttcacacccttctcctttattccccttttcctcatcacacagaattttacaatgagatttctgcttgtgtcaatctatcagaaattcagctgacagggtgcatgacactgcgaatgaatttaatgcctttgaactgaacacacatggtcctgacttaatgatggtttgacttaggatttttagactttaggatgggtttagtttttctgtaggtaaccccattgtaagttgaggaccatctgtacttaaaaattatacgctgtattttatgtattttttttcttttttttttttgagacagagtttcactcttgttgcctaggctggagtgcagtggcgcgatcttggctcaccgcaacctccacttcccaggttcaagcgattctcctgcctcagcctcccaactagctgggattacaggcatgcgccaccacacccggctaattttgtatttttagtagagacggggtttcttcatgttggtcaggctggtctcgaactcccgacctcagatgagccacccacctcggcctcccaaagtgctgggattacaggtgtgagccaccgcgcccggcctttatgtgcattttactacaattaaaaattcatcttgcagagaaatgcaatggaaataatttattcaaaacaattagaacccctactatgtgctgggtgataggttggggttggggaaatgggtggggcctgagttaggaaatgagtaagacctgcttcctgtggtcctggagctcccagccttgctgcggagacaaacccataatctgttaattgagctccataattccaggtgacacacattacagtacacatgcgtagcgcctgatttcagtcaggatgcaaagggctttgaatgctacactaaggactttggattttggtaattgggagttatgaatggttttaaagccagtgtatgacacgaacagattcattgcaattcctaaagtcttagcaccagacatttgacattgtagggtgtcaaagactgatggcagtgacaggctgggcaccatggctcacacctgtaatctcagcactttgagagatgaggtgggaggatcgcttaaggccagaagttcaaaaccagcctgggcaacatagagacccccatctttagaaaaaattttaaaaattagctgaggctcacccagcagtttgagactgtagtgagctatgatcacagtactgcaccccagcctgatggattgagaccccatttcttcttttttttgtttttttgagacggatctgctgctcaggctggagtatggtggtgggatcttcttgactcactgcaacctctacctcctgggttcaagtgattctcctgcctcagccttccaagtatctgggattacaggcacctgccaccacgcccatttaatttttgtatatatatgtatatatatatttttcgagacgaagtctcactgtgttgcccaggctggagtgctgtggtgcggtctcggctcactgcaacctccgccttctgggttcaagtgattctcctgcctcagcctcctgagtagctgggactacaggcgtgtgccaccacggctggctaattttttgtatttttagtagagatggggtttcaccatgttggccaggatggtcttgaactcctgacctcaggtgatccgcctgcctcccaaagtgctgggattacaggcctgagccaccgtgcccagccaagaccccatctctttaaaaaaaatagctgtgacagctttaattttaaaaagttgatcccctgtaaagtaggctcataattatgtttatcttattaaatatattcatgctcaggaaagcaagagagtgttaactttggttaagtctattgggaagacataaacacagatctgtcaattgctctatatgagatgtgcatggaacactttgagagctcagacaggagaatctaccctgcctgagaggtttgagaaggacctccagaaggaagtggactgcagaaaaaaaaaagagggaagggaagctggagcataaagatggaggaaaagagtcatgggcaataaggccagggccagatggcagggggctttgtgtgccaaattgaggggcttgaatctcctccccacaggtgatggtgagccatcaaaggcccggttaataagaatgatgatgatgaaatagcgcttatggcttggtgcggtggcttacacctctaatcccagcactttgggaggctgaggagagaggatcactgaagtctagaagtatgagacaaatctgggcaacttagtgagacctcccccacaaccccatagctacaaaaaataaaaattagcaaggtgaggtggcacacacctgtagtcccagctacttgagaggctgaagtgggaagatcccttgagtccaggaggttgaggctgtggtcatgccactgcactccagcctgggtgacagagagagaccctgtctcaaaaacaaaaacaaaaacaaaaacaaaaaaaaaaagaaaagaaaaaagaaagaaatagtgcttactacacgcaaggcactgttctaagaggtttaccaatattgactcatttaaccctgacacttaccatggttagatagtttggatcactttagtggctacgtggagaccagtctggacacatgttgtggtgccggataaagacgaagggatgtgcctgtagtcccagtaactcaggaggctaaggtggcaggatcacttcagccagggagggagaggctggagctgagattgtgccactgcactccagcctgggcaacagagcaagaccttgtctctctttttttttttttttttgagatggagttttgctctatgtggcccaggctggagtgcaatggcttggtctcggctcactgcaacctctgcctcccaggttcaagcgattctcctgcctcagcctcccagtagctgggattacaggcacgtgccaccacgcctggctaatttttttttttatttttaatagagacggggtttctccaccttggtcaggctggtctcgaactcccaacctcaggtgatccgcctgcctcggcctcccaaagtgctgggattacaggcgtgagccaccgcgcctggccaagacctcgtctcaaaccaaaaagaaaaaaaagaggaagggaggaaaggaggtgatggcttttagaattaattaatttgtgtgctttcagttcttttatatctgtaggttgcttgatggcccagactatcacggcaaaggagtcatttgcatttgaagagaatgtgtcttccgcagttgttaggtggagtttctataaatatcatcaggtcaagttagttggtagtgctgttcaagtcttttataaattgatagttttccagctattttacggatttgtctatttctcctttcactgctatatcttccaaattgattcagagagctgcagtcaggagcgtactattgcagagaggatagaatgtttgggaccagaagaaacgttttatctctttaaatttactctcgtacgcagaaaacaaaatacaaataaactacgtatcccagcaagcctagtggaactcagggcaaatgcaaataagggggggggctgggcattcggctacgccccttttctgggttggcaaggcaactgatacagaagccagccaatcggtgatatagtcacctgcaggggcgggggcttgacgaaagccaataggacgcagggcagatggctcttcgggccaatgggttgggcgacggggcgggcttttgatgaagggtcgttggtgggaaagatggcggcgactctgggaccccttgggtcgtggcagcagtggcggcgatgtttgtcggctcgggatgggtccaggatgttactccttcttcttttgttggggtctgggcaggggccacagcaagtcggggcgggtcaaacgttcgagtacttgaaacgggagcactcgctgtcgaagccctaccagggtgaggcgcccagggtgaggtggtcgtgcagtggggcgggcttcgggacttgatttcaggggtagaggcgggggcggcgaagggcttcgtggcccggaggaaactgctggcggtggtggggcccacggagactccctccgcgtttgggagccacaggtctgaaaggcaggagttaggtgtgcctgccaagctctggaagtttccagtaggtaaaggcagggctgtcgggtgccactagtactaggcctggagttagacaggaggagtttgggaaggggagagaattgagaatggtgaggagtgattgagggctactagcaatgagccagtctccagatggacctgtggatgtgctagaaataaagcaggaggaagaactggggtagaacttgaacgaaatgagaagatgataaatttatgttgctgggtagaaccaccttctcttctccagcctaggggccctgttggtgaaagaggttagggttcacagaactctaagcacagcttatcagccagaaaattaatgcagttagccacaaaacgatgacaaaccagtgcagatggcttaactaacacaagtctttccccactaaggcgtaggtagtgggacagaaaacaattcaaagtgcaagagtatactctactactaagggtaatcatttattcacttacatgcctggagtgcctctgtgctgtctctttgctaatgcttatgggtttgcagacacaaagttttcattcttaaagaagtttataggtgagggtacagggagtagcttcacactttaaggattgtttaaagaaagaatgtgacggctgg

SEQ ID NO: 8426 - DNA, 6000 bp, Homo sapiens
tctattattcaggggcacgggcacacgcacagcacagtgctggataccacacaggacgcctttctgcctagcagcctttgccaaatgagagggggaagaaaccctcggccagggtgacttagatgccaagcgacctccgtgacagttcaagtttctgttcctggctgcgtcacatgcccccatggcccgggcacccccgaagccccggcagcatcaggtcaacctcagatcctccagtgaacgagcagggactatggtgagccagcctccttcacccgccctcgggctgccctgctccaacactgcatgcactgacagttcatctgtagctattcacttttctctggaaacctggaaatcacctttgaaatttcccttctttgttcttactgccaagggcaaagaggaagtagggaggcctgagaagctaaacagggggagtttccagttctcgaaggtggccctacctggctctgagaaggagccgagctgtccatcagcgtcgataactggagccttcctccccagtcctggctcttgtccactgtcccctcctctactgctccccaaacatacccatccccaagagagaaatagataccaaggggagaggaggtgtcggtgacgactcagtccctccagagacctggctgtaacccgagcagaggtgtgcactgtgaggtcgcccaagggcgtatgctgtcccctggggtgtgtaatgggccctctctgggactggctgggagctgaccagatcttctaaaactagtctgggatcggttagagactcagcctccccaaggtccagattttcacagtggtgctggcaatgtgaccacttgccctccagatctttgacttttccagatccctaagcccttgggaaaaggctgggggatatcctgataggagccactggaaaatccgcatccggggctgtgatgacggatgttttcctgcttccttttggtactggtgacagggaggggctgggaagggaaagacatcccaggtgggcagctttgataactctcctttggaggaagtagggagggagagtccttttcctatgtccctagtcacctcggtccccaggcgcgctgacccaagctttctcacttccccatctgtgggatgacggcagtcctggctgccttggaaatccaccaggcagcgttcaccagagaacccagtgtccacccagggcctccctctggctgcctcaggagagctagtaggtgagtagctcaaatgaagggcagtgtggcccccaaccaacatcaagagatgggaagggggacttgcttttcaggaaagactctttaggtcatctctaggggctggcctgagctgctgggtgatctttgaagacccttgagagtcatttagcacaatttctgtgtctttccttgacacgaccacaagcagttgtcaaggcctgagtcccaaagtgtggataccttccatagatatgctaggccctagggagactagtcaggtacgtgcacctccccccacccccggtacctgtattagtaatttttttattaattgaagacccagaaatcttttttttatatcagttgtactttcatttagaagtatgaatcatgagcaagtagtcatgcaggaaattgtatcctctgcccacccacccacagaaagggccagtgctggaatggacagaatacagcaggaagtgcatgaaggtggaaaaggggagggagctgggagcttatctccgagagcgtttgggaggataggcgcgtggagtctgttagctggaggcttctacattcctgggcctccagaacccaaacgcctgccgctgccctgccagtgaaaccaaaccggttgccttttgaaactttccactgaggccaccttggagtcagagccagcgagctcaggtctctcctggtaaccttcacacctagaggtggggggatgggggagcagtattgaaggtgaggaaaaacagcatgaaatggagcattgtcaggatagatggtgactctgtggaaaaacagaatcgggagtcccaagacctgatttaaaaatctgaactttccagtctgagcaatatagcgagaccctgtcccgtgtatgatggtgtgcacctgtagtcttgggaggctcacgtgggaggaccgcttgagcccaggagtctgaggttacattgagccatgactgtgccattgcactccagactgggcaacagagtaagaccccgtttctaaaaaagaaattctgacctttttatctccatgacttggggctagttgtttaatcttttttaattatctccatgacttggggctagttgtttaatcttttttaattatctccatgacttggggctagttgtttaatctttttgactcatctccaaaaggggagcaacaatacttatttttttaattttgtcgaggcagggtctcgctctacaggctggagtgcaatggcacaatcacagctcactgcagcctcaacctcctgggctcaagcgaccctcccactccagcctcctgagtagctgggacttacagatgcatgccaccacgcccccgctagtttggtttgtttgtttgtttgtttgtttgtttttgagacagagtctccttctgttgcccaggcttgagtgcagtggagtgatcttggctcactacaagctctgcctcctgggttcacgccattctcctgtctcagcctcccgagtagctgggactacaggcgcccgccaccacgcctggctaatttttctgtatttttagtaaagacagggtttcaccatgttagccaggatgatctggatctcctgatctcgtgatccgcctgcctcagcctcccaaagtgctgggattacaggcgtgagccacccctccccgccacgccccgctagtttttttttttttttaatttggggctgggcgtagtggctaatcccagcactttgggaggcctaagcaggtggaccacctgaggtcaggagttcgagcccagcctgaccaaaacggcgaagtcccatctctactaaaaatacaaaaattagctgggcatggtggcgcatgcctggtcaacatggtgaaaccccgtctctactaaaaatacaaaaattagccaggtctggtggcaggcacctgtaattccagctacttgggaggctgaagcaggagaatcacttgaacccaggaggtggaggttgcagtgagccgagatcgcgctattgcactcccgcctgggtgacagagtgagactctgtctcaaaaaaaaaataataataataatttcttttgtagagacagggtctcagtatgttgccctggctggtcttgaactcctggggtcaagtgatcctcccatctcagcctcccaaattacttactttttaaagggtggtcataagggtgaagtaagaaaatgtacatcaagacaagctgcaaaaatctaaagcacagaacacaagtgagggcacttgcatctcagtttaccctccgcttgaatagatacggggaataaactaaacacgagggtgacacaccttctcccaccttgtcagctgaagcaggaggccttccctgcccaccccatggtcattatctccagcatctccaaggccacagctttttttctttttcctagtggaaaagagctgggaaacgtggctttggccagcaagggagaaggggccattatgtgtaccagcaaagacccgattgttactgaaaccaaactgggctgcttttctcaattatctccaccacttttctggtctccacttttcagatgccaagttttaacccagaacaaaagctgctgtcggactgatttataatccagatctgctgacgcagcctgaagtgttcctcccctccaggactgcaccctggcttaaagttacctccaaacctcaggacgtcaagccccttcacctctgccttttgcccctagccaggaggtagcatctgtctccaggtgcccgtggggtgtcctccatgaggaccacctcttctaaccacctgcccagctcagaggaccagctggcaggaaagacgctgcaccgcccatgaggccagagctacaagttgcttctaggagtggctgtgggcggaggctggtggttctgaaggtggcggtggttctgcagcgtggctccccacagcccctttcatctgaacagtagggctcatgccacttgttaatcagccttccagtggcacgaggagtcattttctggggataggcgctttgcccaaagcgtgagaagcaggagcaggccctttctgttgattgaagggtcttcctggctggtgaagccctttccagacttgagggcagggaccagtggtcctcggggcctagaaagaggcagaattgggggccaaacggcagacccctctggtccgccccaaaagacgcctcggttcccccagcgtgcctcccctggatactcgcctcgacgtggctcgcccgcggtcgttcctgcaactgcacggtcgggagtccctctccccagcccagcccgcccggagtcttcgggggacacttcagaaagatcgggtgagtgtgattcccccgtggccatacccggagtccctcccccgccccacctccctccaggcgctgtggcgcagcccgcgactccgagccccggggctgctggacacccggaggggttgaggtccgggcacccagagaggcggaggtccgagcccccgggcggagagcgggcgggtccacaggtcgctgcgggtcgcagccccctcctgagcgagccttcgcggcccgcccccggcctccgctcgacccccccagcctgacgtcaaggggaagggggcggagagccgcggccgcgctggagaaagagccggcgcccgccgtggtggcgcggggagcccgagcctaggggcgcggagccgggcggggacggaggggcggtggcagagaggccgcggagggctggcgggcgagcgcgggcaggcggcgacgcgggggcaggggtggacggcggtcagagccgaacgcgagggcggcgcccggggactggagctgcgcgcaataggtgagcgaggccgggcttgcgtgaggctggagccgcggggccccggagccgccgctttgtccctttgcttgggcaggggctgccggacgcgggagggacaggggctggggcgcggggagccgcggcggcggagacggctgtacgcggggatccttcctgcgacccccgcggctgcttcgcagggtctcgggagtggggcgcacagcacctgcagccccgcagccccggggccggaggggcgcgccagcgagggttcctcgcgcggtccggtccgcggccgggatcctcgccaggctcctggactgccctcggcgctcccacccccgatggaaagtttggggcgggcttggagggaggccgatgttgtgggatcggatttccctgccgcggccccccgcccgcccgcccattccgctggggaggcgggttgtcccggaaagccaggcccccgggccgagccgggccgcgccgtccccggctggagcgctcgccctgcagggagggccgcggtccacggctggccgctcggggtgggcgagggtgtggggtgccccgcctggatcccgcacccctccccccaacccctcctcccggctgcccgtttcctcgccctggggggagctgcgggtgggagcaccgctgccgggcggatcctcggagcacgccacggggtgcggcccgatcctcgggtaaggagccgagatgaggccgcgggcgttttggggggctggtctggggcgcagcccccgctctcccgcgccggggctctgggccgacagggggcgtccgcaggccgggctcgccacgctccccgcgccgccgctttgtttgcgttcaaatccctggagctgggggaggggagaacccggggggacccgggacggggtcttggcggggaccctttgtttgggggtgagcaggtccccagcttctgcgtc

SEQ ID NO: 8427 - DNA, 6000 bp, Homo sapiens
ggggaactggcaaatccctacctgtgtaggagatggttctccacatgaccccatccctgtaagagatatattggtttttctagatgcatctgttctattattccactttcaggaagggccttggtttggttcaaaacagaaatattcacttcatagtgggtggggtgggagtagcgggttgttaaagaacctggtatattttccttttactattaagaatttgggtttctttgagaacagaagttctcaatcattttttcctgagaacccatttacactcttaaaaattatcaaggaacccaaagagcttttgttaatctggatgatatccatctatacttataacatgagaaattaaaaacctttagtaatccattttagaaaatgaatattcccattatatgttactttaaatagcatactttaaggaaaaacagctatgtttttcaaaacaaaaatatggcattgtttacccttttgcaaatctctttaatgtctggcttaatagaagacagctggaatcatatacttctcttcgcactcaatctgttgcaatatattggtcaaagaatatgaagaaactccttcctcacacagataagtagaaaaaggaagaaatatttaaatcttttcagataatttgggggtattttgagtttccacacctaaacccaacaagtggtagccgtctaaaggttagtacaatgtggaatccaaaaccctatcaataaatattttatatttggtgacattaaaactcatcactttggcatgttttccaacaccaacaaccatttatctgattctccacacaccagttggctgtcctacaattcaacttaatcctgacactaactacctggagttacagtcagactccacaggttcagggctcagtctcacaagacttccctcacttcagatgccagttgcaagaattgggtccccagattatcccacttctttccagcttggctataaatcaggggttccatgactccctccctcctgtttggtgatctgatagaatagctcacagaatttgggaagacagtttatgtcctactatgtccagtttatgtcctgttataaaggatacaactcaggaacagtcagatggcagagatgcatggggcaaggtaagtggaaagggtgcagagcttccctgctctcactgggcacaccactctcccaggacctgaatgtgttcaccaacctggaaactctctgaactctgtggtctagaggtttccatggaggctttatcatgcagacatgatccattattaacttaatctccagcccctctcatctctccagaggactgggtatagggcaaaaaattggaggcttccatacgaggcctggtttttccagtgaccagtctccatctgaaaatatttaggggcccagcaagagttgcttcattagaacaaaagatactcctatcacccaggaaactccaagggatttaagtgctttatgtcagtgtattagtccattctcacactgctatgaaaaaatgcccaagactgggtaattcataaagaaaagaggtttaattgactcacagttctacatggctggggaggcctcaggaaacttacaatcattgtggaaggcacctcttcacagggcggcagtagagagaatgagtgctgagtgaagggggaagccctttataaaactatcagatcttatgagaactcactcactatcaggagaacagcagcatgggggtaactgcccccaggatccaattacctcccacagggtccctcccatgacacgtggggatgacagaaactacaactgagatttaggtggggacacagccaaactgtatcagtcaggaaccagggtcaaaggccaaatacatatttcttattacactacaactggttgatcactatacaatatttttttacaactagttgttagtactacttctgatctcatcagaaaaatctttaaatattgggaagctgtcaaacttacagtgatggatacaggttttgcaaaagtctgatttttcacttgaaagcttgaatgttatcacagacaacaaacactatcatttgtttttcttgaagtgacaggcccatgtcattcattttggaggaaatgtctgccaaatgcccaaatctgggtaactgcagtttgtctgtcagttctgctttcaagtaaaactggcgttccataaaaaagagctgcagcttgtgcattgcaggccattgcacaatggcacggccttcagcaaccatcatccttgggatgcagcaggattgtttctgtgcatttcccaccctgtcatgagggacatgactgcttcacgggggacattcttcagtgacactttgtgtttgtttttactgcaagtgcatggtggtgaaggatgcagttactactgatttggtgttgtcccactgctgggatttgtgcttacttttgcacaatcagagcaaatgtctacattgtaaagaggacaaataatgtcccagttcaactatgaaaacagttttgtcattgcagatcctctgaaaggatcttggagactcctaaagatccactttttggagatcactctttgcgaactgctattttagaaacaatcctcctgctacaaagactaaatatttggctcacacgtgtaatcccagcactttgggaggctgaggcgggtggataacttgaggtcaggagtttgagaccagcctggctaacatggtgaaaccccgtctctactaaaaatacaaaaattagccgggtgtggtggcacgcacctgtaattccagctacttgagagactgagacaggagaatcacttgaacccaggaggcagaggttgcagtgagctgggatggcaccactgcactccaacctgggcgacagagcgagattccgtctcaaaaaaaaaaaaaagactaaatactaatattttcctagacattcatttataggaaaaaaagaggaactattttgaaaaactccaacaaaaaaaaccaaaaaacctcagttaccttagttgtcaatgtgtaagcctctagaacaaactccatcttttaaagttttgaacagtatcttgggaatgcagtaataacagtgacaatagtgtgtgtttgttgcagtgtttactactgcgggatgactgtgctttgtattttaaatgcatcctctacaatattctttagtaccacacttttttttttttttttgaaggagtttcactcttgttgcccaggctggagtgcagtggcgagatctcgactcaccgcaacctccgcctcctgggttcaagcaattctcctgcctcagtctcccgagcagctgggattacaggcacgtgcccccactcctggctaattttttttgtagttttattagagacagggtttctccatgttggtcatgctggtctcgaactcccgacctcaggtgatccacctacctccgcctctcaaaatgttgggattacaggcgtgagccaccacgcccggcctagtaccacattctgtagatgagaagactgggacacagagagatgagagtgtgacaaggtcaacagtcatatgcagtgactaaggctctgaatccacgtggtctgattcccagagccttgatccttaaatcctgcataatatgctgcatcacatccaagcttcacatttacttacttcttttctgccgtgcacgtgtatcgattcaaatcctcaaagggaaacccaatgtctcatctcaaccacagggccccaaaaaagggctcagtaaacgtcttctgcatgagggacagaacctttaaaccatgattagtaatggggctagaagtgaaatactcaaacagccagctccctcaatattattaactcattaaggagggaaccaataaaaaagaaaaaaaacaaaaacaaaaacgcttgttccttgaaagctttgaaaaattgtgtgtgtgtgtgtgtgtgtgtgtatacatacacgtatctattttacttgtttgctaaatagacacagatatagtcgggtagttaacaaacatgtaggttgtataaaaataaaactagtttatcttctttggggcaataaaatcccaatacctttgaggttgactcaggccttatccatttctgcaggttaagaagttacaattcttcaggtctgtaaactggtcaggccgttatcattgtccttcgttaatccactgtacctagacaacagttacatccccaacccggacagccaagggggttctttaaagaatagaacgtcccccttttactaagtaggcttattagaaaatgctagaagttacccttaacgcaagcaagtggcctttttccaagttggggatttaagaaatttacttatctattttttgtatttttccaaggtggttttgtgtgtgtgtgtgactttgttgttgttttggtttggttttttgcctttttccaagtttgggattttttttctttctcaaaaagcgaacctgttttctggatggaggcccagcgggacttgttccggccgcaggtctcggtcagaaagaacgcttttgcagcggcagaaagggagactcgggatccgggcctggggtcccgcggccgcgcccctccccactccccgcgacccgctggaacgcgcacggccggggacggcggcggggacgcgcgcgggcaggcggcgcgcacggccggataggcgcgagggggccgcgtgaggcggtgccggcgttctggcccccaaagccggtctagcgcgccgggcgtcttccttacttccgctgccgccgccgccacatcccgggacccgacgggccgcggcgcggaggcctcggggcaaggtggggcgggcctcccgagctcccaggaccccgcgcgcttcgcccacaggcccggcgaagcccgacccgcgcggcgcccccagggccaggggaggagcctaaggacccggacgagcgccgctccagtagggtgagctcggggacgcgcaggcgggtgggtttcagcgcctgggcccctctccccgccgcggggcgcacggaaaaaccggggaacccgcgggttttgtcctggcgagccacatcccggtgtgttttggcgacttgaagacctccctagttcgcgggagtagcgggaagagccttcctcgcgttaattatgcaataagaaggcgtccttgtgcgggatgctgtgacccgcggaattattgatattgtgcgagcctacaatttacttctttcatccttggctgagaatttgcgtttgtaattgtagatggagagaggaagaaagggttcagcttgggtccaaggagcatgcagaggaaggcagggaagaaggagcatgtgcagcttcggtgcgaggggagtcaggggtgggaatgcacgttccctgcctgaggggccccggggtgccctgagcctctgatcttcgctgtcaggaggcctgtccgaagttggaggttgaggcatgcagttctgcacttctggctgggaaggtgaaccaggttttccaaaatgtcatttttgctttccaagtctgcaaggcaggaaagggttgggcagtgaatggaaagtagtgcagccaggttctggttagctcagcggcaggactgtcataacggtgggtttttgttgttgttgttgttgttgttgttttgtctgaaaaccagagtctggggctttgggccatgaggagttgggttattgcattgcttagagtgccagagtgagaaatgtctcagacgctgttaaaattaggcagctcagtttagctctggctctctgataaccaaccacctcctccttcactcttttcagtgactgggttaaaatgaaaagacacaaagagagaagtggtcttttcccttccctccccattataattaagagcttagtccatcttggctcagaattggaattcagaattcagaattgctcttgaccctgaagaatagaatctcaaagaaatacctgagcagaaaattctcttcttcgctgaaatgaaa

SEQ ID NO: 8428 - DNA, 6000 bp, Homo sapiens
cctctagttccttgttgtgtgttttctcccctcttgcctttgggtgtccctagaaacttcttaattagtctgcatcttgcatctcaattgtaattcactgttattatactggaaccttgttaatatttttgtaaggtgttgggtaggggaaaggttctataatcttatgattaaatttcagtgttttagtgggcttaagtgtctggggtttaacctttaaaaacatttttagctttttttcttccttcatatgaaacaaagatagaggagactcgagttaccaagtttcccttttccaagtaacgtaagattctggctagtagtttccctcacatggttcacctttgttacagagaatgctcttggtgtatttcaataaggttaattttcccctggatgtattgttaaatgcttacttttcttttccttctgctgggaacctgacggaatttttctcagatcttcaacataagaacctggtggatcttctgtacgtaacatccattaaattgtgggggtatccctaaaactaactctctaagagtttctaactctcatgcctgccacatttaggtcaagtaattcatcaaaattacccctgaagtcatcctactagttactagtcccagcagcttctgctcccagtaagctgatcttgactgtaattctatatgctagtctgtctctccagatttccagtgatccccaattctcttaggtatctatgaaaagttgttggttttcagtttatctatctttttatgtgtgtttgttttaataatggaagtggcaacttcccaagctctttatatgttggcacagataccagaagccctctataatttttatatgaaaggaatcatagagcatgtgttccttttcatttggcttcttcactcagcataattatgttgagattcatccatgttgttatagaaattgagagttcattatttttattgctaattatactgaattgtatggctataccacaattgcttatccattcacctgtcgatgaatatttggattttccattgtggggttattacaaataaggcttgtatggatatctgtgtacaacaccttgtttacatatatgttctcctatcttttgggtaaatatctcagagtgtaatagttgggtcacagggtaggtgtgcatttaactttgaactttttaagacattcctaagctctttttaaaaataattatgctattgcacatttccaccagcattattggcccaggtattagtccattctcgcactgcttataaagacatacccaagactgggtaatttttaaagaaaagaggtttaattgactcacagttcagcaagtctgaggaggcctcaggaaacttacaatcatggtggaaggggaagcaaacatgtccttctttacagggtgtagcagcaaggagaagtactgagcaagagggggaaaagccccttataaaaccatcagtactcttgagaactcactcactatcacgagaacagcatggaggtaaccacctccatgattcaattatgtcccacttggtccctcccacaacacatggggattaagggaactgcagttcaagatgagatttgcgtgggaacacaaagccaaaacatatcagttcatattcccaccaattcttgctacagtattttactcattaacaaatcaaatgacacatagttacatgcagtacaccataaatgagaatggtcatcttaataatatctagtctcccagttcacaatcacgttatatttcatttattttgaaatttttcccatttctgagcaatatttttcagtgtacaggtctctcttgggtctttgattttatctcatcccattcaccccaagtaagaactaagttagcctattacaatttcatgaatgccagcagaagacataggacgactggatcagagacaaaggattttatcactcatgacacagcgagcagcataaacatcagcatatttgcatgagttttccatgcctctacatctcatggaggttgtattagtccattcttgcattgctataaggaaatacctgagactgggtaatttataaagaaaagaggtttaattggctcacagttccacagactgtacaggaagcatggaggcatctgcttggcttctggacaggcctcagaaaacttacaatcatggtggaagcaaaggaggagctaggcatctcacgtggcaggagcaggagcaagagagaatgaaggggaggtgctgcacacttttaaacaaccagatctcacaagaactcccttactaactcactatcatgagaacagcaccaagaggatggggctaaaccattcgtgagaaaccactcccatgatccaataacctcccaccaggccccacctccaacactggggactacaattcgacatgaggtttcttggggacacagatccaaaccatgtcagcagtggacccatatgaacgctatacatcaaaattgaggaacactgagcttggggtattcatcattggtaggctttctgtttatttcattcccagggatgctataatcaattagccatagtcaaagatccctgcaggtcaaggcattctggtgactggtacactcctgctgaccttaaaagtaaatgtgtccaccttgtcttctgagtttaagtgctatgacctggcctctgataatctggaaatcttttcctcatataatcagagagcttatcttaaaggtggtatcctctatggctatacctggcctacaaaagagagcaatcgcaaatcttttcaaaactgcaagtgcatctctcactaatacattcctcagtgccttagtgcaggaagtgtcgtcttggcctcttcgtggaatatatttgagtattaggcttgcaagtcatacataataaatccactctgacattgtcatttttccaaaacttttggagtcctttatccacattttgccaggaaaactctggcatctgaacatcattaaatataggccatctttgagtctaaatttcaaccaactgactaaactactagagctgcctccagctgcacaagctaacatattacatcggtatatgttgtaaatgcatctatactagtgaattctgcctaatttagtgttatattattccctttttttgtctgacacccttagaaatctctcccccaggtttctaaagtttacattgattatatattagcagagacttccaaatcttttattattattatttttacacagagtctccctctgttgccaggctggagtgcagtggggcgatctcagctcactgcaacctctgcctcccgggttcaagctctcctgcctcagcctcccaagtagctgggactacaggcgcgcaccaccacgcccagctaaattttttgtatttttagtagagacagggtttcaccatgttggccaggatagtctcgatctcttgaccttgtgatctgcccaccctggcttcccaaagtcctgggattacaggtgtgagccaccgcgcctggccgtgacttccaattcttttggcgtgtatgagatgtcctcctaggttataatgtgtacctgtcaccagagcatgctaaaatttcaccctagctatgtatttagtagccacagtgagtggttttaatgggttaacatgagcagccctttcaaggcgcctttcccagatgagttactcacaaaatttcaagcacaaaaagactagtttcctcagctataggagagcaaactagttctcctgcaaaggagtctcagaataacttgggggttcacgattgacagtttcacctggattcaattatatgtcttaattctaagtatcagtattccacttctccctattcagtgccacctcccatgagaaactttgcaacactgaatttaacagatctcagaattagcaacctacacaagtaaattgagattttgagcaaaatctcagtaaaatgtcagagtcttcttgatcccacagtgaaagaggaataaataacaagttctaaagaaaagaggggctagtcactattgttaacatttattacttaccatgtgtcatgggctttgctaagtaatttaaaggcatcttttggtgtcatgcactcacttaattcctttcactgcactcagaataaaccccaaatctctgttatggccttctgggtcctaaatggtctgcactcctgctgacctctcagtttgatgaggaagtttcagccacacatatcttctttccactcttctcagcttacatgtcacctcctccaaactgcttttctaaagtagctcactccccacctcattactttccacatcaagaccgtgcttctttatattatcaccatattattttacttattttatgctttttcattgcatgtttagtatttttatttatgtttatttactgcgtgcttattatttttactccatgagactgtaatctcaactcaggcatagaccatctatggtttgttcacattgcactgcaccagaaaggatcttaagaagcatgtgtagaattctcacacctctagaagttggactacattatttcctactgctttttaaataggcaaacgaaagcttggagagccacgttaacgtatcctaggtctgtcacaaccaactggtggccagggtctgtggatcttcaagctggagttggtcacctcctagcacaactccataggaggaagtgaagctcaatacaattccctcctgtcctccaacgataggggcagcagggtctgtacccagaggaaacaaagagcatcatcattatcatcacaaactggtgtgtgcttaccgtattgatgatgtgcccagtccccaccttgcctgagaccagaactcccagccagcaccggccacgcacccgcggagctgccaggtagcacccgccccctctctctgcgcaggcgcgcgcctcctgcttccgctcggggcggggctgggctcccggggtaggtccgcggctgctgctgcgtccgacccccggccggcgcgggtatggagcttgggggtcactgggacatgaactcggccccgaggctggtctcggagaccgcagagcggaaacaggagcagaagacaggaaccgaggcggaggctgccgactccggtgccgtcggagcccgccgcttcctgctctgtctctacttggtgggcttcttggtgagtgcgagcgtgggggctgggagcaagtgctgactgtgttcgggcctggggacccaggcggttcttggagcttccggggagctcccagggagtgggaacccgcagtccgcctggtgagtgcctcactacctatcaagctctcctcttgccctatcacccacttcagtctgcatctggccacactgctttattgcccctcgcgctttctcttgcaccccgttcgcggaacgtcttcccttccctgccttttgagaagccctggtaccaacctcaggtgtgaccaggtgttaaatgctgtggcaggtgcagcttttgcagggcggagaacaggggtgtgggcaagcttggaaaagcccagctgctgtgcggctgctggtgaggtagggacacgcaagcctttttaccagaacaggcaggggaggccgctcttgaccccgcttggacagatttaggcacattttcactaggattcttggttgacttaaatattaaaaaatgcagatcagagtgaattttacccatctgcctttcgacaaactgcgcattgcacagcgtaggtttggtttcatcatgatgtgtgtgcctgtggtttgcttttttaccagaccaggctggagaagccgctgttgatgaccccacttgtacagaattgggtgcattttcactagagctctcggttgacttgaatgtttaaaaatgcagatcagagtgaattgtacccatctacctttggacaaagggtgtgcattgcacaatggcggtttggtttcatcgtgtgtgtgtgtgtgtgtgtgtgcgcgcgcg

SEQ ID NO: 8429 - DNA, 6000 bp, Homo sapiens
agggttaagaagcaccaaagggagaagagagattctgaagaagcaaaaatgaaagaagtgatgcccagagatcagaagctgtcagctgcagatcagctgagaagaggggccttgataacaggggtcaacttctgaaaagatgttgcctccctggggctgctgagtccagaatcaccccatcctcactgcagcaagtgccagcaactatcagcagccactagccatggccacgctagaagaactgacacagaagcatctctcctctccccattgatcttcctccggggccctttcttggcagagcataatgcgaagcctggaagatgcagtgacacaagctaggcccagcagtgttcagagtagagtgcaaagatgaagatggaggctgacactgctagtgagtagccaggaaagaaagtaacccttgatgagggtgtgattgatgcctagtttatactaacccttatggccttcctttccaacattatttacaccttcacttcttttttttttttttttttttttttttgtgatggagtctcactctaccaacatggctggagtgcagtgatgcgatctcggctcactgcaacctctgcctcccagattcaagtgattctcctgcctcagcctccctagcaactgggattacaggtgcccaccaccatgcccagctaatttttgtatttttagtagagatggggtttcaccatgttggccaggctggtctcgaactcctgacctcagatgatccacctgcctcagcctcccaaagtgttgggattgcaggtgtgagccaccacgcctggccaatataccttcgtttcttgttctctgctcctcctgccagagatccccactatttcctatggcaacctttcactccccagcatccttgcctttgctatttccttagggatgcccctgcccaagatgtatgagtccaaatcctatactacatcctttcaaattcagctcacgtaggtcctgctctgcaaagctttctctctctcactgttctcatctgcaagcagaagtatgctagttaaaagaaaaaaaaaaaaaaagaatccctggtatgtagcaattgcgttatttccatggtgcaaataatcccagaggaacagttgctaactgtcagctcttgtgagcctgtcagctggtcccggcatggcaaaccacagtccatgacctggaagcataccttcctgttgtgaaattccttagccattcatgcgaccctgtcccacagtgaccactcaccacattttgctatgagtgatagtcatttctgtgcaagtctgcactcaactccagaaaagcatcctcacacagggaaaatcatggcttaaaattccagccctacactcccagctctgtgactggtaaccctgttacttaccaagccaagtaactggtaaccctgccacctaccaagtgttgggacacttatcaaatgttcagagcctcagtttcctcatctattaatgacagcagcaatgtaaatcagtacagcccttaaggaagaccgtatagaagttcccaaaaaaattaaacacacaactaccttatgagccaaaaattccacttctgggtaatgtacccaaaagaactgaaagtggggtcttaaagagatatttgtacacctgtgttcacagcagcattattcacaatacccaaaaggtggaagcaaactagttttagctattccaccatctatacatatattaaaacctcatatgatacatcataaatatatacaatttttgttgatttaaaaattaatttaaaatttttttttttttttttttttttaaagagcagcaacaatggcaaccctgccccacagggctgttgcaagaattaaatgagtgtgttagtagttttcacactgctataaagaactgctggagactagctaatttataaaggaaagaggtttaatggactcacagttccgcatggctggggaggcctcaggaaacttacaatcatggcagagggtgaaggggaagcaaggaccttcctcatatggcggcaggggagaggagagaaatgccgtgaaggagaaacttccaaacacttttaaaaccggccgggtgtggtggctcacacctgtaatcccagcacattgggaggccaaggcgggtggattacctgaggtcaggagttcaagaccagcctgaccaacatggtgaaaccccatctctactaaaaatacaaaaattagccaggcgtggtggcgggcgcctgtaatcccagctacttgggaggctgaggcaggatgatcacttgaacccgggaggcagaggttgcagtaagctgagattgtgccattgcactccagcctgggcaacagagtgagaccccgtctcaaaaaaaaaaatgccattggctgtcatgagaactcccttaccatcatgagaacagcatagggaaaaccacctccatgatccaatcacctctcatcaggtccttcccttgacatgtggggattacaatttgggtggggacatagagccaaaccatatcaatgaggtaacaatgaaagtgcattgcataacagtccctggcacattgtagaggtttataaatgttaattttctccactccttaggctttaaacactttagaagtcatattacaattcattttttaattaccctgagtgtcaaaaacactacctttgtaacttgttcaaaaatatgtaatcgctcaaaaatattgttgttaacctatccactggaaatatgagggggttgacagtaaggggagggagcagggagggatgagcccagaacctgcgggggaagtggggatgggctgggaagaaacaagggggtctgggaagaaacaagagaggcaaggagcacagggaaatggtgctgcctacgcccaagatccccggaggagcttggagggtctctttggcatctccctccctcaggccttcttacctccactgggtgcacacttactattgcttactttttaattctggctgcggctgagcaagacaccagtgtcctgggacaccaaccgccttctgggtggcaataatgacagcagcagctatttcaactgcagctgctaacggtatttccatatacttaatcccacagggcagaagttggcagtagtgtccagcagcagaaaaaaatgctaactgggaatgctgggcttaaggagtttagtacagaaatggcaaataccccacaatttctgacctttgtcgtctaataggatacctatcaactaaaccctacctaaaacctaaaatgcttgaaatccgcctagaagcttcagtctgattttgcccataggtcaaatgttaatgaactattattttcttccatttctgctcctcatctttaatctaaaaaccacggagtcatggaatgggaaaggcctagagctccacttgctctagttctcttttcaaaaaccatagccagaaagccacgaggaaatgcagacttacaaacaaaatcgatttgttccaaactggtgtgctctgggggcctggcccctctgggaacccaggactcaggctcccatgccaggtgttttgtcacttggcagcctccttggacacgtcagagtcagggagctgggcttctcgaaagaagtccactccatctatgggcagcatgcatagcaggggcaatccgccttagcaaaccgctcagtgtttcctcctagtcagggattctcaacaggtttaggggaggggtaggatggaggtaggttttatcagaatcacatcatttgcactatagtttgaaagatgtaacataaagctgctgctttagtaccagctgccatatttccttttcttggaggtttctaataaatctaaaggagggtgatctattaagttttgcaaaatggcctgaggttccaagaggtaggagagccgctgctgacttcaacttctccgtatagctgaagatgacctcttgaagcctgcagatcccaaatccgggatctctcttaatgtggcatcacacacatctgtgtgtacctgtctttttttcctccatgggaccagctctctccagatccaatgacaagcttccgattatctgtggatcttctgatacatctccttgcttgtaatcatcattcagtaaatgctttttaaacacaggtacctcctatgcaatcagtacagcactcataaaacagatatactcaacaaaaagattgaatgaaacacacacgacaacatggtcagggtttttctctaggcagagacagcgcaatttcatcttttcttttccaagtctatcctaaattaatatacttagcactgctttttaaaataataataaaagactattattaaaacaaaggcaccccagttgatcatagccaaggaaaaaaaacgcagccagtttttacttcggcaaggtttaggggatttatcattttcgctgccgatattctaactaaaaaaagccaactaaacagcccagagaacgaggcaactttctgaggcaggcattcaacttctaaggctcggccaagtttagcaaataagtttcgtttcactgcaacaccggaatgcccaccgcgtgcccccctccgggcggggctcggaaactggccactgcagtcgtgcccttgggttggggacgcacctcagcgaaacgaatccagccgcacctcccggctggcacccgcgcgctttaactcagggaaaacagaccggaacgcgcatgcgccgcggcgcgccgcaccgcccaccagccctccaggtcacattcttcgaaaaccaaggcaagaaaggcggcaactgcgcctgcgggtagagaagccggaggggcgggggcggagccggaggaagggggtggaggcgcgcctgcgcggtgatcccgccagcaggaagcaggcgcgcgggggcgggggcgcgcggcggcaggaggcggggctctcggggccgctgccgccgccgccgccgcgcattgtgcagcaggcgggcccccgcgcggtagggccctggacccgcgcggctcccggggatggtgagcaaggcgctgctgcgcctcgtgtctgccgtcaaccgcaggaggatgaagctgctgctgggcatcgccttgctggcctacgtcgcctgtgagtgcgcgcccgctgccagctggggagccccattcattccccggcgccgcggtgggccgggcggcggtggttcggggccccgaggcggccctgcagccccgcgttgctccccgccccgggcggggccggcgctttctgctcccacccctttccactcttgcagcaaagcgggccaacttgggcgcacaccccctaccgcttaggcccgggcgcggaccccgggcggaggggcccctagcagtcctcgggcggccccaggtctctgcctcctgcccgggcgcgggggactcggcggcggcgctgtcgtccatgtcgcgctgggagccggcgagggtcccggtcggggactccggagcgtgccgcgtggggatacccttggggacagccgaggtcgcgccgcggtgtcggttaagtcggataaaaatactgtggccattggcagagcccccgctccgactgtttgctcctcaggaaaattactcagcgtttaactcttggggagccaagtgtgggcggctccccggcccgcggccgtgcccaggtgtcggggcgcaccggcatccccattctaggttttcccccggggctcggcggccgggcgaagcaggcaggcagctgggtggccgggcagggcgtgcctgcagcttctctgtgcgcgggtccagtttctgtcatcgctcacagcatgctgcctggagacagggcaggaggggcacttcgcaggcaggtggtcggccctctgcttgttagggaagtcagaaaccgtccttttaaagatctattcgttgggaatgttttaattgatgctattaatacgttaccaagtagcaaaattggactagaaatagctcccagtgtgagctgcgtttgaatgctagc

SEQ ID NO: 8430 - DNA, 6000 bp, Homo sapiens; identical to SEQ ID NO: 895

SEQ ID NO: 8431 - DNA, 6000 bp, Homo sapiens
cagacagaggggtggccagtccagccagcagagagtggagcagagtgggagctggtcccgagccccaacgatcaggcaaggctgcctggagggcactgaccatgcccttctaggcatcagggcccaggactgaggccaccttcttccacctgtgccccggcccctggtggcttaggcagctggggtgggagcagcaagcaccccatggttgagtgacttttctcggactagaacatttcaccctcaaaagagccgccatccaccccaccccacccccagggaacatccccaacagtggagcttgtcaagctgctcagtgccctctctggtggctcccccgacccggccgagtcggaacccctctgggcagtgaatgacagccatctgggaggagacccactggccaccggaagctgcgagcagtcaccccccaccccatccaggctgtgatcccgcctccaccctagtcgtctaaagacatgtcccttgggaagtttcaagcagaagaaccaggacgatgcccttggggcaacgttaccaggtccctgtcctgcctcccaagctggcagaacccgccaggcctgcccacagtcccgctgcccggggaggagggtgggctccactggacagactccgaatcccggccaggcagcagtccaagccccccacttgccaacaaccccacgtcacacgcgagggcagggggccagccagggggaggtcaccgagccagcagggcggggggggcgggcaagggccggggaagcccaggaccacgctgcccctacgaattgctcaggttctcctcttctgtttatcctaccctcttcccctaaggactgaagcgggcctggagggcctagagaaagggcacaaagaacagcgaggccctgggcgggcgtggagggaggggaatggcccttccgaagccccgggcctcttccagcgcggtcctcgaaccgaaccgcaggacccctgctgtccccgggcagcggccggagcgcgtccctcgggtcctgggaagacctgccgcgtctgcgggctgcctgggagcccaggcgccccgcggtgctgggggaggagcccggcacggggccgctgggcggcaaaggggccgcgggctccctggaggaggcggctgcggacggggcctggcgacctcggagaaggtggcgtccacggcgcgcagcccggcgccccaagcctgccgccgggtcggggtcggggccggggccgggccccgcgggtccgcgcgagccggagtcccctctaaaagtttgtccccaaacgaaacccctctctctgccccgcgtgggcagcggggccagccccacgggaggctctgaggacagacacgactgccctcctccaccccttggcaaacaacaatgggcggccgccggacgaacgacgagggaagcgagtgtggaaaatcccccaattttttgcaaagtcaaccgcgggcgctcgggggccgggccgcgtgctgcccccgcgcggccgtccgcgggactgtgcgccgggagggggcgccgctgttgatctcgtggttctcagactctgagaccgcacggtgggccgggaatgaggcttcattcctgaagccgaatgttaatgcctcttctgggatcatcacagcctgccactaagccgtgttcttttacttttctttgccattaagtcagagatcacgcattaaagaattggtgaagtggatcttcaggggacaaagccactgagcagaagagctgccagtgcttttccttggaccccacaagcagtcagggccagaagctgcccctagcaaacacttagctcatatgcactctcggggctggggcaaaccttggccacgcaggagatcacccagggaagaaaggaaacagcgcgcagagcgcgcctcctgagaccctggctgtgtccgctgacctcctggaaccccacgccagccccagactgtgcgtttctatccattttccaagacatgacactgaggactcatcgcggggagtagcgggaagtggtggggagtagcgtgatgcaagctgccccgccaacgagggctcgagctgccttccactcggctcaagtgtccactgattgatgggtggctcatctgacttgactttcagagcccagaaactcacctacagccttagggtctcaggtgcctgtgcagggcttcaatcaaagtggaagactgagcaaagtcctgtagccagccaggcagatttccctcctcttaaaagaattctagaaagaaagggcttcctggctaatgtgagtgcttcccatcagccagtgtggcaggtatgaagttggattaaatagcttgttctgggagatgttgctccatgggtcaggctgctctggctcccattcaagggtgggaccttatcacaggcacttcgtccctgcctgggcctcagtttcccccttgggacagtgagatcatcacagggtggagccatggcccaagtaccgatggcttcgttggccttcggagctgctccagctttcccttgaacactctgggcccacgttcccccttggtggcagtgacggtcaccaggctctcaggagtggcccctgtagacgctctcatccctggcctagggagctggggcaagtgcagaggtggggaaggggagggttctggggctcacagcaggaatcaggatcccagctctgctgactctcatggggtgagagtggttgaccttggaaccagggtcttaacccctttgaacctcagttttctcttctgtaaatggatatcacagcctacccccgcagatttgctgatggaattggaaatgacacctctacaatgcctggcacccagcaggtctccaaaagagcagccttaattatgatgtagcacgaggatccttatctgggtaaggacatctggggggtggacccggggcagctgtgctcccctaggccacacaggaaggctccccagggctcaggcacagactgcgtcaaggggctgcaggcaggtccaagcacactgcagggcggccccacctgtgtcccatggggactgcacccccactcctataggaatgagtcacttctggagaagcttgtccaagctgcccccaggaccctcgggccagggacagttttaaagcagcctacaagatgagcaggggctttggggccctaggtcccactgaggaccccacaccatggactccagggtgcgctgggctgtgttgagggttctgcacccgcctgtccacagcggatattcttgcggtccctttggaaaatgcatgccgcccgctcagctgggtttggggtgttggtttttccagctctctgggtttgcttccaggagggctttctggtgtgatgttgtctacgtttaacagctttactgaggcataattgacaccccatgatcgcttccggtccctaacagaacggaaggcagggcaccaccccgcctccccccccaccccgtccccggcagggcttgacgtggacactgggagcccacgcctggcagccagactcgctcccagagccctcgctggcctgaaccaacacactagggcccaccgcggccggccctgcagctgtgagatcctggcaggtcccagccccactcctgcgcttccgacgggctgcagcctccgagtactgccagagcccaagcagtgtgagtgggcacctggcgggaccccccgccccacgaatgccgcgcgtgcttgccaggctgggcggcggcgagtgaggagcccgcaccacccggcccacacacgagccaacgtggagcgagccctccgcagccaggttgggcccgggccgctggactctccaaccaacccacgaaagacagaatatttggtgggcactcacgattcttaagaattggctcaatgttttataactctttcattggagtataataaacatggatgggggaaaatgcacctcgtctgatattcttttcaaacaaggaggaagccataaagccgctccgcaggcctctgcagacagcccaacatctcttcaatgcggggctgcggggcactgtcccaaagccagccgcaggggtgagggggtcgagcaggaaaggaaagcctcgctttccctctcggtcctggtggtgggcggcccccgccgccctggtccctggaagtgcagcccagtaggctagcgtctaacttcagcgccccagcgtgcaaggtcaaggcctttcctcccgcgcgggctgcggggacgtgggcggctgggacttggggaggagggggtacggacccaggctccagaagcgccagccgccgcgccccctcaccgcggcccccgccaggagagcctcccacgcctcggctccgcactgccggttggtcccccactcccctgagggcggaatcacttcccagtcgctggctgcccgcctgctagcggcctcgccaccgcagcagacccaggtcccgcgcccagcacccgcggcgaaccccggcactccggaggcggggccgaggatcggcgcgggcggcgacggcaagagacgccacgggggcgggccaggggcggaccggggcggggcggcggcggcggactgcggagacgcggcggcgcgcggggcggcgcagagcgttctcggcgcggagtggagcggagcgggctggtgctgggggcgcggagagcgctgtgctggccggggccgggagcggggccgagcgggagcggagtcgggcgtcgggcccggggagccggggccgggcggggagcagccatggcaccgcggagggtcggggcccgcgccgctgcgggcggcctgggcgccgagtagccgggccgggccggagcgcgggcggcggcggaggcagctgcgcccgcgcctcctgccctcccaggccccgcgccccgcgcccgggccccggcgatggtgacacatgcggcggcggcgcgccggcggcaggaccatggttgagcgcgccagcaagttcgtgctggtggtggcgggctcggtgtgcttcatgctcatcttgtaccagtacgcgggcccaggactgagcctgggcgcgcccggcggccgcgcgccgcccgacgacctggacctgttccccacacccgacccccactacgagaagaagtactacttcccggtccgcgagctggagcgctcgctgcgcttcgacatgaagggcgacgacgtgatcgtcttcctgcacatccagaagacgggcggcaccaccttcggccgccacctcgtgcagaacgtacgcctcgaggtgccgtgcgactgccggcccggccagaagaagtgcacctgctaccggcccaaccgccgcgagacttggctcttctcccgcttctccaccggctggagctgcgggctgcacgccgactggaccgagctcaccaactgcgtgcccggcgtgctggaccgccgcgactccgccgcgctgcgcacgcccaggtgagcgcccgggcggcgggatcctcgcgcagctgcgcccccgaggccgggccgtatgcccgccgtgctgtactgggtcggccctgccttccctacccccttctgccctcttgggggcccccactcgccggcacccctcccgacctgccgagcgcccgaggctcccagctcctctgggtgagccggctgtcaccgcgctttctgacctcgctctcactctcttccttgccttgtgctgccctactgccggcttgactgcgcagcgcccgggttttctccagggtccccgcccgctgccctcgggccaccttacctgctgtgcgccgtgaggtctggcccgccggacttggggacgcgggcttctgggtgtgtgcgtggcctacctggagtgttggcttccccgtgccgcttcggtgctgtggtcccaaaagtggaagtgagagtagtgaggtgccgcccctgtgcctggagtgcctgccttcagagggtgggggagctgccagggaagggggctggctctgcccgcctgcctgccggtgtgtgcaggtagaacaaag

SEQ ID NO: 8432 - DNA, 6000 bp, Homo sapiens
actttggaacacactgtgaagctaactgatctaaacttgaattacctatttatttatttatttatttatttatcttttgagagagtcttgctctgttgcccagactggagtgcagtagcatgatctcagctcgccgcaacttccgccttctgggtttaaatgattctcttatctcagcctccagagtagctgggattacaggtgcccgccaccactcccagctaatttttgtatttttagtagagatggtgtttcaccatgttggccaggctggtctcaaactcctgacctcaggtgatccacccacctcagcctcccaaagtgctgggattacaggcatgagctactgcgctcagcctggattaccttttaaaatttggcttaccacctgaactaatttgctacagaaaactagagagcttatactgtgctgatgagatatgatgcttcctatgaaggtatgttaacacatagagtgagtgcttgaaagtgtccaatctaacttcaggggtagatttgaaagggcaattttttaaaaagtgtccagtcccccttagtggcttcagtgtttatactgtggagccttgccagacttcttaggatcaaatcacagtttcctgagttcctttctatgggcttggctaggagctcttctcatttgtggacagttttgactaacctgtaattatatcgtgggcttaaaatctgtcatcaagattttaagccagatggcatgttctacctttttttttattagctcagagtgaaaaatttttcagatgaattttcatagattcttctcctaactctatgaaatggtggtatatgaaaaagttcagtggtcataattaaaaattgctgaatgatattaagtatgaaacagacttccaattaattagaagattttgcagagttgtttaaccttaaaattcaagcattacttccttttttgaagttgtatttacaagcatttgatgtaatatatttaagtatttcttaattttccacaaggggtttatggtatgaaaaggtcagcatcctactaggaacagggtttagcagagcactgatagtgatttttaaagtgtggtccttttcctaggagtttctagttgggaaatgaaagaaaatgttgatagcaaacactcggaagaagggtcaagtcttgtatatctggacattggtataatactgcttgaaacctgaggacaaatatttgtgtttcacaggatcatgttctaattgagctcacccaggctggattgaaaggctccacagagggaagtgagagctatgaagaagatccctacttggtagttaaccctaactacttgctcgaagattgagatagtgaaagtaactgaccagagctgaggaactgtggcacagcacctcgtggcctggagcctggctggagctctgctagggacagaagtgtttctggaagtgatgcttccaggatttgttttcagaaacaagaattgagttgatggtcctatgtgtcacattcatcacaggtttcataccaacacaggcttcagcacttcctttggtgtgtttcctgtcccagtgaagttggaaccaaataatgtgtagtctctataaccaatacctttgttttcatgtgtaagaaaaggcccattacttttaaggtatgtgctgtcctattgagcaaataactttttttcaattgccagctactgcttttattcatcaaaataaaataacttgttctgaagttgtctattggatttctttctactgtaccctgattattacttccatctacttctgaatgtgagactttccctttttgcttaacctggagtgaagaggtagaactgtggtattatggatgaggtttctatgagaaggagtcattagagaactcatatgaaagctagaggccttagagatgactttccaaggttaattccagttgtttttttttttttttaagtttataaaagtttattatacttttttaaaattactctttagtaatttattttacttctgtgtcctaagggtaatttctcaggattgttttcaaattgcttttttaggggaaataggtcatttgctatattacaagcaatccccaaattttatggtcttccaggaaaagttattaccgtttatgatactaacagttcctgagacttagctatgatcagtatgttcatgaggtggagcagttcctgtgttgcagcttttaacaacagatggcattcattaaatcacaaagtatgttaaaggtcacaaaagcaaaataactgtctgaggctaaggcccacgtgggacagtctaatacccatgagtactcaacttgccttgatgtctgagctttccagtgcaatgtgaatttgagcagccagaaatctattagtagaaagcaagacagattaatataggttaaaacaatgatttaaatatgtttctcccaataattatctctttccctggaatcaacttgtatgaaaccttgtcaaaatgtactccacaagtatgtacaattaagtattttaaaaataaatggcaaacattaaaaacaagagtgaatactcaagtagatttgtcatgggatttttataagaagactggtatcaggtaatgtatctttaaagactaggctgctctgctgacgtagtaaccattttttattcctttactttcctaatagccttgctttcacttaagaaaaaaaaaggctaggcacggtggctcacgcctgtaatcccagcactttgggaggccaaggtgagtagatcacctgaggtcaggagttcgagacaagcctggccaacgtggagaaaacctgtctctactaaaagtacaaaaattagccaggcatggtggtgggcacctgtaatcccagctactcaggaggttgaggcaggagaattgcttgaacccaagaggtggaagttgcagtgagctgagatcatgccactgccctccagcttgggcggcaacaacaacaacaaaaaaagattcccaggcttcaccctctacagtctatggaaagtcatgggagtctattaaaaaaaaacagacactataaaccaaattaaaagatgggaaaatttttctatcacgttttaatatgtgatatccaaactcccattaagaatttttatatcagtaataagataaaactcagaagaaaaatgcccaattaacaagaagagcttcacctcttaaataatcagaaaaagaaaagcacataatatttacgtcaaagtatcaaaaatgtaaaagttttataataggcattagcaaggcagacggatacaggcacacatctaactctatgtaggatttaacttggaagacaatttgcatttcaatcaatcaaaaaccatttttttttttgagatgatctccctgtgttgcccagactggcctcaagctcctgggcttgagcagtcctacagtctgagcctccaaaagtactggcaaaacaggcgtgattgaccatgcccagcctgtatataaggatattcatttgcagcattgtttgcaacacaaaaatgtaaaaccaaccggtgtttaatatgcaagatgttaatttatggtacattcttgctgtggaaagctatgcatctgttagaggtgggtctatatgttctgatacaggcagaactctaagagctattaagtgaagaaaaggctgaaaatacatatggcataattccatatatgttaaattgttctatattttaaatgttatacacgtttccatttgtatttacgtaataataatgatccctgagctgtactgttgtatacatgctacaagaaagacccatttaatccccacagcctatgatgaattatccacattctacaggtgacaaaatagaggcacaaagttaagtaatttttgtcaggtgagatttaaacccaggcattctgactcctgtataaccattaagatatgcagagaaagaaaactggaaagatacatattgctgaagatacttattataggaagaggaggggggagggtgaaggaatttgcaagtttttcatagatgtttccatattgtttgaatctcttacaaaatatgttcagcatatttttaaagagaaaatttggggcaaaatacttatttttgtattatgtaaacaaattttaaaataatgtgtggctgggtgcgctggctcacacctgtaatcccaacactttaggaggctgaggcaagaggattgcttgagcccaggagttcaagaccagcctgggtgacatggcaaaactccatctctactaaaaatacaaaaaattagccagtcgtggtggcgcacacctatggtcccacctacccaggatgctgagatgggaggatcacttgagcccaggaagtcaaggctgcaggaagctgtgatcgcaccactgcactcccacctgggcaacagagtgagacccggtcaccaaaaaacaaaaaaaacaaaaaaaattggtaatcgttttcttcagacattttccgggttcctctgcttaacttgtataggaagtctgaggtttttgtgttggtctttaccttttttttttttttttttttttaagatggagtctcattctgttgcccaggctggagtgcagtggcatgatcttggctcctgcaacctccgcctcctgggttcaagtgattctcctgcctcagcctcctgagtagccgggactacaggcgcatgccacgatgcctggctaattttttgtatttttagtagagatggggtttcaccatgttagctaggacggtctcgatctcctgacctcgtgatccgcccacctcggcctcccaaagtgctggaattacaggtgtgagccaccacgcccggccctgatctttacatttttaaatattgcattagtgaaccgtgtactgattttgtgatcatagataacccagttaaatattaagtcttaattatcacttagtattttacaacctcagttgcagttataaagtaagggttccacatacctcctaacagttcctagaaaatggagctgtcttggcatgtagtctttattgccctgctaagtttttcatgctgggggtcagactgggagtctgatagaaatttcatttccaccgctggtcctctaaccaatgacttgctgcacaacctgagtggtctcctgggagaccagagttctaactttgtagcaggggacaaagacatgtatgtttgtcaccagccactgcccactttcctgccagaatacttcagcagtctccatgccagtcagatcacccattataaggtatttctgtcatgggcacagctcctcccagcaggaagcacccagaatccagacgagaaaacagtgcagtgctaccggcgactcctcaaggccctcaagactgcacggcttcagcccatggtcatcctgcaccaccagaccctccctgccagcaccctccggagaaccgaagcctttgctgacctcttcgccgactatgccacattcgccttccactccttcggggacctagttgggatctggttcaccttcagtgacttggaggaagtgatcaaggagcttccccaccaggaatcaagagcgtcacaactccagaccctcagtgatgcccacagaaaagcctatgagatttaccacgaaagctatgcttttcagggtgagtacacattgacctgatggtgacccctcggcaaccttcatcacacaccttccccatcctccttagagcagattcgacatttctcccaactcaccttcagcagtcctcttatgtctgtgcatagggagaaattaatattgtaaattgatttcccactggcgataggaaggggtagctaacatggcaaaacactcagcatttcctttgaaaaatatctttgaggctcacgcctgtaatcctagcactttgggaggccgaggtgggcggatcacttgaagtcaggagttcgagaccagcctggccaatatggcaaaaccccgtctctactaaaaataccaaaattagc

SEQ ID NO: 8433 - DNA, 6000 bp, Homo sapiens; identical to SEQ ID NO: 3698

SEQ ID NO: 8434 - DNA, 6000 bp, Homo sapiens
cgcatgccacccactgcgcatggctaatttttttttttttttgtagagatgtagtcctgctttgttgctcagaatggtcttcatctcccggcttcttgggcaattctctcctcagcctcccaaagtgctggggttacaggcatgagccacaaccccctgctacttttgtccattttttatttgaattgtttattatagttgaattttttttttttttttttttgagacggagtctcgctctgtcacccaggcagcagtgcagtgacgtgatcttggctcactgcaagctttgccttccagcttcatgccattctcctgcctcagcctcccgagtagctgggaccacaggcgcctgccaccatgcccggctaattttttgtattttcagtagagacagggtttcaccatgttagccaggatggtttcaatctcctgaccttgtgatccacccgcctcggcctcccaaagtgctgggattacaagcgtgagccaccgagcctggcctattatagttgagttttaagagttatttgtatattttgtttacaagttctttgtcttcttattatcttaacagagtttttcacagagcagaaatttttaattttaattaaacccagaatatcaatttttattttcttgcatcatgcttttggtggtggtgtaaaatctcaacaccaaactcagactcatggagattttgtcttctgttttcccctagaggtttcgtagttttgcatttacacttaggtctgtaatccattttgagttaatttttctgtaagatctgaagattaaaaaaataataactttattgacatataattcacataccatacaattcacccactcaaagtatacaattaggcagggtgcagtggctcacacctgtaatcccagcactttgggtggccaaggtgggaggatggcttgagtccaggagttcaagaccagcctggacaacacaaggagactacaattctataaaaaataaaaaattagctaggcatggtagtgcccacctgtggtctcagctactcagaagactgaggtattgcttgagccggagatggagtctcactgtggtgcccaggctggagtacagtgacgtgtcacagctcactgcagcctcgacctcctgggcttaagcaatcctcccacctcagcttcttggttagctgggaccacagacacgcaccaccatgcctgtctaacatttttttcttttcctactcatgcttttggtgtcatgtctaagaatttattgccaaatctaaggtcatgaagatttacccttatcttctaatagttttatatttttaactcttttaagtctttgattaattttgagttaatttttgtatatgatataaggcagcaatccccagcctttttggcactagggattggtttcatggaagatcaattttctatgggacggggatggaggatggtttggggatgattcaagcacattacatttattgtgcactttatttctattattattacatactcaccataatgtagaatcagtgggagacttgagcttgttttcctgtaactagatggtctcatctgggggtgaggggagatagtgacagataatcaggcattagattctcataagaagcccacaacctagatcccgtgcatgtgcagttcacaatagagtttgcactcctatgagaatgtaatgccacccctgatctgacaagaggcggagctcaggccataatgctcacttgccccaccgctcactccctgctgtgtggcccagttcctaacaggccacagactggtactagtctgtggcctgggggttggggatccttgatgtaaggtcagggttcaacatcattttttccactctggtgtcagaggtagggacaatgatgcacctctctctgagtgacatcaccatgttagatgctgaatgtttctggcagaagcactcaaagcagtcccacgtttcctgacttctttctcgatgagccagaagcaaaggtgatcaaggcccaagtacactcagtgctgctgtggccaaggtacagcctccaggtacaactgggcagaagaagggagcccccacctctgccatacttgcttagaacttagtctcaacaacaggtagctgcggggaggatgacaaatgctgatgttttgtccctcctaggaagctgaccctccaactgggagctgaagggtgagggagccctgtgttcttggctgcaccagtatagcgtggagccctctctgagttggaagcatgaaaagagtgagtaggtcttggttcaaatacctcaagctcacttttcttactgggtttcagtaggttttcttgaataaatgttccttcatttgttgtgcacctttaggaccatttttagaaatttaaatggttgcttatatataaaacatataattttcaccagttttgctttgagctgggtgtacagggcttctcatgttgttatgcctctgtgggttctgtttcaataacttaaagtcagtgagaatgtggacagtggaaaaccacacaattcaaagtccagtgctcacatagtaatttaatatgcacacacgtatcaactatgaaaatggctcagaactaaatacggattgggttgacagtaactaaagtagggagtcctgcatggttagacctccattccccataaattcatggagtatctactatatggaaggtataggaatagaagataaaccgctaaaaattctgaaaattaggagattttcacaaaaacagaactaacaaactaataagctaaggcagcctattctaagtgcccagagaatacatgctccagtttttcagaagcacaagaattatgtgggactggagtagtcagataggatttctgtggaggaagcgtgagctgagtcccatttagaagaaaggtaggattcagccgggtgtgtaggttgttgggagggcatattccaaggaggcattccaaagcagaagagctcaaatgtgattgtatttggaatacttgggtattgatgactagacctgcctgcttgctggaaggtttgtatagagagatcaagatggagaaatgagatggagagtgatcagaaatgcaggagaggctgagttgttggaccatggagtttggactttatcttagagaagagtgacttgggcaagatattttaggaaaatggttttgcctgtagtgtgtagatggaatgaaatctctgcgtgtgtatgtgtgcatgtgcatacgtgcacatgcaccaggaagcctggaggcaaggacattagttataagattgttacagaggtttggattaagtgaagggattaggaatggaaaggaagtgtctggtggatggtaagatataaccaggacctcaataaagccaagcaattattaaaacaagcatggtagttgtgtccataaacataaagtcctagaatgcaagctgatttagcgatttgagatagtaagtatattttaatttaaacggagtctctttatttttgaatttgcatatacttttcttccctcttcttattcctctgtcaatacctcgcacttattcttcctttccgcaatccctctcttttaatttgatcacaaattaatctcttgtatgtatttacaggaggaaaccaatggcaaacgttgtgtatggttgcaaggatgagtttctcccccttgaaaatatccattcgcatagaaatgggaggcacagtgaccaactcttgcttcttagcaggtctaacatgaccttcaaaactccgtaggacatactggtctttggcggggcagcatctcccgtcagactcaggctggctgggtttctcacagctgcctggatgtgtgtgactcgcagctctaaggacagaattgccaaagcaatacaaaaacacggacgaaaagcaagccacaaaaccccatgccttacacattaggctgatgagtgaagtcgcggaaggtggctctgctcttgcccttttaaaattccagtgcagcaaacacacacacacacacccgctcggttcttcccattcccgccacactgcaccagcttccgtccccaagtcctgattcatgaaccgtgccacctttgtctcattttaaactgtgcagactattttaatcttgccacccccatcccagatttccccctcccttcatcctctggaagctctgatgtaaagcgcttgctaggtgggagagcgcttctcccaatccgctcgggtaggcgagtttccgagaagccccctccccgggaccccgccgcgagcgcgggggaagcgcctcggtccctttaaggtgccgcgctctccgaagtgcgggcagggagcctgggcgccggcgcgggtcctggagccgggtggggaagtcctgcgccctccccctccgtccgcagcccagcctcgggggccagccccctccgcccaccgcacacgggctggccatgcggcggctctgaacgatgtcctcctcctcctacgccaagaacgggaccgcggacgggccgcactcccccacctcgcaggtaccgccccctcctcccccttctcctcttcctcctcttccttcctcacacctcctccgccgccctagcgcgccccgccttcgtgccgggcgtgcggggccccagtcccgggagtcggcggccccgctccccccacccctcctccacgtccctttctcctcccgctcctcctctttctcctccttctcttcctcctcctcctcaccctccttcgggtctctgcgctcccgctccggagcccgcagcctcccccagcggatgccggggactcggaccccgcaccctgagagtctttgttaatggatgtggtgggtgcttgcgggctgctcttctcgagcatcttttcagcagtcgaggcttgcagtgggtgggtgggggtgggggctgtatttgggagtcgcggaggagacttgggtgcgggctctaggggaccccagggagcgggtccggaggcggactccagccgggggtggtcgccccgctctgcgctgcggtcctcaccggcttctctctggcccccgtgtgtcgagtccaggtggcccgaggcaccacaacccggaggagcaggttgaaaagatccgatggcagcaccacttcgaccagcttcatcctcagacaggtatgagaaggaggcgggagaccaggatggggaggaggccgagcgcgcggcgcgggggtcctggagccggccgtggcccacacgtgcgggagctgcgggtcaagcccgcgcgcgtctcttcccggcctcggccggtgctcgggctcagtccctctccctctagcctgggctcttgacgtcttcgcgtcccggcgtctccgcaccgccccgggaagttagtttgtgcatgtgtgtggacagttcggtggggacctggcttaagtcagggacgttgaatttaagagctggaaatatgtctggttgtatctttggtgcgtggagaaatgtctttaattcgtataactcgacctagagtaaccagacccctcggggccggggacctggtttgattcgagttgagatttagtggtttcttctgttttgtcctaatttgaatactcttatctgtctggatcttgggagagatcgtcaagctccggtcaaaagaaagacactgagcagaaagtttactctcactttaggaccgcttcttggattcgcttagttagggaaagacagctgtatctggttaaataggaattaacgaaggccagcactcagctccgggtctgggtgcgccttcacttcgtgtttgttttcttagtgcttgctttctcctgcgtggttctagtgcgaattgtctgtgctcgggatctccggatcgctggtaatgctcaatgcttaggtgcctttcaccttggcacaggaaattggtcctcagttttccaactgtccatgtgctgttaatgaaaccacccctggctgctgggtgctagagagatcatgcaatgagtcaccttgatctt

SEQ ID NO: 8435 - DNA, 6000 bp, Homo sapiens
tgcatagactacctcttaagactcaaacaacccgcattcacagagcattttgtatagatatatggataagtccacaggagaagctgccttttaaaacctatgcacatcctgactgcttccaggtggccccaatactactgtgtaccttcagcatggacccttcaacatgaagccatctctgccatatgcccaacatgctcaaagtactccccctaaacctgaaatagataaagttgcaaaaggaatatttaaaagtgcagttaatgatgtttctaggtgataagtgcaccaaatgaatgtgtctacttttatatctaaaagagtgttgaaattatcttactgagttatttcatgaaacactgatctagataatctatttaaagccccaattgaatttagtggcttaatcccttgaatgatattgcaatctacccatagcttcatgatttgattgaattaaacttgaataaatcagaaaattgtttccttgcacttgtattaaaaacatagtagatttgatgtattgctagctattatttatattaggtttaaagtttttctttgtgttgttttaaatatgcatgtcacaactctaagccaatatttggcttatatcacactaggatttctaatatagggtctttatgacctttgtttctgttattttcctttcctgagctgcctatttttcagggcttgtcctagttacaaatttttagtttatccttttctgaagaaggctattactctctggggagtagtgttcataattccagtgatccacactgagttggatgaggacatctgtctacccagctccatcactcaaataaggtgatacataggacagagcagttttcacagttagtggatcctcatatatgagagtaactttactaaatcaaatttaccttatataaattcaaaggcacaatattcaaatattgtctatatgactttaacacatctcctacatcattccagagacccaaataaaaacttcccttccaaatgaaggcaaaaggccaaaataaaacaaattagcaaaccaaaccacaacaaaacaaaatcctgtgatgttccaggaagccagataaaatcttcttgtgcaaataaaggcaaatagcaaaaataaaacaaacaaaaaactcaacagctatcttaagatcagaaaggcatagaggaagtctcattttttaagcaaccagttactcttcttctgtgtcttacaataatccagaaatttcacacattggctctgatgatggttttcaaacacatcttgatattcgatggtaaggaattcacatgtattgtgtagcctttagacttcttcagggtgacaagggcatccttgctgcacatagaggcacttagtaatgaatagggctattcatatagaattcatgttatatccttttttagcttttccttttgaaggcttgttacttaaagcaaaattcagtagatatagcttactttataccatgtgctattcatgggctattctgtctattttttcctgcaaatttttgttttagatatgtgaacactaaagtttagagagtgtattagtcagttcaagccaccataaccaataccatagcataacaaataccatagactgggtggctttaaacaatagaaatttattttctcacagttttagatgctgggaagtccaagattgaggtgctggcagattcagttcctggtgagggatctcttcctggcttgcaggaggctgccttcttgctgtgtcctcatatggtggagagagagtcctctgccacctcttcctatgagggcactaatcttatcagatctgagccttacccttatgacttcgtttaaccttaaatgattcattaacctccttataggccctatctctaaatacagacacattgaagctcagggctttaatgtatgaattttggggggatacaactcagtccatagtctttaaagcagcagagctaggacttgaatctaagtagtgtgacactggaaccctgttgtcaaccctcttacagctgcctaagattttcatggatgattgtaaggttggctcagtttgtcttgcaaacctttccacctttctttctctgttccgtgctttaggtatattcctctcacctgactctaccaaatctccatgttgtaggccctcagtgttcatctcatttgtactaaagattaattccttccaagggtatttgcatatttatgaacaaaatgttccaaataagagctttgccccacataacaaatattagcttttagagcataaaggcagatgagacgtatttttaagagactctgtcctcatctctcagatcaccccttagtgaaaattgtagcactttggaatatgggcttgtagtacatacatttcctaccaaattaatttttttccttattaataccacagaacactattgtttaatcattttgtttaatatctacctttctctttttattaacatttattgaacaatttttgtatgtaggacataaagtatacatttaaagataaaagatgttccttgctttcaaggaaattggacattagcagagaaacagatttgtatacaattaactattgccctaactagaatatattaagtctcaaaagaagaatctaaaaaaatgatatgacatttcagagaatgaaatcagataatataaaataatttttattttattttatttttttgtgaacagtgagatactcctgaaatcttttgagtacctaggtagcttgatccaattcatttccagaatcacctctctaaaataaatgggaggctgaaggggaagagagtctggtctattataattttcctaaggtaaatcctaaaagaaaagagatgttctaaacagtagaacacctttgtaagtcaaggatttgttgtttggaagtcacattccccttaaaagattactgtttctccaccctttatcacaagggacacttttgatcatgatattagtgactggcatgacacaggcactgacagaacagggaaatgaccaataaaaatagactaggtcaaaaatttgtaattaacaggtgtgaccacattgatatgggctggctggatgtcagaggtacttttgacccttgttttgtatccaggtatcccattatttgaaaaattttacttaacacatttcatgagttaagtaataagtattttccagtttcttaattgaatgatgatctatgatttacatcagcttaaggtcagtattacaatgaattggtacaattttagtagtcatttataaaaatgggtgagtcagttggcctgagtgggtggccttatattaagcaaatgtataatttccatttggcattttaaaatattaagaataaaaattaaaaatatttacctaactttatcagattcctagggtacagtggactgctgtcatccattaatagtgatgatttaatttatgtgcctcttagcctgaaaatgtttttaaaatcaatctctctctctgtcttcctaatacacacacacacacacacacacacacacacacaccccacatatacctgtatacatatctgtacatatctataaatatagattttacgtgaatatctttataattgatgtattctttagttgccaaggtatttaccactcccttttgccttacacatttatgttacttacctggcttctgaaaacgtatgtgtttttaattcctgatttagaccgttatatgtttgtggtgatatcactttgtccatgtcaaaattcaattccagtataatgagtcatgctgtgatagagtttttaaaatctataattggcttcaacttttgaagcactattaattcagattttactatttatatttggcaatttctacttgagttgaattcatcttcacttccagtacacacacatttcattttagttcaaagatttgctaactctttcaaatgctagtattgatcttcagagattttaaaaagcacatttgactttttgtgccatataaaacttctctttttgacttttgtttcgattcttccttttacttgcctcccctactcctccactgaaaccagttctctcaaaactacctgcccccaacctcagccaaaggaaaaaaaaaaaaagcatctgtgatcttgagtacttggtgatggtgcccttgacccatatgcacatgcagggaccaacaggcaatgttcttggtgccaccttggtttgcctgttaccttcctgcccactcctttcctcccctgggaccacttgctgatgctgccgcaaagtctcgtctaagaaatggcaacattgtgccctaaatgtgctggctttcccttcccattgtactttgtaaagatcatgggtaatttttgtaaggacaaagtagtaaaaggacaaccagaagaatgctgaatggttacaacctcagtggcagatataatgtctttttgatgaacattaatgatctagggtatacttcagggaaagtacagtattacaaggacttcgagagagaacattatgaccggcacctgtaattcttgcccatattcacaagaactgaatgtcctcgtgtgctgacttctgcattgcattgctaatgttaagtaagagaatggatgggaaacaaatggtagcacttggggacatttttctttcttctctaaagaaaaaaatggcaaatggtggtgtgaatgcaacttgccacagaacataaaagcgtaagaattctggctgtttgaggtgaaaaaataagttgatttttctttaaattgtaaaaattagctccaggttctctcaggagcttaaagaaaaaaagctttgagaaatgggagtgaatagcaagatagggtttgtgtaacaagttcctcaaaccacagaggtcacatgggctctttctgctttgctacttttgattacttgtcacagttgtacttttagcttcccccatcctgcaaggccactcaaccatgtgctagctggagtgatctttattcacaatgtctttacaaaggctcctgcaacacagcagcaatggcaatttggcggacttctgcgctgggccagcgtatagctcttactccacactcaccggcagccttacgatggacgataatagaaggattcaaatgctagcagacacggtggctactctgcctcggggacgaaagcaggtatgattgctattttgtaccctttagagtgttcacattctcttgagggcagagtgatatgtttgtctgacttcatactaatggtgatattttagaggctttggaattactggctgattattatgggtgaaggaggtgagatgctcagggagctaggtgaaccagtccaaagatttgagaccacaatcaaacttttttttcaaggcaaaaattaagattgtttttcttatttgaagaagtgctcaggtaaaataaacatcattaagcataaaaaacttgaagatggtttatatagatacaaccagtatgagaattaattctcttttccccattgtgtctccactgattctttcccttccatccttacttgcagtccttgatggtcatttcagttcataatcaaataagaaatactttttctgaggacaaattttgttgactaattatcttcagctctgggttgctggcacatacctcaggctattggaaagtaagattttttttttttggatagatgagtgccagattgaatatcagctcaccacttagtgtctgtgggatcttgagcaagccacttgcctctctaagcttcagttttgttttttctaaaatggagttaataatagaaccacccttattgggttcttatgttggttaaataaggaactgtgcagtgcctaacacagtgactggcattcagtgtgtgtttattaaatgctagattatgccattttaatatttttattgcaaagtttgtctctagggatgaaaactcatttggaaaaatctatgtctaactgaatttattttga

SEQ ID NO: 8436 - DNA, 6000 bp, Homo sapiens; identical to SEQ ID NO: 905

SEQ ID NO: 8437 - DNA, 6000 bp, Homo sapiens
aaacagactattagtgtgttgagtaatgcagtattgaatatgtcagttactgcagtctggctctatggtatttatttggttagtttgcagaaagatagacaaatgacatgaataaaagcacacttactgactttcttactgatctgaagcatttatcatgctagctgtgtaaagctatacttcctctaagttcaaggcctctacctccaaattcaatgggaggatagaatttagagtatggtttaattattagtgttaaatttgtattcttaagaataattttgtgactgttaaagtctgagaggtttattctgtatcacatggcttttataatagagatgtgattaaatacactgttctttgtactaggaaacctggaatctgtacactgcctcgctggttttcagatcaaagaaaaaaaatcatagtagatgaaccttagaacagtcccctgcccagagttaatattttagattaaaattacattccttaaattcctctgtgtagcagattatttctgaaattttcagggggtgggggaagcaggaacataaaatgctagaaattgagtaaattgcatcatctttgaaccttaaatattgatgttgtaactggatgttgaagactttgccagagttcattgattcatgagttgaagagttccttatgcagggtcgtgtgttcatacttggaggaaatcttctaagatttggagtctgacagcgggagatacagggctggatgcatgaaagaacttccatgtggagttttctgcctgaatgtaaactctgagggcaggaacttgattgcatttgatgtcatacctccagtgcctaaatcagtgcctggctcattgtaggtgctcagtacctcctggccaaaggcatgaatgaatatgggaaggaaaggcagtgaacttgctgcagttcagaacgctttctgtactctgtactttatgcagtttatttctggcttggcctttgttaagggtcaggaagttggttggaagagagatccatccacatgttagaacatcagctgtgtgccagcactgtgccagtcctggagatgatatggtataaagaccttttccaaggtcttcttcagtattggactgttgggggttctactttttcttttgacagtgattgtaacaagggatgtttccctagaatgactccccctaaagtagcagagtgatccctgagttcaggggattggattaattgttaatttttttttttttttttttgagatggagtctctctgtgtcgcccaggctggagtgcagtggcacgatctgggctcactgcaagctctgcctcccgggttcatgccattctcctgcctcaccctcccaagtagctgaccctacaggcgcctgccacaacgcccagctaattttttaaaaatatttttcatacagatggggtttcactgtgttagccaggatgatctcgatctcctgacctcatgatctgcctgccttggcctcccaaagtgctgggattacaggtgttagccaccgtgccctgccaattttctttttttataaagagatggggtcttgccatgttgtccaggctggaatgcagtggctattcacaggcaagatcatggtacactatagcctccaaccttgaacttttgggctcaagcaatccttttgccttagccttcctaatagctggctctacaagtgtgtgctgctgcacccagctctgggtggatctttaactgtaagtttaagtaagtcctgacaattttgtttcattttattgtccctgagaagcagctaggtaaatgcggtcgttaaaatacatgtctaagcagtcttagtggccttcttggtcttcctttgctcctcccaagttagaagtcagggcaagtcttcccccctgcttcatcctatccccttataacttcagataaaataatgactataaggatttgaaatccctgtgattgtcgaaggagaagggttgagagtgagtgggtcttattttcctccctaccttcctatgtcaattttgagcctgtgtattctatagtttttttttctcagcatcaaactgaaatcttatttatatctttttcaactttaatatccccactttttgatctttggggattagaagccaagtatggacaagaggagagtggccagggcattgagtaagcatgtatgtacatttcataatttttgccatacctggtaggttgtgctgaatttcttgggcaaaaggcctgaagttctgttaccaccaggggaacaggaattgtggttgccgtcgggatcacagccaggaggctatttatagtctgtagtgagtggctgtgagcccaccatggttctgaatatgcctcctgccttaaagttcccagtgttcttgaagcggaccctgcccttgctggccagacagtagttaatgataaagtggacggctgcaggatgtggcgcgtgatcgccttggcggctcacagcctgcaggtgcttgtgctttggctgacctgaacccagccggagagcaggtgctccctgcccccatgctggcttcctggcctttttctcagctggcttcactgacatggagctgatggaccactcgctaaccagagtccactttctttattccacatgtgccatgtcaggttaagatttataacaggtcatgaatttagcttcctcatctctctgagttcaggtcaaatatctagatttgccttgcaaaaatggccaagatcaggtgacactttgcacttttagctcacattaaggtatatggactagaaggaaaaggtgaaaaagtaagttctcacaagaaataaccaagaaaggaaaacttttttcttgctttcatagcaatgtatgatatgcgtatttatgttgattcctggatgctctaatggtggagtgataatttatgcgttcgtttgcgtttgcaggtgatggaaaactccaacccaggcgagccttaataagatgaacatggaatggctgccattctgtggagtccagggtaaaacaggttttagatctgggttgactcagggctcaagcagtgtccctagagccctgttatttcccctccacttcttcttttgtcagttccatcctcagcaggttctcttttcaaggtagcaaaatggctatggcatatcctacattcaagtataatgagaaaatcacactttcttttctagtagttcctgtaaaatcccaagagtcactctgattgggtgggctcaggtcacgtcacaccctggaatccagtgcagtgtgatgattggttttcaaccacacctcagcatgcagaataggagggggtgtatcccagacccagttcaggagttgttgccgagaaggagagagggaggaactgaggaagcatagagtttctgcagaatgattccatgaagcacatattggggactttcattctcataaaaagagcactgttcttgggacctcatacagtgttgcttggttctcaaaaagtactaagttcttgtgtggtttctgggtaagtctggcatcccccagaagcagggagccagtgattttcctgatgcccttgggatgttcactgcatggtatcagattacagtaggtcataatggatgccatgcctggtagttgtgtggtgtgacattagatcaattagctttccctgtacgccattacatcaaagagtgtcgctggacagctattctcaacatatgttttgtttgtctctgaaaacacgtgttccatttctccctgggccattcagattcattttgggtgactgtcttgtcagcctggggctggggagaggggaggacaggcttcattttggcagtgcttcaagcttggagcagcatcctgcagccagcaccataagctgtataatttgtccatggaggcctatgcattatagaaatgaaaattccttatctgacagcattcattgcttagcatgcagcaatttggctgtcagaaacagctggccctgcagggtgggacaatagaaaggcgagacccgagagaggccagtgcttactcaagactcccactgtgagaggatcaggttactgagactgtcattaacaacagactgcaaggggctctgggcacagcttccagtgagcaggagcctgtggctcagacagtgagtgattttcccctgttttgctgaatggaacaaaaataaataaattaaaaataaaccattaacctttgctgacactcagatgttcagttctgattttgtcttctactgggtgatgagcatttctggggaagtaagtcccttctaacctaagtatagttattggtgcattgcagaaaactcaaaaaggagtggggctgaggggcaggatggattgcttgacacctgcatgttggagggctgtaatttttaggttctacttacctagaaacaatgctgaaaggaccaggattggagaccttatgaggcaggtttaaacatgaagtagaaatggggttgtgcgttctccccagatgtacatacttggaagagccatgcagcaagcagaggagaggaacagaggagctgtgtggcttgaccctcctcggaatctgcagtgtggctggctctgtgtgcttcctgtattgattccatgactcacggagcatgagctaagcagaaagcacacttaaactacagaggagacagctgtctgttacagaaggacatattttctgggtttaatggcgccacatttttcctaatagtttgtacactggggatgtacttactagtaatgtctgctaaagggtctttattgttttttcctttttgaataaaaaagacattctttaaaaaaatcacctaaatattattcttgacttttatttcacaacaggacttcccttctaggaaaacagtaccaataagcaacttgtcactatgggttgtttttttttcccccacctcttgatagcaagggtctatcggaagtttaaagcaatgcagcgggaagtaccttgcctttttgaagcgaatagcgtttcagagatattgggcggctcaaggttagttctcctgttggaattcgtttgttgttcagtgcgactggaactgtactttctcctgctctccctctaaatctgtttcgcttttacatgatagaggctgaagttcccagatgttgtttggattaaagagtgtgtgtggggagggggggaaaagctttcttgatgataataacagagtcagactggctggttctgtactgacaggaaaatggagagataaaaactccattaatggtgtgtgcattgcctaagtagccaataaaacaatgctgtcctcactggaagccggtcccagactggcaacgcttcgtgccaactgcaggagacaacagctgcaaagaggggcagagaattcgagtcaagagtccacgttcaatgactggcttgcggggcagttcttttgttctctacctcctcctctcctcctcctcctccttctcctcctacttttgcccattttccttgatgagcccctcttaatgctcactgttccagaaattgaaccacatctgattaaaacttaatggttactcacagaatgaagttggctggtagtttccaagcctgtttgtctgggttgctttgagtgtgtgacaatagaaattgttattttgaataaaatgtatctgagggttacagtccttaaactttgacagaacagtcacttatcacagatgtaccgctctattttccctcaaatatctttaaatttccgtgctcgaaattaaattaaaaaatttaaaagttttttttaaaaaagcatctcattttagaagataatggaaaatggtaaaggcttgccttagtcagctttcattctatatgtacttcctgaacccgttctctgagtgaagctctcttctgtgactgtgggccaggtaaggctgtgctcagacgagacctgactttgggaacttactgcctcatggtcaggtaaatccttcgatctccaaagggaa

SEQ ID NO: 8438 - DNA, 6000 bp, Homo sapiens
cttgacactttgggaggccaaggcagggggatcatttgagcccaggaattcaagttcagcatgggcaacaaagcaagaccccatttctaaaaaaaaataaaataattagccaggtgtggtggcacccatgtgtagtgccagctactcaagaagccaaggcaggaggatcccatgagcccaggagtttgaggctacagtgagctatgaacgtgccactgaactccagtctgggtgacagagcaagaccctgttttgaaaaacaagtcgatattgatccaattgctgaatactggaaaggcaaagtcagataaaactggattctcggaattaggaaaccaatgaccatcttagccaatgcaaatgtagcagagtagtgaagccagaatccagatggaagtgagtttaaaagtgaaagggaaggccaggtgtggcatctcgtgcctgtaatcccagcactttgggaatccgaggtgggtggatcacctgaggtcaggagtttgagaccagcctggccaaatggtgaaaccccatctctactaaaaatacaaaaaaaaaaaaaaaaaaaaaaaaaaattagcccggtgtggtggtgcatgcttgtaatcccagctacttgggaagctgaggcgggagactctcttgaacccaggaggcagaggctgcagtgagctgagatcgtaccattgcattccagcctgggtgacagagcaagactctgtctcaaaaaaaaaaaaaaaaaaaaaaaaaaaattgaaagggaaattaggagatgaggaacatgagatttcgagaagtatgatggagacagaaaggaaaggggctgggccatagccagaggggaaagaagggttgaaaaagggtttttttctaaaggggagagaaagaggttcacaagtttagaagctgagatgaaaaaaacaaaaacaaaaacaaaaataatggacagagagaagttgatgatgcagtggggagagggaatcattaatggaagatcttggagaagataaaatgagaggggcagtcctaagcagaaagaggaactggtttgggtgggctggagaagcatgccttcctctctgagaccacaagagaagaactgcagataagcatttgaagatgtttgtctatatgtaatggcacctgttttcttgtgtactagaaggcaaggtctgctgagaaagatgggtagcagatggggtcttttaaaaagttttttaattttttagagacagggtctgtctcagttgcccaggctggaatgcagtggtgcaactctagctcactgcagtctcgacctccaacattaacttttttttttccctagagacaggtgatttcaatgttacctaggctgctctcaaactcctgggctcaagtgatcctcccacttcagcctcccaagtgttgggattacaggtgtgagccaccatacccagcctgggatcttagcttgaaaagagtaataaatttgaaagactcaatgagagaaataggagaggacagtgactaaggtaaaatcaaatacaaggattgcagaagaggcatagaaggcccagatgaaattaaaagccatattgtttatagtgacagccatcgggagaactgattgatttcctccacctgtcctcagttaacttcagtaaagttgaggaaaaagagagcacgggccaggcgaggtggctcatgcctgtaatcccagcactttgggaggccaaggcgggcagatcacttgaggtcaggagttcaagaccagcctggccaacatggtgaaaccccacctctactaaaaatagaaaaaacttagccaggtgtggtgatacacgcctgtaatcctagctactcgggaggctgaggcaggagaattgcttgaacctataaagtggaggttgaggtgagctgagatagcgcgactgcactccagcctgggggacagagtgagactccgtctaaaaaaaaaaaaaagcatgaagaagaaagcggagaccacagattccgagttggccaggtgagcacaccaggggaacaaggggacagaggatgtggtatttcggctgggtggagaagggagaaataaaaggctgagaaaaatgcaggcaagggactgaagtctggcatgagccaaaagaggatgtaagttggagacagagtgaaggaaaattaagggtatgaggtgtaactggagagtaaatgggagagcgaaatataacagtacccacatacaggcaataagtagtctatttcatcagattagcatcaaaaatgaggcagtgtgcaccagagttaacaataaaataatataattttctttagtacaaatgacttaaaatgacagtgttaaaatgggttttgccttaattagattgattcattaggatgtcaattctattgtaaatataaaaatatttgaaaagtagcttaacacaaaaccacattgataaaatatactttggtgcctgaggtgggggtggaagagataactttcacaattacatgattgcttagaactgttcattttacttctgtagttaggagggcaaaagggtccagaatcaagatgtgtcaatattccaatatagagtatctttggaaggatttgctctggtctggagtttggtatataataaactcagtattggcagcctgagaagaaaaatggaagtaaataagttaagcaagaccttaatactttggcaaaggggcagaacctggaataggtgggagagtccagcagaggagctgggctctggttcatttgttggcattctctgtgagcccacgggggaatcacatcccttctttgggtcactcaatttccttactagtaccacttctaacactctatgactctccttatagaccccttgggtcaaatttccttggtgtaaccactctggattatcagaagtgtggaaagggttagaaagagttggaaagggtcagattttatttttttaaaaatagactaatttttgagcagttttagatgtatacaaaaaatgtagcagaaggtacagagctcccatgtacctccttacacataccccagtttccccaattattaacatcttgcattagcaggtacatttgttacagtggatgagccaatattgacacattattaactaaagtccattgtccacactagggttcatcttcgttttgtgcattctatgggttttgacacatgtatagtgatacacatctaccattacagtatcctacagaataatttcatggctctaaaaatcctctgtgttccatctattcatcccctccttcttcccaccccaacccctggcaaccatttatctttttactgtctccatagttttgccttgtctaaaatgtcatatagttggaatcatatagtatgcagtcttttcagattggcttctttctcttagcaatacatatttaaagttcttccatgtctttttgtggcttgatagctcatttaattttggtactgagtaacatttcattgtttggatgtgccattgtttatccattcacttattgaaggacatcttgtttgcctctaggttctggcaattatgaataaagctgctatcaacattcatgtgcaggtttttgtgtgtatgtaagtttttaactcatttggataaataccaaggagttgtgattgctagatggtatggtaagagtacgtttagttttggaagaagcttccaaattgtcttccaaagtggctgtaccattttgcatttgcaccagcattgaatgagagttctttttgctccacatctttgccagcatgtggtcttgtcagtgtttttggattctggtatctaataggtatgtagtggtatttcatttttgttttcatatacaattcagcaatgacatatgatgttgagcatcttttcatctatttgccattatataacttctttgatgacgtgtgtattcagatcatctgaccattttttttaactgggtcatttgttttcacgttgttgagtttagacttgattttatagaactcttttgccaatgacatgaggcttaaacaagcacccttgcttgaccctggctagtgttgtccagaggccctcatgggtgaagtataattgcacagtttatgcatacattgtagcaaacatagcttaaagactcttcatccaggagctggtaacagagaaaagttgtctaagagacatagtccactgaaaggggtctttgaaaaggaggattctggccagtagatccaaagaagaaggctggcaaacgccaccttaaccaactgatccaagttaacatcagtgatgagacatcgacatcttgtccttctcgagcacgtacatcacttctggggaactctttcccaaaaaagcgcaacctgaatccaattagaaggaaatgtcagacaaaatgaaactgagggacattctacaaaacgactggccagtactttttaaatgtggtttgatcgtgaaagaaaaagaatgacagagaaccgtcctagattaaagggagactaaggagacacgacatgcaatgtatgatcctggattgaatcttggaacagaaaaggacccttagaggggcaattaatgaaatgtggtaagtgctgtagattagctaatcgcattatcccagtgcgagtgccctgtgtttgatcactgcactggcgttatatacaatgtcaatatttagagaagctggctgaagggttacggaaatctcttgtgctgtttttgcaacattttcgaaagtcctaaattatttcaattcaaatgaaaagtttaaaaaacaaaaattagaagttccagaaggccgcgcgccagccgctcctgcgggacgggacacccgggttctcctggtgggagcccccagtgccgttcacgttccgcccgggggggggattaaactcgcacgcgagaagcaccgcccccgctcccgccccgccccgctcctctccggccgcgcagccgctgccgcccacccgcacccgccgtcatgctccgggccgcgctgcccgcgctcctgctgccgttgctgggcctcgccgctgctgccgtcgcgggtaagcccttacgtagtccctcgccgggaccgtgcgcgaccgccttcgcccccttcccaacgcacgctcttcgtccccgcgcacccgagggcggcccgcagacgcaacacccggccggccatcccgcccttccctgcacgcccgtcccccgtgggtcctggctccgggtcacctctcacccgcctgccctcggggaggggaggtggccgagaataagggagggctctgtcttcctcggagtccacatcctcaccgcagaccccactccgcggggagggaacccccaaattaggccagttggccggagaactgagggacttggagtcgcacgacgggcgccgtttcagggcaatttcgggctgaaatgagaagcggggacgttggtggcgatttcccctgctggtgcgcggccggagtggggttgctgggatgggggtgggggccggaggaagtaggccctcttttgcaagcagcgctgtttgtctagttggttggtgttcaagttgtttaaacaggaaaacagttcagccaaataacccctggatggaagaggaacgggaataggcaaagcttggatttcactgaaatcaaggagttttaaagttctagtctgctgttgtgcaagtgacatctgaaaaatcacacacgtgatcattcatttacaaaacgactcgtgaggaaaatgcacaattctattgaccgtggtctttatttttaaaaaatttccatacaagcatgtcaaaaatatgtggatggggagactctggagaacacagacttccaaaaacaccactgactgaataattccaggaattaaagagcaaaataaacaagaactaaatgagtacttgtgtgggcttaaataaagtgcaagagatttaaataaaatgcaagagattccccccccccaccccttgccccagatttcactgcgtttttataataactgcctg

SEQ ID NO: 8439 - DNA, 6000 bp, Homo sapiens
gcaggagctagaaccacaaagaggcacagccactgcttgctcttctcccaaagcagagaggaaagaaataccctgggttctactccttccaaattcctatctcaggccattggctgaccctaaccagaaggaaacaggcaagaggggtctgggaagtgcaagccacttgggattcaaagcagaaaagggcagggaacagatcgaaaaaaacaggcaaataacctgtacaagaatgtgaaaaggaaatacaaataaccaatacacagagaaaaatatgtccaacctcattagcaatcagggtaatacaattttaaaccactaacagataccattttacaccccaccaaaaattttacaatgccaatgttgatgaagatgttcagcagtgggaatgcttatgcacaccaatgggagtgtaaatcagaaagttcattggcattgtccaataattgtaatgctacacataccctgtgctccaggaattccatttctaggaccatatcctcaggaaactctagcaatgtgcaccaagagacaggtacaaaaacttcacaggagcattaagagcagcaaatacaagctacccaaatggaaactacccagcgggaaactactcaaacatcccccaacaagagaatgcatagtgtcctttattcttataatgaaatgttacataaaaatgaatgaactacaactacacacaccaacacagatgaatgtcacagacagaatttaaagcaaaaagacaagtgacaaaaaaaacccaacccttgaaatgattcatttacataaaattcaaaaacatgtaaaattataggtactctttaaggaatgaatcatatatgggaaaacggtaaagaaacagtgatgaataattcagaggagaggttacctctatgtgggagtaaggtgaatatgaccacaagaggccaacaagcatagctattcttttttggggtatgatttattttataattaaaaaacgtgacttcagagattctaaaagctccttttcccctcctccctaattgtgattgggaataaaatatcactaacactctcacacactcattcaagttctatagttagatttccatcatagtgtcttcacttgtggctactaacctggtctaggtatcagtcttctctgtgttgtcttagtttccacatttataaaatgaggattataggagtacttactttgtaggatgattcctaaacaagagagtacatgggaaatgcttagcacatggtctggcttccagtgggtggccgatgtttgtaatttgtttataccattgtctcagcttgtagcatcttcattgcctctatctactgaatgcttctcatccaaggacatccagttcaatgcctgaaaactgctgcccccacccaagccaattttcccctcttttaaatgtctagaccttccattgcctgcatcatttatgaggtattactatatatttacttattcattcatgcagcaaatcatgtgccaggtattagggacacagaagtgaatgaagcaggcatagtcactgtcttcatggagcctgcagcctggtgagggagatacacattaaacaaatgagcaagcacagaatgatctactccagctgtgctaagtgctatcaggaagaagtgtgggaagcctggagaacctgttatagaggaagctcacctagactgtagagtcaaaaaaaaaaatttctttgagaaagtaacgtccaaggtgagacctgaaggacacattgctttttattgtcaccattgacaatatttactgagaatctataacctaggtgaaataatcagtgcacatgtccctgaagaaaaaatcgtggcaagaggtaatacatgttaaataccaagtgaaaggaattcacactattaggtagatatttggaagaaggttaaccccttggtagaagtgttttacgtaaaatgtcagatctaaacagaaacttcaagaaaggttggaactaagacaaagggaaaatggcattctggatatgcatatatgggcagagataagaaaaggcaagacaggttcagacaggtagcttgaaccaaagagtgacatatgaagggagtaaagagaaagggtcagattaggccaggcacggtggttcacaactgtaattccagcacttttggaggctgaggcgggcggatcacctgaggtcaggagttcgagaccagcctgaccaacatggagaaaccctgtctctaataaaaatacaaaattagcctggccgtggtgatgcatgcccgtaatcccagctactcaggaggatgaggcaggagaatcgtttgaacccaggaggcggaggttgcagtgagctgagatcgcgccattgcactccagcctgggcaacaagagtgaaactccatctcaaagaaagagaaagggtcaaattgtagaggtacttgctttttgtcttagagttttctttttgtatcatgggcttctctgggattctcatgaaagccttgtacccttcctcctcctcctcaaaacatagtgcatttataaagctgcataaaatttcagggtttcataatttcccttaagtagcatttaggagctcctgctatatgcaaatagcactgaaaggatttgagtagaaaagtggcatgttccaaacagtgtttagaaggattcatttgccagagaggataataactgttggcagtgaggtcaattgataaattattgcaatataatgcaagtaggagctcatatggccctaggctaaggtggtggccctaggaatccatccatcgattaaactaacatttattgagagctgactttgggacaggccctgtgcccagtgttgaggatgtgataatgaatacggcaagaccactgccctcaaggagctccaagctgggcaggatcagaaagaaaggcaggcagccacagaggcagaggggatcaggtcagtggcaggttctcctactcagaacttcccaccatctgtgccttagaataaattcaaggcccttcacaaaacagacacaactcacctttctgctgtcatttccactggggcccccaccacaaccactttgatctctctcacagacacaccccccgcagggcagctaccctggactctggactgtcttctgactctgcttgcattttctggcctctgccctgtcactggttttctcccaccagctgtgcctgctcaaattcctacccattctttaagacccagctaagatgttgccttccctcaacatttgtcagagtttccccattcattctgccctgtgtcactgagtgtgcctgtattagggttctctagagggacaggactaataggatacatgtatatatgaaagggagtttattaaggagtattgactcatatgatcacaaggtgaagtcccacaataggctgtctgcaagctgaggaacaaagaagccagtccgagttccaaaacctcagaagtagggaagccaacagtgcagccttcagtctgtggccgaaggccagagatcccctgacaaaccacttttataggtctaagagtccaaaagctgaagaacctggagtccgatgttcgagggtaggaagcatctagcacgggagaaaggtgaaggccaggagactcagccagtcaagtccttccaacttctgcctgcttttattctagccatgctggcagctgatgagatggtgcccacccagactgagggctggtccgcctctcccagtccactgttaatctccttggcaacaccctcacagacacacccaggaacaatactttgcattcgttcatatcaatcgagctgacaatattatccatcacagtgcctcagtctccccagtattcaggggagggcagagatgttgtctttttgtccttctgttccatggcgtgcccagatcctgtgatggcaggtgctcactatatctatggaactgaaaggccagaccctggggagaggacagagcaggtttgggagccaactgtgaaaccttggcagtgggagtcaggaagagcaacctaggtctttgcatcctcatgcaacaaggatggaggccacctcaagtacacattatgtgctcagcaaagacgagatttaaaagtataaaacattcacatttgagcaacttaggtcattaagaatttggcctctttataatgatagcagtgtccacaggaagagagtgagtgggacatgaaatttctggttctgcatgcagacttctacatttctaccagctaattattattatcattaaattattaagcaaagagcttactcgcaaaggtcaactttttataaagcataagtcatccttggaagtgtcgtttggtcattctagtaattcttgcttttaattctttaacaactatgggtagaactgcagtgtaccattattccacctttgtttgcactgtcaaaatacccaagacgttgccaaggacgactgaattcttaggcttggccgcagccacccacagggcaggtgctcacttcctcctccggggtagaagagatcatgggtccctttccagtccaggctggaatggagaagtcgtccctgaccacagtgcgccaggcagaggccaaggttctaaactgatagaacccacccaccagggcggtgccaagtcccagtaagggccgcatctccccagcttggctgatgaagaggcggggaccgaaccctccagtgcaggagcctgtctggtgcctggctctcccaccgatccgcacgtacctcttcctcgcgggtcctaccccacgcaggtatctagcgcccagccctgttcatttcccacacctggcccgctccgccccggggccgaggagacgcacgtctgattggccgagggcggcgggggcggggccggggcgcccccagaggcctagacagaggtgcgggcggggcaggccgcgctcagcaggcggggcgggagccgcgtgcgcccgaggacccggccggaaggcttgcgccagctcaggatgaggacaggctgggcgacccctcgccgcccggcggggctcctcatgctgctcttctggttcttcgatctcgcggagccctctggccgcgcaggtaaccgcgggcacgccagccccgcagtccgctgggtgcctcgacgccacagctctgctgccttccagcctggggcagggctgcgcccctggggcaggtcacggctgctttgctgttggggcgggggggctctggagccggaagagtgagtcgcaggggaggtctggcagaggaagcgccccagtgccctcgggggcccggaggagggcgcggtggatgtgggaggacagggcccttctggtgcagaggggacgcggtgcaccgtagagtaggcgcacggaggcttttttggccgggtgcgctgctccatcgtcgcctctcttatataatgttgctggagtatggggttccccatctgccctcttgcgtcccgtccctcccgttctcgcttttccttcggcccttggtcaccttggccacagggccaagaggagcctccacccacagcgccaaggattccccacgattcccggatttcactgcgcctacggtgcgcatcaggaaggaagtcaggttaaataaaccatctcctccgaaagtgaccaagaccaagagtcagctatgatgccctcacccaccgcctagagcaacaaacctttcttctcattggtttatcagctccaaatgaccccgctcccccaaggctgacagcctcacggtgaagggcaggtcgcctgcttggggacctgctgcctctcactgcggaagcaggaccagaaacagacagccttcattgatgttcagggtagtgccagccccaccacaccacaccccttggcagcaaccggttgcttttactttctctttttgcctgggcgaggggtgtgcagagaactttgtttcttggttggactgcatcatgggcactcaatgggccaccctccaccggccacttctgttatcgtgc

SEQ ID NO: 8440 - DNA, 6000 bp, Homo sapiens
ttcagtttgtgtggctgaaggcctttctttgctgattgcatattggtcctctcatctcccaccccatgtagctttcttctgccttgggcttctgcctctatgtagctgccgagtcctcctaacattgactctggaagcacctcattccctccaaccttatgtgctctctccatacatcctgccagcctcacctcccattaccaaactcctgattttccatttgtatttcccatttcagattctacatacatagaaacagaggtaagtaatccatttggcttggctaaggagacacagttttcatctggggactttacaggatgctggcatctcatggattgacagctcatgggacaggcagggccgccaccctccacagcagggtggatgtggtactttccaaaagaggacaccaggcaccctccttaggaagcaaggctatgtcttcccggtgtcttgccccttggtacaaattagccagcagtcccaaggtgcaaacagagtggatagatattctttcataacattattatactttatattgtctcaaattcccccctgccttttctttacgttgcattttaagctttttctcagctttcggcacaacccaagcagggaacacattttccctttcctaattgtattatttaccttcctaaaccattctttcatttactcatctgtttactcaatatccatgaagtacctgctttgtaactggtgaaatactagacaatgaagacttaaaattcacccatattctcaatataaacattaattgactacttacaaagtgccaggcattgtgttacttgctaggaatagaaagattcctgagacacagtcgctgtctgatacatagcaagaattgaataaatatttgttgagtaaaggcaactattttgacaattacaagcagagcaaaaatggctattctggggaatgtccacaggaggggaggcctagagaaaccaaaaagtgtttcctgcagacactaatgtttacactgagacctggagggcaagctgaattagccaagtgagaggcatgagaggcaacccaaggcctgcaggaagaacaaatggtttgtgtgaaggcctgaaaattagggagggtgtgcactggaggggcagccatgggggacagagaataaatcaatcagtgtgattatgattctaggactgagatggaagtctttatgtgggatggcacaagtccatttaaatacatggtcaaattgtggttttagagttctaggaccttgttgctgcctgcatctggttgtcagagggacatgaggatgatctagaaggggtatgtaccacttccactcgtattctgttggcaagagctggttgttgggattttcttagctgcaaaacaggccaggagaggtagtctaactgtgttctcaggaaggagagattgttggtggcagctagaaccatggagagtttccagggattggcatatccagagctgggcagccaccccgatccagctcctctagagtgcctgctagcggctgccagggaggtctatgggcagacaggcaactcaagacctggggaaacctctggagcccagggcagcacttgtcagtccaaggcagttttgtaggatgtaagatcttttcttccaaagtgaggtttgaaagttgcatgttcagtctccagacaaaggtggattttgtgtgggaaattgtcaagaactatgaagggcctgggcttttacctgacttgcaagctgacaagttagcttgtcatggatttgtgggtactgatggagacatgcgatgcctgcatcacagaaaaagaactttttaattattttttttttttaagaactttttaattcacagcaattgcagtggtcagagtgtcagcacattctttcacagttccccaataccatttcccacaagatgacacaaaagaaagaggtgactcctgcacatgtagtaagatgtgttataagagaagaactttgagtttagggaaactgaaccttttataatgggcagtaaacaggcctactctttgttctgcaggttgacactgtctctatcttccaaagctgtaagcaatttttccttttccctaaagagggacactgtctgtattttcaaaggccgttcactttataaacatcctggaaaagagagtctagaaaaaaggcagccaggtcctctgcttgtaagatgtgcagaaatgtgagagacacttgaatttgtcttccaacaaagacaggttcctctttagcaagatgaagtgttctttagatagaagcttcctttactaaatccttctcctcttgatctacagatatctagaggccccagggctcagtcctcagagctcttccctatatacattcgcttcctggagggatctcattcagccacatatctctgaacaccatcagcctcatatctttaaacccatgctgataatcccaaatttacagtttgctctttgacattgcccacatttccagacctagatatcaaacctgcctatgtggcatcttcacttggttatcttctagccatctcaaacttaccatgttcttgatcctcatcctccacatgaaacctgattcttcctcaatgtaatccctctcagtaaaatgtatcactcagccagtacaatgtatctatgccagacagaaacctctttctttcatgttcacatccaatctatcagcacagtccagtttcaaaatagatcttgaatctgatcaccccctcctcctgcaccacaaacatcctagtcccagccacgattatctctgttcttgacagagacatgcattcctctcttgccccattcaccttccaatcttgccgcatacattttcacttcctcagcagccagtgtggttcttctaaaatgtaaattaaatagtattatttctctactttcaactttccagtgatacacaaggtatagaataaaattcaaggtcaagactacatatgatctgacctctgccctcaaatctgattaccctctctctctcccttcttgtattccacttgcccttgaaaacacctgccattgggctgtctcaggccttcatagttagctgtgttgtcaaagtcatctagggctctctcagatgccagttggtcagggaaaccctccctgactattctaaagaaaatcacacactcccttgcccctctttccttttacccagacttatgattcatagccctgggcactgcctgattttagaagtctatctccctgcactgccctccagcctagaatatatgctgcatggatcaaaaacttggttgtgttcactgatgtagcctctgcttcaaaaataatatttgacagaaagtaaatgcccaagaagtacttgttgaatgaatgaataatgaatgaataatagttaatactggatttttaaaatgacaataacagagacacaaacaatttgtggctcgatctttcttcttcaagttaaatcaactaattttatataaattttctctcaaaatgcatatcttccaattcttcaataattctggattgttaccgcaaaattcttgccatgtttttccagcttcttggatatgatggagttcaaaattgaacataacataggcttctgagaaaagcctaggtagtctataattagtttctctctttctttggttttttttttttaattattttattttagtttttatttttgtgggtatatagtcggtgtatatatttatgggatacatgagatgttttggtacaggcatgcaatgtgtaataaacacctcatggaaagtggggtatccatcccctcaagcatttctcctttgtgttacaaacaacccatttatagtcttttagttatttttaaatgtagaattaaattattattgaccatagtccgtttccctctgtttacaggtttcacatgcttacccaggaatgctccttgaaaagataatctcctcagacataagcctggccacagaaaagtctctctaaggtcagcagtttctagagtgacgaagtgagaattcgattcttatctgttcacagactctacaaatctcaaaacaccttcctgaagaacaccctgggggaaaaatacaaaaaacctcatggatttagccatagatcatatatattttgaattgtcactctttcactcaacaaataaatatctcctatgtgccaaatcatgagctagaggttggaacagcacattgcatagagaacttggtccctagcctgagggattcagaatcttgggcaccatcatttctgttttcatcattgttgtcatcagtgtcttttgagacattcttattttgatctcctttgatttttatatattatgattatttccaatataattttaaaataagaattttatacttatggaaaaatatatttcatctaatttgaaaaaataaggaaacagtgctttgctttccctagccttccttctcatttactgtaagataataatttttctttttcagggttcgtttcaattttttgcaaaggatttagcaatgaaacactaaaatctcaggcattttcattaagctcattttttactttcctcatatatagcctatatgctttatttaatctttattctttacattaaattaaaattatttttaaaatgactatatttctattgctgttgtgacttttcattgatcaatatttcactaaagatattaactttctctaggatgcagagagactcatagaacttacaccaaaatttctactgaatgaatttccccaccttcttggtgattgtacacctgccttccttataaggagaacaaggaagtaaatcatgttgaagttgcttttaaacacagcttttctgctttacctgtccaggtagcctctgttttcatttcagtcttaatgaaaactttctaacttatatctcaagtttcttttcaaagcagtgtaagtagtatttaaaatgttatacttcaagaaagaaagactttaacgatattcagcgttggtcttgtaacgctgaaggtaattcattttttaatcggtctgcacagcaagaactgaaacgaatggggattgaactgctttgcctgttctttctatttctaggaaggaatgatcacgtacaaggtaagacctgcgttctctgatatattactttcgtggtatgcttgacaaacctgtcatttggttcagaaactagatctgaagtcatgttttatttgatctgttccattgctcttttgtgactgagtgaacactttaacaaattacagacaaacaccgggcagttcccacagtgaatgctctaggcttaaggtaaataaatacaaaggttgcacaggcattttaatgaggagaattaaataacattactgcccaatggaacttagtgccagtatgataaccatttttgaaacttttctattttattctaccacaagatcttccacttaggagtaataatcttgaaagagaaagaggatttatttcaaaaacagaaataacttgtttaagaaagaagcattttttaatggttgcaagtaatttttaaaaattaaagtggcacacattggctaagaataataaataggataatcctatatttgtgaactttcacattttaagaaaaaagagcatgataattttggcttataagacatacataatttttaatatacatacacatattttacatgtgatagatgtaaaatacaaacttttatgtgaattgctaacatttcgaggactgattttggatactaaactaaactttgatgttgttttgttcaagtaatgtaagagccatcagtctcataaatggaatgactgaaagtgtacttaatccctgcatcttgctgggtctaaacctaggtggctgtgccctgggaggtgcagaaacctgtgaagactgcctgcttattggacctcagtgtgcctggtgtgctcaggaggtaaaataaatgacctcaatgtgtttttaaaacctgtc

SEQ ID NO: 8441 - DNA, 6000 bp, Homo sapiens
tgtgggtgcacagaaatcaagaattgaggtttgggaacctatgcctagatttcagaggatgaatggaaactcccagatgcccaagcagaggtgtactataggagcagaaccatcatggagaacctctactagggcagtgcagaagggaaatgtgggatatgagcccccacacagagtctccactggggcactgcctagtggagctgtgagaagagggccaccatcctccagcccccagaatggtagatccagggacagcttgttccgtgtaactggaaaagccacatatactcaacgccagcctgtgaaagcagccaggagggggcctgaaccctgcaaaactacaggggcagagctgcccaagaccatggcaacccacctcttgcattagcatgacttggatgtgagacatggagtcaaaggagataattttggagctttaagatttgactgacctgctggatttcagatttgcatggcacctgtagccccttcattttggccaatttctcccatttggaatggttgtatttacccaacacctataaccccattatatctaggaagtaactaacttgctagtgattttacagagtcgtaggcagaagggacttgctttgtctcagatgaaactttggactgtggacttttgagtcaatgctgaaatgagttaagacttgggggactgttagcatggcatgattggttttgaagtgtgaggacatgagatttgggagggaccagggatggaatgatatggtttggctgtgtccccacccaaatctcatcttgaattatagctcccatgattcccatgtattgtgggagggacctagtgggaggtaattgaatcatgggggtaggtctttcctgtgctgtacttgtgatagtgaataagtctcacaagatctgatgattttataaaggggagttcccctacacaagctctcttgcctgccaccatgtaagacatgactttactcctcattcgccttcaggcgtgattgtgaggcatccccagcatgtggaagtgtgagtcaattaagtttctttcctttataaattacccagtctcaggtatgtctttattaacagcatgagaacagatgaatacacactgcaagcttctccttggcttgtagctgccatcttttcctatgtttcttcacatggttttcactctgtctctttctgtatccaaatctctcctttttataaagttatcagtcatattggattggggcccaccctagtgacctcattttaaattgattaactaggtcgtggagacacgtgaaggttggtgcggagttcgtctctgcaagcatggttgtcctgggatggattcctcctgctcttcctctgcggcgggtttgggtgcagtggacccgcagttgcagcattttcattgaggtagagactcaaaagcagcgcttccagcagctggtgcaccagatgactgaactttgttgggagaagtgcatggacaagcctgggccaaagttggacagtcgggctgaggcctgttttgtgaactgcattgagcgcttcattgatacaagccagttcatcttgaattgactgcaacagacccagaaatccaagccagttttctcagaaagcctttctgactgatctcagcattacctctttggaaaaggaaggtagttcaataaatgaagagctgttgatgggatgattgaagaaacagctatgagaggactggctcccatcttttgttacttttgggacatcctgtcatctgagaatgaacaaagaccaattttttgtgtgtgaagcttaagggtcatatgtttgcttgtattttttaatgctaatcttgtgaaaataattgacaggtgaatggaaaactctatttagatgcatattactgtacacgggactatgcttttctcaaagccccattaactgcttcctattattttgatagtgggaccacatacataaaaatctctcatttgtgtggagtcatttcgatttcaagggagatccttgtgtttttcagaaagggcagaagtgggggaagaataatttagtatccttatctagtgtttgattatcaatgctggagaaaaatatctgtaagagtgtttatacagtacacttcagttttcttgatgatctccctttcctatatgatgatttgcttaaatatccatattaagtatagtctcaaggtaaggtaggcagcctgagagtctagaggtctttagttttaaaggaatctagccagtgaacataattcttattactagactgccacaaggaagaaattaacttaccctgtatatcagggtacaaaaaattcaatgatgtgcctaaataagttataaagatttaggccaatcataagctaacagcagtttcaggtagaggtgcatgcctaatgttaattagtgtagattccatttactgcattcttttgatcactgaaataaaagctatataagattcaaaaaaattgattaactctgtaaagaccctatattcaaataatgtcacactctgaagtcctaaaggttgggattctaatatatcttttggagggacacaattcaatccataacatcaagtaactgcacaacctagctaccctaataaactgagtgttgcctaatctaccacatgataaaattgggcatttgcaggagcatgctattattaagcgaaaattgtatctatatgataaaggagataagcccaccaggtccacaaggcacaagaaactcagactagcagaaaacttagactctatgatgcctgctcccattgactcaatgtctctccctcagtgcacacctatagcttcacaaggagtttcctacaactaggcaacagatgagggaaaggagtcaatgttatgcaaagtaagctggcactagcaataagtagatggctgctgcatcagagtccctcccagggatgtcctgaaacacagcagaaagggaaatcttactgacaaacagaactttgagcagaacatctgcttttctattttgcaagaaaaaagagatggcccaatgtaagatctacactgactcatcagtggtggctaatgtgttggccagctgctaccttaaggatttggaaaaaacaagattgaaagactggtgacacagaggtcaaggtgggggaggcatgtgagagagtctcttgaaatgggcacagggtgtgaagatatttgcgtctcatggagtgccctccagagaacaaattgacctgtcccgtagatgtcagccagcctcctgccagcttccttggggcttgctgaatgtacaatgagtgccatggtgctggcatggagatgaagcacaggcttaactctccagacttccttcaccgaggctgatgtggcttaccaatgctgagtgagcaaaatgctgagagtgaagggcagcactgagccccctgtggcaccattccccgtagtccgtgttaaatggcctctcttcacagcatcagttcacagggtccagtaacaccattgactcatcttcctcagcagttggaagagggaggaggagagttagtttcagcctctggagttgggggtgagtgaggatactgatgtatcacaagcaactagtgggcaagggggaaaagatgactgagttcaaaagcaatgcctggattggaaataaaagatggaaaattgcattaattcataatcatgtggtaatgccccatcggactctgcattcttaatcttttacctctactgacagagaggctttgcttttcagctgctgtgaacaagctgaagaggccttatcctcttatctgcaagagtggaagtaatcacagggggccctaaaggcaaatgtttacctgtgtattttatcgtgaaagtgccaagggtccagacctcacctctcttgtcccactttatctccagtacctagaagggaggctggcacattgtaaccactcaaacatctgtggatgactggaataaatgggaggatgtaggaatgaatgaacgaatgaataatcctttagggaacaatagagagctgggggagggagaagccatacctgatcttttattcttctccaaaacccttgaaaagactatgagaggccgcatagagtagccattaagaccttgaactcttaatttaggatctacaacttcctagctgaatggcttggccaagttatttattctctgtgtacagtcttccttcctgtaaaacaaacacagtaaatgcttagagcagcacctgggaaaaagtcaagttccacataagtgttactgtcattatttttgtcatcttgatgagtgtgtaagcctgcaagacaatcgggaaattccctagggagggtgaatccagatactcagcttccaagggccattcaagagggaacaatcaccttttctctttgcctttcatactgctttagacccctcactgcttcctaacataactttcactggcaagagacggagtcctgggtttcagttccagttgcctgcggtgggctgtgtgagtttgccaaagtcccctgccctctctgggtctcggttccctcgcctgtccacgtgaggttggaggagctgaacgccgacgtcatttttagctaagagggagcagggtccccgagtcgccggcccagggtctgcgcatccgaggccgcgcgccctttcccctcccccacggctcctccgggccccgcactctgcgccccggctgccgcccagcgccctacaccgccctcagggggccctcgcgggctccccccggccgggatgccagtgccccgcgccacgcgcgcctgctcccgcgccgcctgccctgcagcctgcccgcggcgcctttatacccagcgggctcggcgctcactaatgtttaactcggggccgaaacttgccagcggcgagtgactccaccgcccggagcagcggtgcaggacgcgcgtctccgccgcccgcggtgacttctgcctgcgctccttctctgaacgctcacttccgaggagacgccgacgatgaaggtgagtgccgcgccacgtacgtccccggggcgagctgtggggacctcttcgccaaactccccaaatggcccaaaagctggcgaaaccggaccagggactccccttaggcggaagccccaaggccaccctctgacaggtgaagggacgtcccagagctctcgcttagctttcggaccctggcttctgctaggaccctggcgtcgagctttgaatgtcccggagagccactcacagaacgcacgcccgaacccgggcaggggtagagaaaccaacgctaatgtgctctgaaggcacaagttcaagggcacccgccttagagaactccaactggcgcactccagacgccacccccacccccagcccgcggtctccctcttctaacgcactcccacctgcaaatcctgctgcctctggagcagccccgaccctcctacggaaactggggccacacgcttccctctaattggacttgatctgctcggcttgcagacaccgtggaaggttcttctgggactgctgggtgctgctgcgcttgtcaccatcatcaccgtgcccgtggttctgctgaacaaaggcagtaagtttgaaacatttgaaaaagataggacagttggagctcaggtcaggctccgtcttaccacgctaagggaaacgagggattttgcgtggggttggaccagtgccccgaagtgtagctgagaaggcttcccagttgttgttgctgcttgtagagcagcagctggattcacttcgcggggtcttcagtgtttaggctgaaactcttgcggctttcacgtcttgttatgtataataaatgcatgcttcctgaaattagggagagtcgggatttttaaaatttcaattttaaatttaatttgtaaatttttaaatttacatgtaatttttgagaaaagtttttgggtgtgatcgaaaaaggaaaaaaggcagtgtttaaagagcccaaagacagcagtaaggatatct

SEQ ID NO: 8442 - DNA, 6000 bp, Homo sapiens
gagatcagtgtatatgttcagtatggcatcttaaactggaaatctctccatctgttttataaagaattggggatataactcaaggcatttatctgctgcccttaattattgccataatttgaggtgaattaagttcccagatgaacatcccaaaggatatcttagcctctcactgctttgccaactatatctctaaggaccttcacttctttcttctatctcagctacttacttctgtgaccataccttaggcctcgttgtaacttgaactgaaatcttaaatacaacctgctgctatctggtaaaaacctcttttatttcccaccttattactagttactactaggactcatactttgaactcatcaaaatgtccagttttttagcccatgtattttttccttccatcttcaactcctcctagttccagctggatcacacatgccaatcactgtgccaatatataccctcctctgagagccctaaacataggttaaattgtgttataatgtaagactatctgggtttatcccatccctaccactcaaaagttatgggactttggggaagttatttagattttgtgtgcatccatgtcctcatctgtaaaatgaggataataatagtacgaatgttctggggataaaaggagatagcacgtgcaagtgctgagaaaaaaacgtcatgatcaataagagtattcaatagacatgaactagtagtagtaatattctctaatctaaaaatgctagtgaaaaaacaatatgtgttaacaagttatgttagtctataggtgcttacacattctatttatactatttaaacagtcttcttgttggttaaccacttctaaaaagatgtagtatttccctatttaaatgacaatgaagcactgatttatcttctgagtctttgtgtcctcagcactcaaagaaatgggttgtgtctctgttctgtttcttttctaaccccattttgatagttaaccctttgggtctccaaggagcacttgccctaattatgataggataatgaaacactgacatctaattataacatttatgaaggtagtagatgccaattacaaactaggaggcatgtggctttatattcttccttatgtaacaattgtggttttagaaaagagatcagattcaaaaaatagtttgagctatatcatttcccactgatgctatattatgccacttcttccagatctataactatgtgatagttattttgagctttgaagacctcaggactctttctagcttggaactcaaaaatctctttgacgatgggtattttgttgaatcctttcatttaagcaagtccctggaggaagagcttttaacccaggcactatataaataatcatcggattaatagaccccgattaaaaaaaaactgtaaacaaattaatattttgaacacagtccttgtagagtgaaattgtgttcttttgagatatgtgtaacaaagtactttgaggatgtgaacatcattaatattttagccttaattattttaccctcacaaccttaagtgtcccccaacagcaaatcagtgaaatgtcaattataattttaaaaaaaatttatcactttggaataaaactttaggaagtatcacaaagaagcaatgtaaggtggtaacactgggtcctgttaaaatcttgggcaagttatccagtttttctaggctgtttcctaatcatcaaaatgagttttggtatggatcagatgaaataatgcattaaaatcactttgtagataacagtaaacaataaatgtttattgaatctgaggaatcaaatgggtaggatgttaggagctgttaggctctctagaagcaaatttttactttaaagagtataaaatcaggcttatgtttactgcacttgtatccttattccccttgtaacttgtccttaaataatttgtcatggcttttggttaataaacacatctctctttcatctccccaccataaaataaaaagataacatccttatgctctcagcatggtcttaccttcagactctagaaatacatagctggatgtgttttctgggaaaacatataaattaaaatcatttttggcaggtaaacattggctactaataaatagttctagtaagctctcctccttataacctaaggatttatgttatagctcacttatccagtgggcttaccagaatgcagtcatattccaaagtcagccttacaaggtccctctctggaaagaactcagttgatgagcctctactctcctaattgctgcccttacatttttacatgacaaatcatcatcctttctggttttgcagcattttaatagacccagagttgctttctgagaaaagtctcagtactaacaaaggttagaactaacaaaggttgaactaaggatgacatgcatgtggtatgtgccctttccagtcctcttcccaggtccatgaagaaatcaccaaccagtgagaacactctttctacagaacacaaactcagcttcaggctatttctgaacaagagctttaggaagcaaaaggaaacaagtatgtaagaacattaagaacatacctgccatacttatactagaatgtaagttccttaagggcacagactgtgtctgattcatttttgttttctcaacaaaaatgttgatggggtgttaactaattgtataaagtaggaataagagtcagtttcgtaaatgttttttaaaagttgacaaaagtattttcattttgattccaaaattaaaaaaagctaataaagatattacaatattttaaaaatccaaattttatgagagttcttgtctggatgaaaattagaatacattcacattatctcaaacgaatgaacatgtgtgactttataaaaacaatacctccctaaaccatgaattcagatggaaaaactcgacatctttatttctgcagtcagtctcatttttcttaaaacagttcaaactagtaagaattttccagaagttacagcttgactcacccaaccttccaaggaaaaaacaaaaaaacttaaacagacattgtttcactctcatcatttcccacccttactaatagtggcaacttaagtgtatcttaaagcactccaacctcttcatagagcctattaaatgagtatcttgtggacacccacacacagtcatagaatcctaagtggtgctcagaccagtcacatgtcagtgcattcttaattgctagagctaacatgctctcagcatggtcttttaattacaccctaataatttattatagtttctctctacaatgtaaagtcttggaaatcacccactaaaaagtgcctgtgtactctggggctttggcaggctagggcagaacttctgagaacacggtgtgttccagagaagacaatcaatctgagaggacttacacagaaacagttcattcaggacctggctgctggcttttatctgagatctgaggatttcacaatcacttggagatacctacaagtgtatagcacaccttggatattactcttaatgattacttcattttgtaaagaggtgactccaccaacagcaaaggagagggcccagccccagccaccaggaatacagttctctgccagtaagtgcctaatgactcattttcctcaacagaattttcataaggctggaattcagggagggatgtctggagaatgtctgaaaggaagttcacaagccactgtcctgctctttgctggagaaagtgtcccgtggtagccagagaagttgactaaggcaaacagcaacatgttttggtaacatttccccattacctttcatgtacaatccaagaaaggttgccatgaagtgttttaatcaggttgggaacattataaacttcgaaaaaagaaaaccattagtggaaaaattaaggacacagtagatttaacaactgtgtttacgtggaaccacaaaatctatccaagtgaattgcattaaaacagacagaacactccaagaaactgttgtatgtgtattttttttaattcagtcaaccattttactaatctgtcaagatgaccaatttctttggaattatgtagatttagccaaaatgaaattatacataagatttacttttcttttcagatgcttttttatttatttttaaatctttataattactagatgttctcctctctcagaagatattctgagaggaaagcaaaaataccactcttgtaaagccatttccattcttccaaaggtctgctggtaaattattcttactgatctttccatctttctagcctgtgcatacacacctaacccatactaaatttcaccagatggcattttatttctttaaagtaaagcagccgtgggtttagacagttgaatttttaaacttctgtatttactgaaagtgcatatggtgctatatggacaaagaaattgtgctgaaagaaaaacatttctgtctgcaatacctcataatcttccagaggaaaaaaaagtgcagttatatggcacatttctcacaaaatcttatgtggcttcaatgttcttcctctgttaaaaagtagatatatgtttaatgtacagacctgcaagtttcattattttaaattcatcttttagtggcaaataaaaatgttatgcaaaacccaatgacttgctaaagtgatccttcagtgaattctagaagaaaatgcaacataaacctgaactggtaaaaaagaaaaaataaaaacctctgtatgtcaacgtaagcagatgttggtgtagttacaaggatgagaaggctataaaacttcccttgagtcactcacagttcatttgagggccaagaacgcccccaaaatctgtttctaattttacagaaatcttttgaaacttggcacggtattcaaaagtccgtggaaagaaaaaaaccttgtcctggcttcagcttccaactacaaagacagacttggtccttttcaacggttttcacagatccagtgacccacgctctgaagacagaattagctaactttcaaaaacatctggaaaaatgaaggttagtataagcaacctcaagtattcttaaaaaattagggttggctggattgaacgtgatcagagttttctattgtttagaaggtgaagatttgtacataagtatttacttcctcaatgggttgggattggaaaattgttctaaatatactgtagaaacatttgtccttgcagagctggaagaattccagcaattatagccggatcagtggaaaacaatcaaaagctttgtggggcgagagaaaaaggatttaggtgtaaacaaaatcttgccatttctactatttagcaggaactgtgtgtatgcctaattctctttattttatgtagacttgggtaaaaatcgtatttggagttgccacctctgctgtgcttgccttattggtgatgtgcattgtcttacgcccttcaagaggtaagaactttctctgatttgctctatctgcctagaatagcttggaaaatgtactaatgcaagatcacaagtggttgaacatttcctaagtgcttatgttccaaagtaagtctgttatttctaagaagacatataagctcacagatatgttgttgtgcaagaccagaaatactgaggaatttaaggcatgggtaggaagagatttacagtgttatttcagcaatagaaaaacctaagaactatgctgcatcacccccacaacccccaaaaatatatgctaaatacaagctttgacaggcctttagaaacaacatttttaactaacattgcttttcattattaggtttgtctcgtggaaagtaaaaatgagtaagaatggaaaagttaaaacagaatctatggactttttttattactaaatagtctttccaaaaatttagggaggaagttgagaatacagatctcaggaatagctgtatagaaaaagcaaagttgttgttttagatgtagtagcactgcacatcaaattagaaaaccaa

SEQ ID NO: 8443 - DNA, 6000 bp, Homo sapiens
ttgcctggatgagcatgattcaccgactgttctatatcttagtctcatgccccctcccctacaaaacactaggatatccttaatccaaattagttaaatactatatgttactgtaaatgttattaatttactgattttcaaaatgtagaacgtttatattgtaggatacatgttacttaaatattcactatatacaagattttgtcctaatcactgtatatctattttcctacttcacacaaaattgaatgttgggaatttttatgctgattttagaaataaagctatgagcaaaatagctgaattatcttcattattttctcctaaaaatggcaatcttaacaccaggtttctttcttgcgcttgccactattctgtgctgcacagaaatactgttgttttaataaatggcctaaaaatttctgcctcttctgagattctaaagctacattatgataatacaagctgaaattttcctgacttgtaactgtaaagtcagatgtttcttcagttaaatgtgacccagttagtagaataatacccaggatccccatacaaggctacattaaaactgccattaaaatgctgcattaggcctggcgtaatggttcatgcctataattctagcattttgagaggccaagagggacagatcacttgaatccaggagtttgagaccagcctatgcaactaggcagaagcccatctctaattttttttttttttaattagccgggcacagtgacctgtacctatagtctcagctaatcaagagggtgaggtgggaggatcacttggtcaccaaggggtgtgaggctgtagtgagctatatcacgccactgcaatacagcttggacgacagaaccagaccccatctatagaaaaagcttaaatagtctgggcgcggtggcttacgcttgtaatcccagcactttgggggaccccggcgggcggatcacgaggtcaggagatcgagaccatcctggctaacacggtgaaaccccgtctctactaaaaatacaaaaaattagccgtgcgtggtggcgggcgcctgcagtcccagctactcaggaggctgaggcaggagaatggcgtgaacccgggaggcggagcttgcagtgagccgagatcacgccactgcactctagcctgggtgacagagcgagactctgcctcaaagaaaaaaaaaaaattaaataaatgagaaaaataaaaatgtgcactgtggtcatcagatcattaaactagttttgctaaattgagagaactttacattaatttcattgatttatattctgcagcatctcaaaaatgtgaaacatatcacattatttaatttgatattaaaaagtttctattctatgccacttaaatatcccatagtcatggctgcaataatatatgctgcttgaatgatttctaatgtaggtttcttaagcagagtttcattaattctgtgagcttctatggaaaattttgtgtgtgtaaaatttattgagttgttattatgtggtaggcatttaaaatatttttccatatgtaaatactaaatgacttaattttaaagaaatatggataattaggtaattttaagaatatatcaatctatcctgcatccttgcctataagtagattgtattgagtgttaagctgtatacatgataggatttcaacgttgaattttatgtgcttggttcaatatttggacttccaaaagggccccaaaatattaaaaagttgtcaaactgggtcttcacacaaaatataaagttagcttttatagagagtggagtgggggaggataattttccagccaacaagtagtcatgattaccatccactggttttattctattattggccaaatatagattaatgtactttctccactgttccaatgtataatgtatgaacatgattactgggataatttagaaacaggatgcctttaatcttctgctcagtcaatcagttacaatacataggttataaaatgttctatgattttacactgaatccttaatagaactaattttggagttaaatgagattgggaaaagcgtaaagcccacagagctcacacttgtgtaacaaagacaatggaactttaaccatcgcatatttaattaaccaacccaaacaaacagagaccactctgaaagttgtaaagaaagagagaatacttcagggagcagaaagccagaaggaaagtggaattcaagggtttccagaatcaatatcctttgaaagttagtttcagacttataattagagacattatgcacaattaccttctgcgtgccaatatatcttgtcatgtgacagataaactttgtgtttccagctgtatttgaaaatgccttttactttaaagcagtattcattcactgaatttatgtgtaattttttaaaagtttagctatatgacctttatataacttattgttacattattatggcgtgaaatcctaattaaaatacaactttatatgttaaactttaattacaatctacagaatatgcagtttcttcattttttttctggagttcttgatatattttgggaggaaggtgaacttgggtttcgttaagactctaagtagagaagaaatgtgttttagaaatgggtgtaaaaagcactctgtatttctttgggtatttggtgaagaagagtggtgcatgtggatacattagggccacttgcctgagtttgtagttctattgtccctggttggttgtaggcagagaagagttgccaactgctgagtcggattcagaaccatggatagctccacacgttcagcacctgggagagaaactcttgtcgtctcccaagcacagctgcagctagcgaacagtatgacagaatgatctacttatatattttttcagaagaaaataaaaccatacactagcgatgtatggctttttatattcccacagaggcaaccgtaaagactcagggaagctcaagctactagaagagcctagaggttttcattggctgcttacttttaaagtaaaccttattagccataaaattcaacattcctaggaacgtcttccgtttgattcattttcattactctgatattaaagaggaagaattacttcggttcttgattttgtttagatttggggggttgtggttttggaacataaaagttgttatgcttacttcctggttattgcaacccacctgattcaccttcctaaactaaccctgcttctcagcccttctcagttctactctcattatttcacttcagatttgaagctgtaactgagaaaataagaacccagctgactcaaggcacaggcatagcaggctaatgagctgcaagaacccccccaaattctatcatgcaactgcatgtgttgacaggaatctctggacctttatctccagcaggaaatgagagattcatctgtgttctgcttgagtagattgaaatcttagcaaattccatttagagaaaggggcgtggagaggggctattaggttcaagggggtgggtggggggaagataacaaaaatgaagggaaaagaaccaagaaaaactagaaaaacagcttcaaaaacacgctttcctggcacagcttgtcacatttattttcctaagtctccaggaggactatttgaacagaagtgtctgtataccctgagattcccacgctggcagcctttgagaagcgagaaggaagaggactctattccgccccttgaacccttttctatcctatatgagatggctccttagagatggtggaggagagcagaatgtggctagtgtgttccggagatgagtggcatcggaggtcacagccaaggctggtaactcttagccccacccaccttttgttccttccccctggcgctcagcctcacctatttcaaactctttccttcttttgtactagtcgctcgcaatctttggccttctcatctttggccgtctcatcttcctcgcagcctacggcacctggagaccaaatcaacccccaatcttgcaaccctccagggactcaggcagaaactgggcatgctcagcggcacgggcagctttcagtctttcccgaggcgcggctcagcgctgggcagggacctgcgtgccaattcagttcgggcttcggcacccacctccgctgaacccagggatccgagctgcaccctgaggctaaatctgcacccttaggtggttcattgtcaatcttcaacctgctgagcgccaacagagcttacaaatattcctcattaagaaactgttttcccacctgtgttttccttgcagctaagggtgctttagctactgcggcgtgaggagctcagggacggagccctgtggccggtggccgtagagatcaccttcccagagtagctgtttgtcactgagttttggagatttcttggctggcttccgctaaagcacgcttgagtaatccgagctgtggcggcgcccaagctaccaagataaagagagcgtgtgtgtgtgtgtgtgtgtgtgtgtgtgtgtgtgtgtgtgtgtgtgtgtgtgtgttagggggagagggcggggatagaaacgtcaaccccgccgacccccagcctccttttctctctctccttccagcaaaaccggcacaagtcttccatcccccctcagccattccttactgctctgggcaaccgccaggttaagcccatttgcactgggaaattggcgctgtttgggagaagagaaacagatcgattgcccttgtgactccccgcccccttcccaccccacccccacagctccctccctctttccctcccccgccacctcccctcaccccgcctccttcccgttccccacccccaaaccctctcacccgcggcagtccggtgcgaggccccctccggaaggtgaggggaatggattggactccggtggggaaagcgggtgtctagaagtggtgctaatgggaagagaattctggtttcaaaagaggatgctctgccacaaagagcggctcgcgcgctggcctgggctctagccgaggagagatcccgggagaactccagagctccgggggagcgctcctcggaagaccggggccaacatgcctgtgcgcagggggcatgtggcaccacaaaatacatttctggggaccatcattcggaaatttgaagggcaaagtaagttcgtttgttctcttctctcgccctcgctttctgccttgttagtgcacttggcgtccaccgcttccaaggtggggagaccggcaactccaggctctgtcaacttaagaggctgtgaaaccgagccaggaggttcgaatggcagcgggagtgttcttctgatattaattttgatttacattttagattacggtctccattataggaggcaatttgatcctcctctaccactgctccattatctgccttgctacttaatttcctactattctactatcttaaagggaacgtgctaggataacatgggtttatattttgaggctgttttactgtagactttctgaaagtcggaagcagagcagaccatactattcgaacaagagaatgtaaatggtagtagcgatgtaaatgactatgcaaactatattttaccttggttaaactgcaaagcagtggtatgacacggatgcttgcttgctattaatttatagaagctaaattttgtattgaatcaatgcaaatatatcctaagcagggtaatttggaaaagcagtatctcatctgtgctggttcccgatgcaaatggctcattattcaaaataatatttctattcttttattatccccttaaaatttccatctagaaatttaaaaattgaagtgtaataagtaaatcccacaaagactgaatgcacagaaatttaatgttctcatgtggactaaatatagggaataaattgttgctatataaatatattaatttaaaatcctgtatttgttaacttatcttcggtcttttcttaaaactatattaatacatttgtatgccatatattttg

SEQ ID NO: 8444 - DNA, 6000 bp, Homo sapiens
caagaccctgtctcaaaagacaaaaatatccctggcctggtggctcatgcgtgtaatcccagcactttgggaggccgagacaggaggattgcttgagttcaggagttcaattgcagcctaggcaacatagtgaaacccccatctctatataaaacaaaaacaaaataaaagtcaattagaagaaaatcgtaataaatgtttcaacagatgaagagtatgatcattatagcactggttgcaatagcaaaatttgggagcaatcttcattgtccaacagtaattgacagattaaatccttacaaagggatatcaggcagccattaaaataatactgtaaaataaatttattgacatttaattatatgtcaagtagaaaactctggctacaaaacaagtccccagaatgatctagtttttattttacaaacctgtctctgtatccctctatgttccccattccatgccgtgcctcctgccaactttttcaataaaaaaaatctgcaaagatacatgatagaaagggtctgatagcactgattcatcttggtataaggaattctgagtatttcaaagctagtttctttgcagttatgtgtattttctgatttctctgtaatgaatattaatttcttttcaatttaaagaaacatgttacagaaaaagagaaatcaatttaggaaaagagtgagtgagggatactcgagtacatcactgaggtcaacatcatgcaagactatcaccatagttttccacaaaatattctttggtgccactgtcagaatttagagccagttagattgaatattattctgactcagcatgacatttctttttgctcttatgctaatgcttaaaagcttgaaacaatgcactctattcaatacatttcatcaaatatttattgagtgcctactatgtgccaagtactaagaatacaagattagcaagacatagttttgttgtaatctaagtcaacccctcatagtatgtgaaccactttgaaaatctgagatgattgttctgagattctacagggggaagaatcatataaaacaatgtccaaaaaagttcatactaaaataacctatttatattttccctgttttaacttgctatattttaaacacaatgtagaattatgttggatcattatttaaaaaatacccacgtgtttgtggctcttcactgtgataccacctctattctctgcttgaatcaatagcatttcaacacttttactgctttgagaagaaattattccagtctgttcagtctttgagccaaatctctcagtctgactttgagatcctcactaaaagctctagttccctcatgaggcaaaactgtttctagagtatgtttcaaagcaaagttgtgtaaccaacaattaaacaattaacaaactaaaatagtttaaagttaggcttagtaactttacacatttacttgttacattatatattacaactattttttatgaattaaaatttcgatctcagctaaataatttcagtttcttcatctttgctgtcccattaattattattgctatatccagaaggtttcatttatttatttatttatttgcccaattctcttggcatagagtttatatgaatcagaatgtaaagaagcctgtagatcatcttgtaccactattttgttttgtggaagagaatatttaagccagatgtaaagtaatttgtaggagtgtaagttgttttgcgtagtgtcttttgaaatgtaggtatgtgaaagctggtagctattgttcttagaactttgcaattcagattaccagtctagtgttcttatctgccttggattatttgtcattactgttgggtaaaaccattctttagacctgtaaattgctcaagacactaggcattttttttatggtacttgatgggtcaatttattcatttaacacatatttattaagtacctactaagtgccaggtgctggtcttggcattaatttaaatgttaacagaaagtattaaggagtgagtattgtttcaaatccatgcaaatgagcattttgtggctagtcgtgtgtgtgtgtgtgtgtgtgtgtgtgtgtgtgtaataagtacgtgtgtgtgtgtgagagagagagagagagaatgtttgtttccttcctgtgtaaaatctgcccagttttctatcttaactgtcattatatgtcaaacatatactattaaaattagcttatttctgaagcatgtctacactaaggttcctggattttatttatgatgaaatgctaatttctctttatgaaacaaattctttatttcataattttgaataggatggtactttcaaaaacctgcatctgattagatttggggcattaaatatttcaatatgataatatttttttcttgggcctgcagcattttaattttattgtcacatagaaaattttttattaatattaagactttgctttcagaatgctttgaaatagtacaagcaacgttgtgtaaaatagtacaggtggagcatccctaatccacagatccaaaatctgaaatgttccaaaattcaaaactttttgagcaccaacatgacaccacaagttgaaaattccacacataagtactttacacaaactttgtttcatgcataaaattatttacaatgttttataaaattaccttaaggctatgtgtataaggtgtatatgaaacataaatgaattttgtgtttagacaggtctcatccccaagatatctctctctctctctctctcactctctctcactctctctctttctctctctctatatatatgacactcaacgtgcacaagtaatgccacactcagaaaaactgcttccttctttaaattgtctgtctccattgtaaaactgacagtcaaattttagtaactcctgatcttttttgtttcttctgttctttttagactcctcatccagcattttggtcctgtttgctggctctctcttttaataggtctaccctagcttctcttttcagttgttatttgacgttactagtcttgctgtcaatgcatctcagtccttggattccagattgttattctatatccatctgctctgtcctgattgtcagtgaaaagtgttgctcttcgcctggtgggacatcaaaactctgacaatctttggctcttcattcagagatgggtggtgcgtgcaaaagggtacaggtttcttggttatacatttaggataccttacaaattttccaaagactaacattaacctctggttaggggtaaacgacaaagtggcacaacgaagaagaaggagaaggagaagagaatttcagtagttagtattttcagttctggacctggacctaaggaaaaacactgccaagttagtatatcaatacacacaagtatctcctgaactatttttttgtttgtttgtttttggagggaaagggagcttggcaattgcttgtaggtactgatattaaaatgttgcaaatacatggaggttccttggtgctcgcaaaataaccatgacatgtaaaacaagcaaagaactacctagtttactaaagtcttaaaccctaactcatagatgtcctagtataaaatagcactatggatgctaaaaccaatgtcttagagtagtcaaatactaaagatacacttgttgatactatactaaactgtattttaaaccttatttttaggtcacgcatagcactaataaaacagtgaataagcaccataagagcatgtcaaaatgtaggaggaaggccacaactaaacttcatagtaaaacctaccaccatgtgattaaacacgacaccaaaaagtttttagctagttttctatttatatccctagatatctttgggatagggccaaagaaatgagttcatagaaaggtataaaggccattttaagtcctggttttgggtgtgtcaatgtttgttgcagcagcagaaggaaggctgaaacagaaagttgtgtcataaatggaacaaatactgtttaacaatttttttttgtcttaaaaacagcaaaacccaccatcttcctggagtctgcgttgttctcttccagaatagatgttgagcttttaaacaaacctgcagtagaagcaagccctctccaggaaatcccaatctctttccaaacagggacagcaaaggttctctctgttgtggctgtttttccctctcttctgggaattggtttgccttctgagagcatcccaggaaggggaggtgcgccccaaattggcgaggctctgccaaataccaaaggctcttctttggaagaagactcctcctttggacgtgaggcgcccctaccagagcgcccgcgtacagaaacggaaaccactagctgcgctgaagtgagtcaagtgatgaaatcaagactacacgggaaggaagctcacgaaacctaactggtgacagaagctgctgaaccctgcccgaagaaaccacatgagccagcagttgctgccctcccgaagtggtcctcggaggcagcgcaccccttcattttggcgaaccgaggaggaagggaggaaccgtgtgggggaaatctagaacttctggttccccaaggacccagcagactgtgttctggctacaaggtgatcactgccaccaggtcagtgcaggattcctccaatgtagatgggccgggagccacaacttgcgcggagcagcagcctcgccgaccactcagagagaagccgcgcgacagccaggcttggcccggacggcgcccccaccctgcgcgcgcgatccaaggttctcacctggagcgctcaggtagggctggggcggggcgggaggctggcgcgcaggcgcggaagtggggcctcgcccctgccgacgtcgcaggctggagctcacctgggagactccaagtggaagccgagcctcggttctgcctctccaggcaacgcgggaggcccagcgggaaggcaggaggcggcggcggaggaggagctctactgagccgcaactgtggcgacagcaaccggagtcgcagccgccgccacctgcacctggcgcctagcccacgtccagcgcctgcccggccgccgcttcccgccaccctgccctgcccacccgccaggtaagccggcggcaggcggagggagacgcggtacccctgggctgcgttagagcaggcgggaggacggccgcaggggttcacgtgttggggacagggctacggtccaggtggccggttggagacggtctcgagagcagtgtgtcggttgcccctggagagatcccgaaaggggcgccctgggccaaggggcaggtggcgcctcgggggggagcccggtcacaccctctcgcccacggtgcccccgccagtccctatggggcggcccctgaggagctggacggagaccaaagacctggtggccccggacttgcccttgggagggtcgcagcgtggggaccctgagagggagggcccggcgggaggcgggcgcgcttccactccggctagcaggttgcctgtctcctccagcctctctgcccgagaggacatcccgcgacagcgaaagacatggctttgccaggcaactttcctagccggggaccccaaacagttctaggctgcaaaccgcggccgccgagccatttaaatggtttccgagtggtttggaaagggctctgtggccgggacgcggacacccctctctctctgtttcgactctgcacttttccgggtgcgctctccaggccagagttgggcccactttcctgatcaatggagaagagttcttttcttccgtggcgggaagaaatccaactgccacgcaccaaccactcaccatctcgttagaggacctgttgacttaaggacctgcatatcgcggctatggtttgcctgtggcatatgactcaaaggttcaaaaaaacattgtttcaggatcctgccacgtctaagcttgggtgtgccaggcccagattcctttccctgcctaattaggcttttctgaagcctaagaattg

SEQ ID NO: 8445 - DNA, 6000 bp, Homo sapiens
ctacagagggagcataaaacatttaataatacattggacttactcaactcactatttcttactttcgtccttaagatcatcttaaaggaaacatggtttgaagaccataatgaagtgttgtatgtgcccactattttactctaaatggcccacaagtgaggcctgaaggaattccaggagccctacccagacatgatgtggaggtggagcaaactaggcactgagccaaaggggatcagtgatagccagcttttgggagagccagatgaggcagagagctgggatagggtggatctacctccaggttcaggacattcagggcacaccactgagcaggagcatcaggtaccatgacacagggctggtctgtgttaggataaagcaagttcttaatgggctttgaatccacagaaactttgcttgtgatgtccagatgacggccccatcccttctgcagaagtcagagttttcccagaaaaaaagcaatgactgaactacagctaatatttggagaacacccacatagttgtactctctatgtatttctaaaaatcattaataaaattttattatgcattattattgatatttcctttgtcatattcattattttcatttaataacttatatgtttaaaaaatagtttacccttattgtatataatttagaagatgcagaaaagcatgaggaagaaaatgaaaaccaccctcattcacatttgcataacctacagataagcactttttatattgtacttcttccagtcttttctacatgtgtacatgacaaaattaggaatacactaattttggtaggtaaaaaaatatacacaattcaattaaatggctacttgggggaggaactcccaatccagaatctatggcacagggaagttcaggcaggcctcatcatcctgtgcaggtggtattctcactcccattttacagatgaagaaactgaggctaatggagattaagtaacttgtccaaagttagatagctagtaagtgaacacaaacctttgtgatttcaaagaccatctcttgagattggttaacttttaactaaacctcccagacacacagcctgaccttatcttccaatctttcttgcagttaggtgtggttatgtggcacagtcctctccagtggaatctgagtagaagtaatggatgccacttccaggattggcccacaggaactttccatacaaaatgctccatattttctcttccctgtgtgatggatacatgtccatgtccaaggagaccttaaaagccacatgttgaggatggtagagcttctgtcagcctgggtctctgaatgactgcatggagcagagcacctttgcccaacaccgatttccccttattcaaggcctactggacttcacatgaggggaaataattagcaagtatcactaccttaaccaaatcatccaacaagtaagtggcaaaaccaggatctaaagccagttctttgtgacttcacaagcctgtgctcttttcactataccattctgcctccctctgcagtcaactaaactacagaaattgtgtccttccacacagcttgctttaaaaatacataagctacctaagaaagctctaatttagacatttttctctctgctagtctctatgccacaaaaaaacatagccaattatattgtgttaactgactcatgctggctttacacaatttatattgattttcagggtggtaataaccagcttctgtgattggtgtgcatgtgcaagacttcctgcctaacccatccttcttgtggctcagctttgtaaacactggccctgggtggccgtgaacagaagttcttatcttagactgcatgcaactcatcctactggcactgaaagcccttctttgtctttcttcacctacttaagcaaatttacaagccactttttgcctcttctctcagcagccatcttggtcctttcaatgttgcctgtgtgcactcatgctgtatttatgacctggtccctctcatactttgagatataactcaagtccttccttctttgagaatccatactgatgggtcactttttaaatacttaaggtctgcatcaaacattataacatttgctgttcttcttttttattcttacttggtttatatactaagctttattatccttttaaggttaaaactttctcaaggacactaactgtaatgtgtacaacttggtagccagcgtaacatttgacatagtgtcttgtaaaaagaagatactcaatcagtttttgaatgattcaaagagtaaaataatggcaacttcttttatctcttccatagtgcaatcttcaatattttttaaacaactattggctgaattctaccattgtggtttagagctttctctgagacatttttgctaaggttttgaaacaggttccaaattggtccacagtgacctccaaggctctacaggagtggtcctcaagcttcagctcattgggccccactcccagagtttctgattcagtaggtctcaggaaaggaccaagaacatacattcctactgggtaatgaggaggctgctgctggtccagtagtcacactttcagagccactgccctgtgagctcatggcactccatgattcccgccacactgacataatccccagctgacttcagtcttgcttactccactccaggttcagcttccttacatacaccaggcatgctcctgcccagagctttgcccatgtggtttccccagatacccatgtacttgttcctttacctccctcaggtcattcctcatatgtcaccatctcagtgggcccttccataaaacccagttaaaaatggcaacatccttctcccctcacacgctaactgacacacacacatacacaaacacactctctctctcacacagcatacgtacacacactccctatcatatccctttcctgcaatgcttttctccataccatttacaccatctgatgtattgtatgtgttacttctttgtctcctctctatactgccccctccctgcccccagaatgtaagattcctgaggcagagattctcgtctgtcttattcattcctgaatcccagaactgagaacagtgtttggcacataaacattcaaaaagagccggtattttaattgggtgactgtagggaccacaaccctacctattttcagaccgtgaaccataaagaagacaagcttatagctgaagtgaattaagcacgatcaactcagtactcacactgcccagatgtgtctggccagcatgagggtgcagaggaagacaccctgaactctccagggccctggacagatggccactctgtcttcacttttctcatctataagatgaagttgttggatgatatatcaatatttacaatgttgtttctagctctaaaactctatgcttttatcttcccttggatcttcatggcaccagaaggaaagtcttaggacccttggacctgtgagcagatcagctatagtcctgagttgacaaatttctcttggcatttttaccctttgactgctgtcaataacttcagcacagcaaaggtagcaaaattctattgggaatcttttcccaatcaaagctacagccccatagctgtgttgcctttttggttttgtgtgaagcaaaatttttttcctgggtcctaattggtgccaaatccaatattactacatttgcgtcaactcagaagtcaacccattcagtttgcatagaggaaacatctagaaatcttgcttttctttgctgaccttgatatatttgagatttgaacatataataacatataaaattatatgttataattttgggttttatgggctaagtcataaaccatcttatacataaattccaatagagaaaaaatggtggatgctgaattttaataaaaaatttatgacagagaaacctaaaattgagaaaatttgatcttacagtttaatttctgcaaattaagaagcactggcccatcaattgcatttcagagcacagagtggaagaaggttagcacagactggcatgtggcttcacatctactagttgttacaccttaggaggattatttaacctctctgtgcttcagtttccccaactataaaatagaaatgacatgatagcacccaactcctagggctgttgagaggcccaaatgaggtgatacaaataacatttttgaagtgggccaggcacccaaccaagtcttgaccaatgttgcctattattattcattgctgaaggctggagtgagaggcatttagggaaaagtaagctcaggcaaaggagaaaaaataagaacattgtaggaaaaatggaaagattcacaagaagggagaggaagaggcagcacaaatatattggaggagctccacatgcttatttgactcaagacctgttcatttgaacctttagaaaatcgttcatctttgcttatacagagcttcatctggtgtgtccatgccagggtgcaagagttgtctgtgcactcagacttttgagcaaggctgtttcaaatgttcttttagggtatttgtctccacaaaactctatagctgggccaggagcatctggatcctgcaaccagggattttccaagagcaatcttttatattgagggggaaagtttaaaggtattttttttttttgtcttgttatgtttttaagtaacttttcacaactacaggcctgtaaaaaataagggttgggatagcctgaattccagggctcttgctgggcccactctgctcaatttgcctctcgttccaaggtgaatcagcaatttccaaggcctgttgacaccctcagagggtttcccaagcacactctgtgtttggggttattgctctgagtatgtttctcgtatgtcactgaactgtgcttgggctgcccttagggacattgatccttaggcaaatagataatgttcttgaaaaagtttgaattctgttcagtgctttagaatgatgaaaaccgaggttggaaaaggttgtgaaaccttttaactctccacagtggagtccattatttcctctggcttcctcaaattcatattcacaggtaagtaacttatacttgtctctgcaaatccattccctcttccctttaactcttactttgtggagtggagtgtttctggtttattaaacattggtctcttgtccagtgtaaacaacgctacaatacttggatagaaacttacaggatgcattaatgatttcacaacattgtatacaatacagatgactcttggttgctgtcttctttatagcaatgctatttcatgtatcaatctcttagagagagagagagtggtgtacatgggtgtgtggtacaaatggccgaatagattgaataatctgctcaaagtaaaaataccagtgggcttcttttttaacttggctttgtgaaagcacaattctgtttgctctgataatcacagattcaatgatcacaaattctacccttgaaagctggtttaatgcagaactacaccgactttatcttttctccaacaccgtactcatttcttcattgtcccggttttcaaaaatatagatgcaaaaaaaaatgagctgtggatgcatgtttagaggggagaaagtttgtttctaggatctaatttcagtttttaggtcacccaagccagtgggagtcacatattgctaatggcttgagcacagagatcaaatattattcacacttcagactgggaataaaagacagtatttgtcaacattttgagggggaatagctttttagagatgttagagacaaattatagtggttatacctaaaactttttaatattaggagttagtagtggtttttattaaacatttgaagtgataacttatttatgagctgttgtttaatagaagttcttttctgtgggcaacctcgtcccctcactgctcacccccctcaccttggttccccctgctgtgctctgtaacactgtgattgtctctggttgaagcc

SEQ ID NO: 8446 - DNA, 6000 bp, Homo sapiens
tattgattggaatagtttcagaaggaatggtaccagctcctccttgtacctctggtagaatttggctgtgaatcaatctggtcctggactttttttggttggtaggctattaattattgcctcaatttcagagcctgttattggtctattcagggattcaacttcttcctggtttagtcttgggagggttacctacgtatcttaatctcaccttcaaggctgcgaaagcacgtagtacatgttcgaagaaccaagtggaggccagggtggctgaactgtcaagtaaagtttgagatattgtcaaaggcccaatcatgcaagggtttgtaggctatgctaaaaatttttcattttattgtggaaaaatggaaaagtgattgaaaggttgtaatcaggcaagtgtatggttggcataatgactaaaaaagattattctggttgcagagggagaagaattttgagaaggccatgggaacacaacaaatgtgacaagtgctgggctgagggaagtaaagagagttctgagggcatgcatatctgattttccccataacatcctctagagatacttttttcccagtccaagatccaccctagggtcatgcactgcatatttctaaactgcatatctcagcctttctttatcttttatgaccttgccatttttgaagtatacaaaatatactgcaaatactgtactttagtacttaaatgtcccttagtttggacattctaaaaaatgagaaaacattggtttgactgatgttttctcatgcttagatttggggcatgcacagtaataccacagaagtgctgctgtgtccttcagagtgtgtcacaccaggaggaacatgatgtcagtttgcctcatattagttttgattgttgtgttgactttgattccttggttcaatgtagagcctattgtatttaccacatttctagcttctataaatataatgccttaatatatataggggagagagagacaggttctcactggagtgcagtgatgtgatcatagctcactgcagcctccaactcctaggctcaagcctcaagtgattctcctgcctcaacctcccaatgtgctgggattacaggcataaaccactgtgctgggcctaaacttcatgtttaacatctgtcctgcatgcacatgccatatacactttgttctagataatctgttaatatgcctgacatattagtcatcttgctttgacctcctgcttgttttataaatacaaattagtcagtcctaaacctgcttactctgccttgtctgttcctttaggtggaaaccatagtaaaggagcttgcccacacttctccccttgccctctgcttccctgtgtggtcccttgaggcaagatgtgtactccttctcttgggatctgtgaatataacaaactatattttcaatggcagttatcttttggtctgttgactttatcatatttaaataataatgaaacatattaaaatatctgacatatttttctgcttaaagtcactttttccctttttaatgaataagtaatttgtggggagatactttaaacttttttggctgagatgcatatgagaaatatattttacatggcgacacagtgtgtgtgtgtgtgtgtgtgtgtgtgtgtgtgtgtattggtttgggctccatcctgctgagtttgaggccttaggacattggattggagctgttcagggggcagttggctctcaggaggaaactcaggaggcactcaggaggaaacacacacatacacacacacacacacacacacagaaacagtagtgttataaagttatacatatcttttccacatgaaagttattttggtttctatgttgttatatttcatttgaatataattcttgccttgacctgctaaattgatttcattaccctctaaaaagtaattacctctgtttgcaagcactagtttgatagaactaccaagttgaattgtctggttgccaaatggaaagtagatgggagggggcaaaactgatagcaaggagctcattctaaggctctccctataatttagattgatgagtggattgataaatttgaggtaacagaatttcatgattgattggcaatgggggtggaaaaaagaaggagtcaagaatgatgtaaatttcagcttggcttctggggcaatggtggtgctgaagcttcttggtttcactttcacctgtctctttcggttgactgctctgaaaagtcctatatacatatatggagagagaaatgtgaaaactaaagaaattatctttttgcattatagagaaacactgctggcttaaattgcaactgaattaacctgggctttcccagatactggtccatagatttaatcaccccaatctagtaacaggcattctcaggtatggatgccagagataaacacgtgcatggtgcaggctgttttcaaacgtcacgaattggggattgcattgagaaaatgggttattctagtggaaaagtgtgtgggtccacatacagagtgctgcgaatgatgggctgtgctccgctaggtggtcccccatccctaccccttttctgctctcctacctcccgttctccctccctcctttcccctcttctgcgttattctgggattaacggcggggtcggccccatacacaaacgcagctggctagtacggtcagcctgagccctgctgtgcaaccacgtcaggaattccagtaagttggcaacactggagcacaaagacaacaacaattgaggaactcttcagtacagaaaggaatgtttggagccctggctgctacagtgaaagggcacacacacacacacacacacacacacacacacacacacacacacacacacacacacacgctcgcgcctgcgcgcccacgggcgcactggagggagcccagcccctcccgcactcgcgctcctccctcccgccagccggcggccgctctttgtaagtcggaggtgcggggacgctcattgactatgcagcgcggccccagcgggcgtcggaccggcttgaccccggcgcggtctcgtaccatcgcctcggccgcccggaaccggcataaatcacccgcgaagactggagtgcagcatcaagccccctcgccgcctccctcctcccgctccggtccggtcgccccctccctccccagaccccggctctcctgtccccagtcctgtctcctccgcgccgcacagcgcccaacactatgcagggaggcaaatagagaaccagtgactttggccagagcacagacctctggatttcccaatccaggaatctctcccactctttcccacaacgctgcccgctccacctttttttctttaagcctaagttttctctttttgtgtctatttatctctttttgtctttccaaagtaacacctatcctttccctcccctagcccccacacctaaagctgcgcctaccactgcagcccacggaagctacgcgatccggactgttggggtcagcagagccccggacgacctgtgccccggggaaaggggctggcagtaattggcaggttctcgcccctggggaagggaggcagcgggaacctgtccagcgaccacgtgcgttcagggctgtctcctccatgcgtcacggccccttcgctggagggaaagggctcctgacttcttggaccaggatccggagcctgggactagctgccgcgctggttcaggggctggagctggagatgatgggatggcctcaggcccgcaaacagccccttctcacacagggttcccaccaccgggaaataacttgcatcaaccctccttttttacccctccctgtgggctctgatgtcacgtacaggctgaggacgtgcgctgagggcgggtgtaaggccacttgtgcttttggcttccgggccccttgccagcctgtccaaagcggccccaaagaagggaggctaggggttccctgaacctctcgtgtttctccttcttataaaagggtaccggaaccatggagaagacgttcgctctttttcaattttgcttcaaaatgagcagacttgtaagaagcacgatctggccatgacacctgtagatgtggtgctgaataattgctaaataaggatccaacctccccaacaaagatccacctccctctctaatttgtaaaaacacaaagcaccccatctcagcagcctgtatcctatcaggggaaaccaagatatccgaaggagcctagagagatcaggccaggaatgaaggtcacagatctccatccagcaggctctttactccttcccttccctacccccgcctctttccctttctttctctttccttcatttttacttgtctggttgtgctttccttttccatttcttattttttctttctcttctctattcttgactttcctcctcgtccatttctttccattgctcatttagtaaaactgcgtccgtgcagatttccccgtgagccgcctcgccggcttctgtgcggggcaaaccctgcggagaggcgagggcagcgcgtgtgcacgtgtgagtgtgcctgtgagagtgtgcgcacaggagtgtgctcttgtatgcacgcgtaaaggggactgtgtatgtcggcgttgaagtgtgactgtggaatgtgcgcgcgtgtgtgactggcgtgtatgagtgaatctgtgtcagttggtgtgacacttaggagtgcatgcgcctgtatgagtgcgtgtgtgagtgtgcacacgcctgtgtgagtgtccctgtgtgagcacgcgtgtgttcgagtgcccactcctccccgcgctgcaaagtgcagggggcgggccgggcggcagggggcctgcccgctggattcccgcatgcttgttccggggcggtcgggtctaaagggctttatgcactgtctggagggtggggactggcgcgggtagaaaacgggatgcctcgggcgtgggggcaggcttttggccactaggagctggcggaggtgcagacctaaaggagcgttcgctagcagaggcgctgccggtgcggtgtgctacgcgcgcccacctcccggggaaggaacggcgaggccggggaccgtcgcggagatggatcgcgggccggcagcagtggcgtgcacgctgctcctggctctcgtcgcctgcctagcgccggccagtggccaaggtaagagcccagccagagcctctcgtggagcccccacttccccggctgtggcagggtcgggtccgcgggaggccggaggggagagcgtccgggcaggggctagggccgggcggcggcgcgggagctgctcccggtggggcgctcaggttgcttcgcgaagccggagcgggagcgcccctcttcgctcgccaggaactgagcggcagcaaacttgagaaagcagccccgccagtttcggtgacagcgcaccccacggagaccctgtctttgttcccacgggcgttggtccgatgctcctggaaagcactttgcgggagaacgaggttctccgccgtttgcagcctgccctccctagcggagttctctgctgggcggcgcggtcccgggctctgctcagagcgcagctttccacctgcagcgcccctcccgggatcccttcgcgcgcccagggccgcgggccagagcactcctcccaccaccggcgaaacttggtcccgcggtgacccccagagaccgctctcaccatacagatcatttacgagccaagataaggccgggaggtgggattggccgagagagtggctgagggactggagtcttttcttgaagttttcctttccagctgggagctgggggcttttgtgttgatgaatggggcccgtctgcatggccagagttttggggatcgaatgcagaaagtttctagtatgaagtgctttaaacttctctcaagttgtccgatagtttatgttttaacagaaacagagaagagggaaagagagggagaaagaagcggagagaataaaactagtaagaagggaagaggagagagcgta

SEQ ID NO: 8447 - DNA, 6000 bp, Homo sapiens
ggcagagggagaggcagaggcagaggcagaggcagaggcagaggcagaggaatttatcaatttcttaatgtattgttattgctttttaggttttgattaagaaaactttacctacctccaagttacaaagatagatctatctatctattctatatatatacatatatgtgtatatatatatgttttatatatatgttatatatatatgttttatatatatatatgttatatatatatatatatatatatatatatatatatatatatatattagagacacagggtcttactgtgttgccaaggctggggtgcagtggctgttcacagccatgatcatcactacagccttgaactcctggcctcaagtgatcctcctgcctcagcctcttgagtagctaggactccaagcacatgtcatggcacctagccacaaagatactcttttatgttttctactaaaacctttgtttataaagctgttgggggcagctttataacttcagcttttgcatttaggtctatgattcatctcaaatcaaatttagtatatggtgtgaggtagggatttaggttcattaattttcccacactgatatctagttattctagcatcaattgttgaaaagtttccttgcccccactgaattgctttggcaactttgttagaaatcaaatgactttggccaggcaagataactcacacctgtaatcccagcactttgggaggccaaggcaggaggactgcttgaacccaggagttcaagaacagcctggtaacatagagagaccctttctctacaaaaattaaaaatttagctgggtatggtggtgcatgcctataatcctagctactcaggaggcttcagtctgaggactgcttgaacccaggaggtcggggctgcagtgagccatgatcatgccactgcactccagcctgggtgacagagtgaaatcctgtcttgaagaaaaaaaaaagggaaaagaaagaaaagaaaaaaacaaagaaagagagagaaagaagaagaaagaaaaaaacagaaagaaagaaagaaaaaaggaagaaagaaagaaaaaagaaagaaagaaagaaagagggaaagagccaatgactttataattttggatctatttctgggctctctattctgttccattgatctgtttatcaattcatatgccagccagcagcactatgctgtagcaatttcttaagctttatagtaagtcttggagccaggtagtctaagtcctccaactttgttccttctcaaatttgctttggctattttgggacctttgcttttctcccacacaatttttaaagtgacactttcttctttactttggatcaggtccaaagtattcttcctcattgacctctaagtagaagagaaacaaaaagcatccaaataaatcgacaggggtagggtaggggtgggtagctgagggacctggcaggatgtttattctcccagttatatatttctgactggagtgagaatatgtggcaagccacacagtctttaccccatcattacctaaagctgccttgggcactggcacaggacaacaggtttcaatatcattcttttcacattattcattaaaaaatgaatagtaagctgggcgctgtggctcatgcctgtaatcccagcactttgggaggccaaggcaggcagatcacctgaggtcaggagtttgagaccagcctgaccaacatggagaaaccccatctctactaaaaatacaaaattagccgggcattgtggcagcatatgcctgtaatcccagctacttgggaggctgaggcaggagaattgcttgaacccaggaggtggaggttgcggtgaaccaagatcatgccgttgcactccagcctaggcaacaagagtgaaactacgtctcaaaaaaaaaaaaaagaaaaaaaaaagaatggtagcacttgcctcggtaaaatattctctatactttgggaacgatgctatttctcttatgtttcctgtagctgcaacccaagtttttttggttttttttgttttttttgttttttttttttgagacagagtcttgctctgtcgctcaggctggagtgcagtggtgtggtcttggctcactgcaacctctgccttttgggttcaagggattcttcttcttttttttttgagacggagttttgcccttattgctcaggctggagtgcaatggcatgatctcggctcaccacaaccaccacctcccaggttcaagcaattctcctgcctcagcctcccgagtagctgggattacaggcatgagcctgtaattttttttttttttttttttagtagagatggagtctcttccttgttagtcaggctggtcttgaactcccgacctcaggtgatccacccacctctgcctcccaaagtgctggaattacaggcataagccactgtgcccgggcttttttttttttttttttcccagagacagagtctcgctctgttgcccaggctggagtgcagtggcacaatctcagctcacttcaacctccacctcccgggttctagcaattctcctgtctcagcctcccgagtggctgggactacaggtgcacaccaccacacctggctaacttttttgtattttagtagagacagggttcactgtgttgcccaggctggtcttgaactcctgagctcaggcaatccacccgccttggcctcccaaagcactaggattacacgtgtgagccaccgtgcctggcctcaagagattcttctgtctcagcctcctgagtagctgggactacaggtgcacgccaccacacccagctaatttttgtatttttgtagagagggggtttcaccatattggacaggctggtcttgaactcctgaccttgtgatccacccgccttggcctcccaaagtgctgggattacaggtgtgagccactgcacccggctgcaacacatgttttacacaaacgcaaggcactcaataaatgtttattaactaaaatttggctccttttaaatcatgaaattagagtgtttgaagaagcattaaagctcatctagttcaatcctccatctgattatatagtgtcctactaaataccaggttatacataattagtatagtgatagagtactcacagccatatatgtctagagcagctcattccatgaattccttccaaaattcactgaaaagaaaactgtttgttattgcttcaccaagggaataaagaaggctgtggtccaaaaataagatcaccatcatctccactgcataatttataggatttagagtcaggctgtgaggaagacagttcaggaaaagacataactgcaggagtacaactatttcttctgatttttgatacccctctcttccatttccaccaaaacgagaatttatttcaatgacagcaaatgttcatatagggagaatagttgtacagtatagagaagccctaaagtgtgtcatttatctagtgtctaattataagtggcttgggcgaaaccccatagctactaaaaatacaaaattagccaggcatggtggcgtgcacctgtaatcccagctacttgggaggctgaggcaggagaattgcttgaacccaggaggcagaggttgcagtgagccaagatggcgccactgcactccagcctgggcgatagagcgagactccgtctcaaaaaattaaaaatgaaaacatacacagggtcgggcgcggtggctcacgcctgtaatcccagcactttgggaagccgaggtgggcggatcaccagaggtcagaagtttgagacaaacctggccaacatagtgaaaccctgtctctactaaaaatacaaaaaattaactgggcattgcggcgggtgcctgtaatcccagctactcgggaggccaaggcaagagaatctcttgaacctgggaggtggacgttgcagtgagtcaagatggtgccactgcactccagcctgggcgacagagcgagactcagtctcaacacacacacacacagacacacatacacacaatacacatgtgattggggttgtggagaagcattgaccatctgtaagcccctagagggtgggggctataggttatttgcgttttttacaagcaggaccatgtcaggcatataatggatgcccatacatgtttgaatcaatatgtagcctaatacagtgatattggcaagacgggtttagaaacattgttttggttcaagatagagttactgcttcttctacttcttaggtagggctagaaatcgaatggagaattactttctgttcatgtatgggcaagcgattcattgccagccctgtcaaagacacatagagttttttttctcattgcacacaggatttgggtgattaggaaagtggagcgagtctactaataaaccgttgtaatagcacgcaaagcaaaaataaattcagcgtattcgtcccatgccaatttaggagcatatttctcaaattatgtttacgtaggttttccctagagtgagtggttcccaatcttgttttgtcggtatttgccatcagttgtcattaattcattgttattaatgggaagtgctctttgatccgtcggaaccttgctcagtataggccccaaatgttcctttaagcctcggggaaaacgactttggctggtcggtgcccaaagccacacccactaagaggccttaggaaacctggggctttcctggcggcgacctagctgtggcaaccacgcggcgcgtcgggatcccatgggtcgcgcttgttttccccgtgggaggcgcgtccccctcctccgcccggccggccggccctggaccagctgcctttctggccgggacgccgggcccctttccgcacgcggcgcgccccgagttcatttgcatagggacgcgcgcggcgccggcgagagggagggcgggcgcggccgggaagacggcgcgcgcgcgccctgacagctcggccctgctcgctcactcgctcgtccccggcttccgagcacagcatggcggtcaaggtgactccaactctctgctgctgcttttattgcataagagacattccgagcgccctgcctgcagccccccactgcttcccattttattcattgtctaggtcttagatagcttgtcctggggctccggcttgctgcggggagagctgtgcggggcttggaccggaggaggggatgcccggctgggggaggggaaggaggagggattgtgagttgaaggggcttgtacggtaacacgggtcagtgaaggaagagtaatgtcctgtcctaggtgcatgggattgtgagtccggagttggagggcatcagaaagggtgtgggaggaagtggcaagtaaagctggggatacctagggtatcagtgaattgcggtgggggagggagtaagtattgagtaatttggggcctcaataaggccgagggcagtggttggcttttgcgttgcagattgcagggtatggaaagtatttgtatttgtggcagctctcatattttaggttggatggggagagggacgcggagataattacatgttgggtttgctttttatggagaaaggctgctaggccaagtgattaatttgggtgatttaactttcctgttgatctactcttgttagcttcttgatttgaaggtgggtggttactactgtgttgctagtagatgtggaataaagtaaaagatcctcattgccttccctttccagtccagaggaagcactgtccgatagctttgctgtatcttaggctattcgcacctgtttttctgccctctagtcacagttatccagtttgacagttcttatcagcaattagggcttttagtttgttttaaactaaatgataaaagataggagcattgattgttagccatgtgacctctaatctgaagagattgtgtggtctctagtgaagcattaactggcttttttttcttttttgcttacaggtgcagacaactaagcgaggggatcctcatgagtt

SEQ ID NO: 8448 - DNA, 6000 bp, Homo sapiens
aaattgaaaaattaggaaattacttacatttgagatgggcaagaattagcagagggatttgatttcatttccacatacttgttcattttcttttcatgtaagtagtcttttatattaattatacactatgacatacaattgttttatcctcaataactagcatatcttaccagaaaagaaggacagaataacatttattttattatgacattgttttcatgtaactcttttataaagtttagcctagacctaaagaggacatggagacatacatttactttttgtttcttactaaattatttgtggcccatttagtaaatattctagtccagtatactagatgtcattaaagtggttaaataatttgtagaacagtcaaaaatgaaatttaagcacaaaattttctacactagaaattgattagcagtgtaggcagttgatagatctgggagtgttaggatctatttaagagatacctagaaattttttctatccaaatcatgccatctttcaagtcctagctcaagtttctcttcagtaagctactttctgaccaggacaatctcttttctaatgcgatttcccttagtgcatcacacaactttgtcctgaaatgtgtactaatttgtatttttctctaattttttatataagtcagtccaatttctcatatgccccaattatattgcaaactcttaccttttccctgtgtcctcacaatgttcaaagaaagggcatagtatttatttgagctaacctcaattgaatgtcctgtaaaactagtgcaggttcagaggtttttttttcaaagagaaattgataacaaattaaagccaataataagacacaaaagcttttataagaaaaactaaatataataacagaccccagaatattttaaacttatatttctgattttcatttcaacaatttttttttctcacaccagcatgagaaggctggtgaaacttttgcaggctattaacatttaaaaaaaaaatttttaagacagggtttcatttacatcacccagtctggagtacagtggtataatcttgtctcactgcaacctccacctcccaggctcaagggatcctcctgccccagcctgccaagtagctgggactacaggtgtacaccatcatgcccagctaatttttgtattttttgtagagatggggttttgctatgttgccaggctggtctcaaactcctaaactcaagtgatccacccaccttgacctcccaaagtgcgggtattacaggcctgagtgagcatgcctggcctaaaatgttcaaaagtagataatttaaatatctttccatgtggtcagttagaattaccttactaaagttaatgatgacaatcctactccacctcaatacttcaaggaaagggagttagtaaccaagacctgggcttctttctatctggtttgctatgagctacacttggaattttaaactgaaattccccattttaagatgctgctaccagatggatgtggtggctcgttcctgtaatcccagctctttgggaggctgagatggatcgtttaagcctaggagttggagaccagcctgggcaacacagggagactgtggctctataaaaaatttaaaaattagcaggtgtggtggtgcatgcctgtagtcccagctactcagaaggctgagatgggaggattgcttaagcccaggaggtcaaagctgcagtgagctatagtcgcaacactgcactccagtctggatgacagagcaagaccttgtctcaaaaaaaagagatgctgctacctccacgtagatctcaaagaagtagtgaatatttagcagacaatgtttcctgttttagttatgtattactaaatagatattagcacttcataataaacaaccctaaaacttaatagcttcaaatgacaaagtttcttttttttcttttagcaccagagtccatgaggcattttatttgtaaatatgtattacatctctaaaaaaagaatcccaggattttacctcctgtgtgttttcttcttgcttcttcatggtccatgataccagctgaggttgttagtacaataaaaccaaaccggccggatagaagcagattattctgccatttttccagatgtttgagttgcacatcaaatctggggctgattactcaacgcttgtttagcctacctgtgaggttcacaacaatttttcccagctctgtaatcatcagtgattcaaatttgccaatgtaaccatacttcaccattacagtgagaaaccagatgatgattttggagcacagcctaataagaacctggggtttgcctcttctttcggcattgttgatgctcttgagagcatcaggcaggacattcatgtgcaccattgtggcggcacgaaaagatggcggaaagagccaaacgacaaccctttcattgctcttgacaccgtgggtcaggaatttgggtaaagctcatttggatggctcatttttgttcctcgtggtgttgggaaggcttgacgagagctagagatccaagaaggcctcactcatgtgttggacacctcagttctctttggacttttttctatccaagtggtttctggagagggctatatttgggagtgatctgtcatacttctctttgctatcggatttctatcttcatcatgccatcatcactcaggctatcatcatcacccggtcttatcagatattgccaaattatgatgtcataacttactatgactgtccccactgtccatgaaaaaacacagaaaagattagatacttctcagggaggtccctgttcatctttatggcctcactttagtcctctcagaaggtactctttttcttcaatcttcctcagtgcaaatatccaccctcaatcaacatcaacatgggttggtgttactccaattcactcctctttttcttttctttttttttttgtttttgtttttttgagatggagtctcgctctgtcacccaggctggagtgcagtggcgtgatcttggctcacggcaacctctgactcccaggttcacgccattctcctgacttagcctcctgagtagctgggactacaggcacctgccacaacgcttggctaattttttgtatttttagtaaaaagacggggtttcaccgtgttagccaggatggtctccatctcctggccttgtgatccgcccgccttggcctcccaagtgccgggattacaggcgtgaaccaccgtgcctggccttcattctcctctttctataacgcaatcttaggatgcaaaaccaagcaaagtctgaattaatctatctagaatagcaccgtggagtcacagccatggtcaggcccctccaaagaacagactggatttcggaacccatgtctctccctgccacaagcaactagtccatatgcaacttggaagcagccactgtggatcttggcttctttcttgcttcctcctcaatagttactgccactgatttagtgctaaagagataggaacatcacttaaaaccatctctacacataaatccacttagaataattttttcccctggaggatctattattgaagtacaaggctttactgtttattctactgtagacaccacaggacaccatgttcttggttagaattgagtacttgagaaactatatgaataattgcttgttgaacagtacacgtgaattatctctattttccagctaaagattgagcctaaaatgattagtatttttgtaattttgaatcatttgatccatttgaagttggattagtgacaaagtcttattcatttttcaagtgttagttctgagggcttctcccagaactagcagcaaccagcgttgctgctagataatattgcacctttaagctaacaagtaaaaagctgatcctctgggttgatgttgtctcatgctagggctctaggcagagtgggctggagttcagtccccagccatcttcttagcagggcattctagatgtttaatcttttatgttgacgtgttgatatcacttccattagccatttgttagaattactaaattaaatttacataattcaaggatctaaaaagaccagaagttcagtcagagccatttttctgagatatttctgcatccctctgaagaagataatttgtccaaacttaacaaaaacaggtgttaaaattgagtacgttctgagaatactcagactttttttaagactttttttagtctcaaaccctacatgaaatacaatcccttaaatcttccaatcttagagctagaagaaaagtcgagcaccctcactttacccagaggcaattttgtgccccagatgacaaagctcttagatctactcatttgcttatggctccaccagtacttctaggtcaggccctctttcacctgaaggattagccatacttctggaaccattttccaggttccttgaaataaatatcttcgctttgctggggaccctagtttcctgttaagtagtgaatgacccttctttcctcccgccagccacagtcctatttcacagaggaagagaatgaccagcaagtcaacttctactacagagaagcagcaactgataaaaggccaaatcttacaaggtgccaacgtgaagaaaaaggcccactatcctgcagccaactcatatcaaaagttaatctgtttagtcctctctgccggggtgaatctacagtttttctttttgtctccctcttgccccatcaccaggtggttgtcgttgtccttcccggctagttgccaataaagttgttacaaagtgaccttgagtgtcttccttggtgcacccgaaaccccgccttcttcatccgggtgctgcggcgcgaataagagccggaccgcgcttgcgcattgagtcccactccttcgacctctgccgcagcccgtgccgccgccgcctcctgggaaggtaagtggagggcacagggagcccggcctggccagggcggagcggcgcccagtagggacccattcattgtgccggcgcctcactgggcacggggcccaagctgacggcgtgcacgggagcctgcggggcctgggtgggaagaacaggcccctggagggcacttgaccttaagcctcttttcctccgcagagaggaagcgggagaggagcccacgtcgcctgtcacccaatatctccagccgcgcagtcccgaagagtgtaagatgttcgcctgcgccaagctcgcctgcaccccctctctggtgcgtagcccaggcagggtcggggggattgaggggtgggcgttttggcctagagcgtccacgttgttgaatggggcaaccttcgggcggggcacaccgccctctcgggaacggctttctccttacctattaacccattgccgttttcttcctaatcttagggcatctcagccctctccttgccactagggcgaggcagagcagccgaggcctagctgtcaggcctcactcggtgtaggtcaaactctctggtccctagaccaggagtggccctttcccccaccttctctcagcctctctgttggattggggtcgacgcgaaggttggagtactgcagaggatgtagggggccgttgaggcctagttcacctcagcagcgctttccagtgcctgtctgtaggtcaaactcgttgctgcagagggagggactttgcctttccgtgtgggggcggaggaaggtggtgggggaacgagcccaaagtctttcttcctgcctctggagtattattttcataacaattttgcaggcttaaagtgaggtctagatctggaggatttgtcttagagaatcaggttttggttcggaagggtttttctgtgaccttaatttagtggacactcaagggcagagaagttggactggaatatgtccttatggtcagatatttcacagattattcttaaactgatgtagaattgcttaagttccttttttagaaatttttttttatgattaatggtcatatagaaatagct

SEQ ID NO: 8449 - DNA, 6000 bp, Homo sapiens; identical to SEQ ID NO: 917

SEQ ID NO: 8450 - DNA, 6000 bp, Homo sapiens; identical to SEQ ID NO: 3155

SEQ ID NO: 8451 - DNA, 6000 bp, Homo sapiens
caagttttaatggagaaaaatgtaagtattttacctcctgaaacttggctatttgagtaatgagaaaatagtcactttccccaggacagtggttctcaatcatggctatgtgtttctccaggaaaactttaaaaatatatatataccaatgcttctgtgtcacttctagggattccaagtctttgaatacgaactctgcatcagtattctttaattatccaggtgattgtgatgtgaaatcatgactgagccccactgctctaagatgaaataaactttcctcagcactgaaatcacaaacttaaactaccaaaattaattaagggcatgggaatcaataaggcatagggaagcttttacattataaaattatttctttaaatcacagctcattgtttatatgttatttgccattgtagaaaagggtgaaaaaatagcaaatttaattactctcagtttgaaaaattatccagaaatgaagatgacgactctgaaacattgtcaatatcatttgacctataaataatgttctaatacatttactacacactgatagatactttttcatatgaatattatacattaaaactaaggcaataatgatttagaacattctatctatatctatgtatcttaagtaggctagaaattaagatatgagttattaagtatgagatgttaaggtgtggggttagaaattatactgtacttcattatcaataatcaacatatacttcaatatcacatacatttaactttaatttgtacatctttaactatttttaattatgtgtataaatataagtacacacatctttatgtatttatttattcatacctccattcacttatttatataggggatccccccaaatccactaccattaaaccatacatttttattttaatctttagaacaagcccaggaggcaggtattgttattactcacattttacaaatgaggaaattgtctacagtcacaaagttactgtgtcagacatattagaagcttaatacatatttggtgaacatatgcataaaaacagagagacagacatgtacaacagctcatctttacactgagtaaaagcttttaacctgtctcagaaacctctctgtgaaaactgagcaaaaatcgaggtatcctttcatttgtcatataggtataggtggtaccttacttctccaacaaggatgaatattgaaatgtggatcccaaggcccaactccagattttctgaatccctgatagtgggacttggaatttgtctattgtttcaaagtttctcaaggaattcatatgatcaaccaggttcagaaatcactggatcttattgccgaagtttgagaattaaagtttgggccttactgcggctccacagaaagggcaaatgaagtatcatggacagaactgatacgttcccagttagtttcccctctcagaagctaacaggcagcaatacagcagaaattagtgacttatgtcttgtgctctgaagtcaggcagaatttcacagagtcccagcagtgtcactgacgagatttgtttcttggggcaagttgcctgatgctttcaaagccatattccttttatataaaatgagataatattctttgtctcataggggtgttttaaagattaaataaaaataacatgttctatcctacatggcacaatgcctgacacctaagaagcaaaggatacatcttacctttattgaagcaatcagaaagtatgaaatcatgaaggagataagagttctgattggcagtgtatcttattttcccaggttcatttatttatcttaaactattcttgttggagaataactcccaagccccctacttaagctgtgagtaatctcacactttataatgatgttctttccatgagaaaaaaaaatgttcttaagttttctggagaaaatatatctgcactatttctactgaaaaatctaacaactggactctgctcctctgcatcaattctagagtgtatatgccacaaataaagtgttctagctcaagaagattgaaagtaaatatggtatagtattttaaaataagaattttgcaaatacatggtatgattgtgtcatattactagcaatcatatgatacgcaatgcaaagtacagttcatagacttaaatttaattctaataagtaaactgattttgccttgctggggaaaagttaaagcactaatccaattgctaatgcagtcttgtctacttctttggtacctagtgacaagtctaaataatgtatatatttttatttacatattcagtaatacaattctctgctcaatgagtgatgttcttctgccacttggtggtgcttgccagtttcagaatttgtttcttggtggcactataacactaagtacagagtaagtgcaacaaaattgcagcattcccattgaaaaggctttgcttcaaactgtttaataatttaaaggacctctgtggaagcaaccgcatttgttaaccagttacaaccagtaattaactcctttggagttttaacttacttttggcaaaacgtcttaggaagagcatatattattagaaagtatgccaaaaatttacttagcagaaaattcaaaaacagttttcctctgctaagaggttctctaaaattctacttacatagccaaactctgaaatcctagcaggtcctgtttcattatcataattactgcataaacacttttaaggactttgcctttagtttcaagcatgacttattttcataagcctgattagttaccacaccagccttgctatggaaaatgacatgttctcattctctgctgtagagttgttaaatcttgatctatatttatgttgccttctctgctgaaagcctgtagcgaaagaaatttctaattccttgttttgcaatattagttggcagctctatctaatgggtattctgtttccttaaagaatttagctgctctgtctagaagccgattttctgatgcctccaacgtctggtctaattgatctgttttaatggagtcttcgtcggtgaggagcgagatgccaccgactagaatgctgggatctgctgcttaattgccaggagtgagagacactgagattcagaaatctttggaggtgggaggggagagggacagtctcggacggaggcggagatgtaagataaagggatggatttcacacaggaaaaaaaaaaagatttcgttgaggcactgaggtgctgcacgatcacatctctcaaaggagaagttaaaaagcaaggaagtgggaggaggttggaggttaaagtacttaaaaggattactcgggtacaatttgtttttctgctggtgtctgcaaaggatagatagtcccgttttcaaagtatatgaatgcctcttttaagtgattgggaatggacactaattgcctgttaaatgttatcaaatgctctcctaaattcaggggacacagaaagaggggcacaaaaggagaatttaaatagaaaaagggaggatccggaggcttttgaaagcggggggagaagaaggaggagggataacagagaggaatagagaaggagagcggagagaagataaacaaaaacaaaaacaggaatcactgaataatcacacaccaaaaagaaagctcttccctatggggcatccaaaacactgagactgcaatagtgaccccggtcatggaagaaagatgttcctctccacccttgtccccgaaagctcttggtcccgttactggcgactaaaattccattaggctaaagagtgtgtctaactgcctgaagaatgcagcagacggaaggcgggtcccgctatgccgtttgcccttcccgctggagagaatgaaagaaacgcgcagagccagagactcctgccgagttagaccttctctcgtcgccccaggtcaccggccatccggcaaagacccgagtaaggaacgcagggtcactgcctgggccaacaaatggagcccgctctccccttcccggacgccgctgcccggccgatgctcccggcaacccacccgcggcgtatgcagaggagcctttctctttctctcagaccacttgtcccgaccaatctgaccttccaaacacatctgaccgcacctcccaggtggacacactaataggctacgggctggagaggagcgggtgatgaggagagggattcaaacctgcgaacgcttgggctgggtcggagctgcggggggcctgggaggagagaggggagaagagagaaggaaggagagcgcctgccgggatggctgagctgcctcggcgagcagccttggggttgcacgctcttgtgggagatgctgctgttgcttccaggtcggcaagagcggttctaacaccatcgcctctcaccctctttcctgtaaatccctagagaaacgtccctggcctctccgccgcgacattcccagcctgcatccccctacagcctaggcggcgcgctcccgcacgctggagcgccggtcgccagcaggacgccctctcccgcgccgactcgcccctctctgccctgctgctgctgctcctctgacacctccgcccccaccatctccagctcggagagacgccacccagccgcggcccgcactcgcggcccggggtcacgcgcggaagaggggcgctagtccggaccccgccttcggtagggggcgtcctggagcggagagtgaggcgaatggtatatgagtgtgcgggtagcccaccctgaagcccgagcttctcatttgagccatccccgcctagccccactcgggccagcgcctggcgagcgagcccatctgtggcttccgcggccgcctcctccttgcatccttgcacctcctcgtcgacccctccctcccgggacctgcatcctgctccaccaatcagagcccgactgcctcttcccacgtgaccccgggcgggctgaggacctgctgcttcccaaacgccagagggatgcgggcggcagagctcgagaggcggctgccgggctgcggggcgccttgactctccctccaccctgcctcctcgggctccactcgtctgcccctggactcccgtctcctcctgtcctccggcttcccagagctccctccttatggcagcagcttcccgcgtctccggcgcagcttctcagcggacgaccctctcgctccggggctgagcccagtccctggatgttgctgaaactctcgagatcatgcgcgggtttggctgctgcttccccgccgggtgccactgccaccgccgccgcctctgctgccgccgtccgcgggatgctcagtagcccgctgcccggcccccgcgatcctgtgttcctcggaagccgtttgctgctgcagagttgcacgaactagtcatggtgctgtgggagtccccgcggcagtgcagcagctggacactttgcgagggcttttgctggctgctgctgctgcccgtcatgctactcatcgtagcccgcccggtgaagctcgctgctttccctacctccttaagtgactgccaaacgcccaccggctggaattgctctggtaagtccagaacccccgtccccgaccctttaactccgcagaagaacacgcgtatccagcacagaccagcctaccctagcgcgcctcctcagcccctcacctcctactgccctagacccctaataccacccacctctatccagagaaacaaggggaactgttgcaggcccgggggtgaggggtggttctgggatgggcagaaagtgcaggtgtagcaggaaacctttgcatgcttgcgcttacattggagctgcgaggattttgagaaatattaaacgggatggttttctgggttcactgttttgaaagagcaccaatcctaggggaaacactgaaacagaagctttgtcatcattaaagaaaaaagtcttactaggatgaggaagaaataactttatgagaaagaatgagcgagaaagcaataaatcaaatggtgactgcaggggaatcgctgattcct

SEQ ID NO: 8452 - DNA, 6000 bp, Homo sapiens; identical to SEQ ID NO: 2109

SEQ ID NO: 8453 - DNA, 6000 bp, Homo sapiens
tcctcctcctcctttttgaccccctctccaaaaggccctcaataaaatggtttactatggttttatttaaaaaaaaaattaaaactgtattgtttctacaggatctgtgttagagaatgtaatttttgtttctaatggataatgcccttacgatttatccttttggatggacatcacttacagatataaagtttaataaatgttatgatgctacccttattttttactttcttatttttttgggtctagcttaaaaaaaaatccttgagccgtagtttgcaaagccaaacagaaattgggcatgtatgagcctggtgtttgtattttaaacagaatatcttttacttaaaagcttactttaaaaatgctcagtgagtatatctcatctgtaaaatgatgatggtaataatagagggggcaagccaagtgaaattaatcagtgatctcatcctagaacaggtgattttttttccggttgcgtacatatattttacattaaatatgctttaaatattgtgtcataacatacattcagtaaggtgtacagagtgtacagtttaatgaatttttatgtgtgtatgcacccagataaccatcacccacatcaagatattacagccacttgtgtgtgtgtgtatatgtgtggtaaaaatacataaaactcaccatattaaccgttttaagtgtacagttcagtgttagtatttagtgttaagtatattcacattgtgtgaaacagagctctagaatttatttacctggcaaaattgaaactaaaaatatgaatgattcactaaatatttgtatgtcatgcttgtacaagggccatgctaatctctgcattgtttcagttttagtctgtgtgctaccaaagcaagcacaggtatctttaaattatcctttctcttattatttttattttcatattttttgcaatgactatggaggtctgattttccagtttgccttgtgaacagtggagtccatgaatgtatttgctgagtcttatgggcatttaaaattgttctcatttttatggcagtctaaacaaattaacaaaattgtttctggatcatatgtatggtcactttgtaaagccacaagattttggtgcctgcatttgtgtttcagattgtattggtgacaagttgtactattttcatgaactaataagaaaataacagcaatgaatttaatgcattagtgccaagtgaatgccaaattaccttcattaaatgaacatttcacaatagtagaaacataatataactggcttataccatcctcatgttgaaagtggccattttgtatctttaatgttatccctatcagattaatgttcacttgaaatttatgtttaaattttatttaaactggtacattttctttggttttatgttgtatatggttaaaaagtttcaagtgtttaggtaagagtaagataagttcacacgggaagttgaggggagtaatctgtctgcaaactatgactaaattttgcaaaacatgacgagacattaagactaaagattaaaacataagttttgtagtttagaagacatttattggacctcattttttaaaataaaaacttcagtcttttattatttaaaaaaacttccaaattaaaatttctttatctcagtaatacatttctaagaaataaaggatgacatactgtggatagtgatatacttttcccagctttgcttatgcttcacattaatttagaaggatatgtttatacctgttataataattatattttctctacaaaaattagctgggcatgatggcatgtgcctatagtcccagctacttgggaggcctaggtgggaggatcacttgagcctgggaggcagaggctgcagtgagctgagatgatcctactgcatgccagcctgggacagagtgggaccctgtctaaaaaaaaaaaaaattattttatctatacttagccacattatttcaataacagagggcaaaaaaattactattttctagtttgctggttttgtagaattttgaaaaaatatttttgaaactttattgaaaatcatctgtgcaaaattttcggaccttactgtttttatacatagtttcacaactgaatgtgacagcataacaaactgtattttttccatttgtccaattaagtctgtactatccatatttttctatttctcctaaaggatgaagacctacaagagatggaaaatttagcccaaagaatggaaactcagtttggccaattttttgatcatgtgattgtgaatgacagcttgcacgatgcatgtgcccagttgttgtctgccatacagaaggctcaggaggagcctcagtgggtaccagcaacatggatttcctcagatactgagtctcaatgagacttcttgtttaatgctggagttttaacactgtacccttgatacagcgatccatagttgcaatctaaaacaacagtatttgacccattttaatgtgtacaactttaaaagtgcagcaatttattaattaatcttatttgaaaaaaatttttattgtatggttatgtggttacctattttaacttaattttttttcctttacctcatatgcagctgtggtagaaatatgaataatgttaagtcactgagtatgagaacctttcgcagatttcacatgatctttttaagatttaaataaagagctttcctaaataaaataagcaatagttaactttagaaactgtactctatgaaacgtgttttatgaaaacatcttttacaaaaagtgcttacttgactaactcagcaagaaaggtttaatgtacacatttcacatctaaaatcaaaacctacaagaaactgcactgccttcactatttacaaatcggcctacaaggaaaaaattattctcatgagaggtgtgacaaacactaattttccttaacagccaatatctacatgcaggcctaaattagaaaaaggcaatggattaatcccagagacctatatatagaaaatcacaagagtgaaaccgtgtctcagagttaaagaaaccagggactaacagaaattcttgagcatgcaggacggcagataaaaaacaacttgctaaataaaacgcctaaacttcttccattgtgagattaaaaaacaaaacaaaacaaaacaaagcaaactggctgaaagtggttagtactaacacggatggctacctggagtctgtacaaaatgagcttgctggcgtcacagcttgaatctttccccatgtttcacactgactccctccaaaatttgcacatgcgacccatgaagggacatgaagaggtaactgcgaacgccagaggattttccagatggcttctttccttccaccaatcacctactaatcccagaatccaccccctaaacgttttctaataaaaatactgtcttaaagccaacacagggagacagattagagctatactcctgtctccttgttagctgactcacaatgaaaacttttctcaaaaaatcagcgccataatattggcttctgtgcgtatagggcaacaagccccgtttgtttggtaacaagattaggatgccattacaaagtgctgtttctctttctttccccagatttgagatttccaggcgctttccctgtccctgtatctgttcatcttctgcatcattctcttctccatatccacaccattcttccatctttcccatttctttcttaactgtaaaacagaatgcatgattcaaaatatttgtagttctctgttacttaaagtgaaagttatctttaaaaaaaaacaaacccaaccaaaccaaacgatgcaaatcaggtagtttgtagtgatatttatgtgaggttggatttgattttaaggttgagaaaaagtttttccaaatttgatttacacagttgtgggatgaagggtaagcaatcggagaaaatgtgagaattgcctatattaatacacatccacacacccaggcctgcacagactcgttggtcctggagagtaaacgcattcctcccaaacccagcagcgcctggcaggacagaggcgggcggggacctggctcagggggcggctgcctcgccaggcgccacgaagccccggcgtcccacaggtcccggaggccgctgcgtcgcggggagctgggctcgggccgccggcggttgcgccggggcagccccgcggggagagcaccatgaggactgactcgggggctcggctggaggagggccacctggtgagcggcgaggggcgcgtcggcctcgagaggtggcgggtaaacagctacacttggcagtgggggtgggtgtgtgtgggggggcgccaacgagctgggaatcactaagggagggccttgctcgtggggtgcgcgcatccgcccctccagtgttcacaggaatgggacggagacgcaggcgaggccgggaccgaactcccggagtgggagagagaggcctggcatgaagtttgcggggacctgagcccgcgttgccacgacgacgcctcactcatctgaggcccggggcccggcgggtgccggggcttccagccaggcctctcctagactcctccgaggagaggtctgtagctgcccagaagagatctgttcgcctgcggagtcctttaattaaggtcttccgtcacgccccgcttcccgcaaacaaatcaccgccaccacttaggaaaccacgggaaagctgtgattgcagcgccacggtcgccagatttctgctcctgggcacattacccccaactccgaggccccctttttggcagggctagtctggactggccaatccaggtccctgcacgcctctcaccgcaacatccccgcagggcgctgcgcgcggggtactagccaggcggcgcggcccgatgacgcattgcgcctgcgcgcgcgaccgagccgggaggggtggggcgccaggtgcttgggggccggcggccgccgaggccggctaaacgcagaatggggaagaatcctgtggtaagcgagccttagctacttttaattgttaggatttttgtcttcagttgagccgtcctacttttgaggattagaggttgggtctctgggtgggtggaacgtcatttttgcgggacttttgaaatcagttacgtgaacagagccctgggatcgatcgcgcgcgcttcgtagcatctttagaacaatagcgcgttcctgtgactgtcattcttctccaattgtaattttgactactggatggtattacggcagcttgcctcgtcctaatcttgtagtacttgcattaatctactgttcgaacgaatggattgctaaatgggacaaactacaagagtgtctaaaatttaacccttttgaataaatgtcttatgcaagcagcatgagatacttggaacattaaattggcttctaggcatttctgttactatatgattctaaaatacttctcaactgtaatgctgtctgaactacaaacacttttcttattcatgtaaatgagggtttagaagggttccccccacctttctttctgccctaaaacgcattcttcccagtgtatgcaactggcctttttaaaaattgtgttagtatgtggtttaaaacctccatttgtttcccattgaattaaaacaaaatccaaacttcccttggtctgcaaggccctaactaatctggctcctgcctacctctccttggtaattgtgcggcagccttgctgtccttttacctgaaacattccaagcccaatttaacctaaaaatatttgcatttgttccggttgctgctttctcattcaggtctcagctcaaactcagagaaactttccctaacaaaagtagcactcagtctccttcattcattacgttttgtgtgtgtgtatcttgtgtatatatatatatatgcacacacgatatgtatacaagatatgtcttaaatatagcatataaatatattttatcgtacatgctgcatataatatatagtatatattatcatatatatatttttaaca

SEQ ID NO: 8454 - DNA, 6000 bp, Homo sapiens; identical to SEQ ID NO: 3344

SEQ ID NO: 8455 - DNA, 6000 bp, Homo sapiens
tgtggcacctggagatctaattaaaaaggcagtatttcatagtaagaagagcatagacttcaggttcagagaggcctctgttagaatctcagctttagtatttaccaactgcatgaccttagacttagtttccccaagactcagttttcttacctcaaaaatgtgaaaaataacacctatcatctaaggcattttgaggtttaaaaaaatcacttgggtaaggcacttgtcaaaaagtgaatttccaggttgtttcccaagaaattcttactcagtagacttgcagtggcacctaagaatttatatttttaataagtgtccaggtgcttctaagtacatatgaaaagtacatggtagctgttaatttgcctattaaccataattctacacctattcttgaggcgctatatgtttgaagaaagtcaaatgtgatatagtagaaagcaaattgtattgaggattagaagaggaggtatgtgagttctggcctctatctgacacttactttgcaatgagatcttagtcatagagctgtccaatttttctaaacctctttttttaaagggtctgtaaaatctcctctagcctgggttactgtctgtctcggtaaagaagaaataataacaactaacatggagtccctttagagctctctgttggagaaacaagtacaatggtctccataatgcatctcttctgaatctctgggtcttctaatatttctccctgaagaccattttttggtgcctttcattcctctattcctcttctaattcttatgacctcagcatccctgtatgtaatgaaatatatctgaaaacaacctcgtttaaaagaataaatctattaaggagctgagaactttctggcgtgaaatgaaaaatattgattgcttcccacctgttagcaatgaaatcccatccagttaattaacctgctcagagataaagtttatttttgcccttcactttcagctccaaatctttaaaaccattaaaacaagtacctggtcaatgaataaatcttctcccagagcgacatccagggtcttctggaatctggctccagcctacctttctgacatttcctctagctacttacctttgagtaccttccaccacagcctaatggaaaagctaaagtattcagcgctcccactgccaggaatatgcctccctcctctaaattccacatattttaactcagttcaaatgtcacttcttgaaaaaggctttcaaagctttcccagagctgtggcaactatctccacctcccccctcttcccacctctcctaattgctgccaagctgtaagcattatctccctattttgaacactccccaaactttgtatgcttttgtaacacttactattttatgctttatattatgactacatacatatttatagtactagacccttgaggatgcaattccaaccagtttgtgctccccacatctttcaacacaattcaatgccttaccgatgatgggtgttcagtaaatattttttgaatgtctaaataggaacccattgatttaatatggtctttatggttgtttttactctggaactcattagacaataatggggattttacttttgggctcatgattaggcagttagtaagaagaatctaactcagtgaagtgttttacaagatttacattatattcaaaacaggcctcttaggcttctcaatcttttttttttttttttttttttttgagacggagtctcactctgtcacccaggctggagtacagtggtgcaatctcagctcattgcaacctgcacctccctggttcaagcaattcccctgcctcagcctcctgagtagctgggattacaggtgcacaccaccatgcctggctaatttttaatatttttagtagagacggggtttcaccatgttggccaggccagtctcgatctcctgacctctggcaatccacctgcctaggcctcccaaagtgctgggattacaggtgttagccaccacgcccggccacttctcaatctttctaaaggcagtcctgttgttgcttcctgtccttagcagttctctgtttctagaaatcttttcactttcagtggaagggttgggaaaggcagtcttgttatggacatcatccctttctttctttctttctttctttctttctttctttctttctttctttctctttcttttcctctttcttttttttttttttttttttgacagagtttccctcttgttgcccaggctggagtgcaatggtgcaatgttggctcacggcaacctccacctcccaggttcaagcgattcttctacctcagcctcccgagtagctgggattacaggcatgtgccaccacacctggctaattttgtatttttagtagagacggggtttctccatgttagtcagggtggtcttcaactcccaacctcagatgatccacccgcctcagcctcccaaagtgttgggattacaggcatgagccaccatgcctggccggacatcatccatttctatgactctggatataggtctcatatggcatttctatctcctgccctaatttacttgcacaacacacttggagctagaatttaatgagcacaaaaccctaaaactcaattttaggtaaagcagatattcagtcatatgtgggagcactcacatgtatgtgtccaggctgaaggggagaaatatggtagcttcactgaaataaaaaagccacttatttattcagagtccattttcttgaacacctacttaacttcaggtgctgcattatgtgctggtgatacaaatatagatactgatcccagccttaaagaagctctgagtcagacaaagggagatgaatgtatggtgagataattattatatagactatgatttctgcaataccagaaacagatacagagtgatgtggaacacaaaatattttcttgaagaacaaatagaatttttgaaataaagaggttttttgttgctgcacagtatttgtgctgatattaatcaataaatattattttgtagttattaaaaatattagtatcatctttaaatgagcaccttgggctgggtctcagcatccatggtgagtcctggggcatgattcagacaagtagccatgctgggttaaccaagactgagatgtaggtcctttctccttagagcttgtaggaatgaatcatttcatagagatggcagcaaaggggtagttttcttatgactcattggactgaacttcgttccaatgatattttgctgcagaaattttgcatgctactctgtctatggctccaatatttgtaaaggcattaccatggctgtttggatgaatcactggcatatcttctctatggccctagaggggtgtgtgtgtgtgtgtgtgtgtgtgtgtgagagagagagagagagagagagagcggggtgggggagagaggtttataaggaaaggcaaaaaaagcaatcctaagttttcagtgaccaaagtctacagctgcaaacactgaggttttatatagaccactttaagtttccttctttttcttgctcttcacatttaggggcactttgctgctcaagaaactccttgagaaaaatagggtagggtgacatgagtcagtagcagaaataggagaggaaattaaaatccatttcaaattacctcttgtcagcggctcagtgaaaggcttgaatagggaggaggctggggatgttggtgaagacgaagctgaaatattgctctggattcttatgactcacaattgaaagagcactgtgacttatagtaatgatgactgtggtgatggtggccacaagccattcaacaaatatgcattgaacatttactagatgccatctctgacttaggcacacgggatcaaatgaattaaaaaaattatctctgtcaattggagcttaaattctaggcgaagaagctgacaaaaaaatggtactagcaacctcctccctgtttgaaaatttgaagcatttccttctcatgtctcaagcctcaatgaaacatttccttctcatgtctcatgtctcaagcatttccttagtcatgaggaatttaatctccatcaagtcccagcttcattgtggaagtcacaaaactttatctcctcgaaagcttgcagactgagatctactttaaatgtttatgtgaacagagaaacggtctctggttgacaggtgtctgtgtcttgtatgtgcaatgagaggagctgtgatagtggacagtgggcagagagtctacaaccagaccttccacaccgacacgttcctgctgaggtgaaatgcaagagttagtgcctgaatcgctcccctccctccccgtggcctttctccttctttcttttactcttcacttcgctccctcctccttcccttcctaaatccctccctctcctggttacctccctttcccttggtccctccccatccccttccctcgcacagttctctcctcctcttgctccctctccctccagcttcttttcctctcatcccctttccctcctccatccctccgcggcgtctgcgtcaggcccccacgagcgtgacgcgcggggtctgggtgggagctgtccactcgcccggggtgctgaatgcagcagcggcggccgcggcgccggcggcggagatagccgagagcctccctcgctgcaagaaccttgtttccagttctcggacggtcagctcgccgccccgccacctcccttccagcaccacccctttgggaatcgagccagtgggggcagcggcgggtgctgagcaacggcggaagacgagacaacacctggcagcagcctggaatctgatttgcttcctctcggcttttataagagatatatttatatacggttttggggagtcgcgaggaccaagctggagccaagtgccggctgcctcccacctcggccacactgcttcgctcccccctccccaccttcagctggcaccgcaaacaagccttacctcgttgcatctgcgaggagaggtagcaacagcgagcctagccagccagaggcggtggagaggaggaaggggcggggtgggggggcagagagcgggccgaggccgcccttggtgggggtagcgggggcagagctgccgagcagacccggcagccgccctcctccgcccccaccctccagaagcactcttgcctgagaaccgaattattccactagtattatttcattttttattactccccctcctcactccccagccgcccccacccccacgccggcctcgcctctggttgcatggcagcgctgcccgggcgcgggggctcagggctggcccccagggaagggggaggaggaggaggatcatgaaggccggagtcgcgaccgcgccggacggcgggcagcagccagaggacgagccggagcagcccccgccccggagacacccggacgccgagcagcagtcgcctccgccgccgcagcagcagctgcgggcgcgggccgacccggagccggaggaggagggcgaccgcgacccagaggaggaagaggaggagaaggcgaggccactcgcccgcccggacctgcccttctctcggctcttgcccctcgaccgaagggacctttgatggaaccgaggggagggcgccacggatttgccgactgcagcaggggtgggctgggggctgagataatgtaaccactcctttctcctgttctctcccacacgcccctctcctctacccctattctctgctccactgccctctcaccccggtacacacacccttcctctagccaggatcttcatgctcaggaaggaggcgcctctgcaagggttaaacgatcttttctttttctcccatcctttttccttcccaaacctctattttacctcccttctcctaattggctttcccctcttcggtgtaaccctttggctgcggaggcaaagcacaagcccctagcccagtttcacctgcaacacccctcccccacccaactgctctcttaaaagca

SEQ ID NO: 8456 - DNA, 6000 bp, Homo sapiens
caggccggtctctaactcctgacctcaggtgatccaccccctgacctcccacagtgctgggattacaggcatgaaccactgtgaccagccacagtgtgatttctaagtagagagatgggcccccggcctcacagtcctttagtgccaaagctggaacaaaacttcacttctgagacatccaaatccaccattctttccactctctatttccttaggaaagtgttaaataatgtttatgaataataaggccaattttaagggggaggagcccccataccccacccctaccttatctatcccccacacatctatcattcaagcctgagaggctccctccatcccactttggaacattggcattcaattcaacagatgctgggtcagggccgtgcccaggcctaggggtgaatgagacattgtctctgccctccagtggggagaaacaggcactttcacctcaggctgggttcaatgcctcaattcagtaaatacgtcctctgaaaacaagcaacttcgggcggcgcggtagctcttgcctgtaatcccagcactttgggaggccaaggcaggtggatgacctgaggccaggagttcaagaccagcctggccaacgtggcaaaaccctgtttctactaaaaatacaaaaattagctgggcattgtggtgggcgcctgtaatctcagctactcaggaggccaagcaggagaatcgcttgaacccaggaggcggaggttgcagggagccgagatcatgctactgcaccccagccgtggtgacagagtgagactccatctcaaaaagaaagaaagaaagaaagaaaaagaaaaacagaaaaaaggcaacttctttcagaaagttagtgatcaatgcatgggtagagtaacacattaaatgctaggtaaccaggcagctatgagaagggtttggaggaccaattagtggagtcctggggctgggctggagggtggcaacagagaaagttctctggatccaccgctccaattaagtttttcctgcccatgtccttcaggttccacctgggcccaccccttccaggctgccaccaccccctcccaccaatcactaagctttagctagtcctaaaatacctaaaataacatccagtcctaaaataaacatcagtctaatccctttcactcctccacccctcttcctgcagccatggacttgactccactttcctcctaggtagtgttgctggaaaaatacaaccaaccagttaaatgtgaatttcagataagcaatgagtacttttttttagtacaagtatttccaaatattatatggggcagtgggatatgcttatatgaaaaaatattgtttggccgggcgcagcggctcatgcctgtagtcccagcactttgggagggtgaggcggatggattgcttgagctcatgagttcaagaccagcctgggcaacatggcaaaaccctgtctccacagaaaatacaaaaattagccgggcgtggtggtgctcatgtctgtagtcccagctacttgagaggctgaggtgggaggatggcttgagcctgggaggtggaggttgccgcgagccaagatcgcactactgtactccagcctgggagtgcagagccagaccttgtcttgaaaaaaaaaaaaaaaaaggtttgttgtttatctgaagctcaaactggttgccttgcatctttatttgctaaagctggaaccctaccccaggggcaccaccagagcctccccaaccctcccaaactccctctaggtggttattttctggctccccattgctttcagggtaaaatctcaatttctggccccctgcctccttggccagccctatttcctaccccttctaccccactgcaccctccaccccccatcctagcttgctggggcaactggccctaagtcccttgccctctgcctggagaaccttctcccctcctccgaataggctggttcctaacacctcctaacactctactcaggtgtcacctcctctgaactcctttcccgaacccccaccccattccccacactgggttaggagctttctctgggatctggaggaaccaagtgaatatttctttatctgccagcacttgtcaaactgtcaacattgtaataatctgtcattttactggctcccttagactgtgagtttcttgagagcaggggctgtgttctttcagccttctcatttctagaaccggaaattcctgtctggttggcagacaataaaagcttacttaataattttgcagataaggcccaagagaaaaaaacatcatttatcgaatgcctattgccagcgaagcactgctgctctgggccaggcgcttcaggtgttatttttgaccctatagtcagaaaaagggctctggagaaaaagcacgcagcaaggcttgtgtgggcttgcctcgtgtgccccatgtcccactcccccagtcgggcagatgtgagtcgctggtgattgctggttggaaatggaatctccttggatattaaccatcctggtggttctagaaagtggagggtgttttctggagaaggggcctgctatggtgggaatgttgttgtccccactccattcatttgttgaaacttaatcctcaatgttatagtattaaaaggtgaggcctttaggaagtgattaggtcatgaaggcggaaccctctggaatggaattcatgctcttagaaaagaagctggtggccaggtgcagtggctcacgcctataatcccagcactttgggaggtggaggagggcaaattgcttgagcccaggagttcaagaccagcgtgggcaacatagtgagaccctgtctctacaaaaaatacaaaaattagccaggtgtggtggtgcatgtgtgtagtcccagctactcaggaggctgagttggaaggattgcttgtacatgggaggtcaaggctgcagtgagctgcaattgtgccattgcacagagtgagattccatctcaaaaaaaaggaaggctggtgggggggcggtgtctgtttgttccttccttggccatatgaggactcagacgatatctgtgaagcagagggagccttcatcagacacctaacctgctggtgccttgatgttgcgtttcccaccctccagaactgtgagcaatacatttctgctgtttctaaattacccactctaaggtatttttgttgtagcagcccagatggactaagacagcacaagtgtagagagcatgaaaaaatgtcagggatctggacagattccatgggccatgcatttcacctagggcgctactccttgagcaagggggagacagacactgagcagaactgtacttgctctggtgagatcacaccttgggtggggacttcctaaaatgaggttcttggcctgtaggaactggaagtacactgaagggttggggtgtctggggagctagcccaccataacggccactagtccccctaagtaactcctacttaaactatatttacagaaataaacatacatagtgtgtgtatggggggcagtttttaaaaatctgtcttttttttttttttttttttttaaatctctgttttggggctggacgtggtggctcatgtctgtaatcctagcactttgggaggccaaagtgggctgactgctttgagctcaggggtttgagaccagcctatgcaacaacgtgaaaacccatctctacaaaacaaacaaaccaaacaaaacaaacaagcaaacaaacaaaattagctgggtgtagtggcacacacttgtaatcccagctactcaggaggctgaggccggagaatcacttgaaaccaggaggaggatgcagtgagccgagatggcgccactgcactccagcctgggtgacagagcgagaccctgtctggaaaaaaaaaaaaaaaaaaaaaaggacattcagtggtggtgtggtgctgacctatagctattaacatgagataagcactttaaacagagttggtcaactactggcagccttggtgtcatggaaagaacttggactttggaaccacagaaactcaggcaaggctcggtaatgtttctctttttaaattgagacaaggtctctctatgttgcctaggctgggtctccaactcctgggctcaagccatcctctggccttggcctcccaaaagtgctaggatcgcaggtgtgagtcaccatgcccaggctccagtaatatttcagaacttcctcaaaactgtttcctcctttgctactgcattcttcactgagatgagggttaagacctacctaacagtagtaatctacatctcaatgtaggacttctgaattctgacttgaggaaagcacctgctttcctggttgagtaattataaacagagattctaggtttgcatgtttgcagttttaaactcgaaaagtgcatttatctcaaaaacacagaattatcaaggattttaattactgatttatttgtaatgtaaaaatgggaaacaaacggcctccagtaggaaattaatttaatccgcatagccatgcaatggaatacttcacggcattaagattgtgcttttgaagactatttagtgagaagaaaaatgttcatcataaaacagtaaaaagaagggcagtaaacaaaacaccatacaatataccccactgtagaaaaacaaaatacatacagaaatgtaatagccaaagaaggacccaaagcgaacgcttccccctgggaactaggaggggtggagagaaattactttcttccctgcatttctgtgtcttttctagcttcctatcagtatcatgtattgcctttaaatccgaaaatacccctgtgttattagtgaggcgtcgtcggggctctgagaggcgcgcgcgcccgggacagacccctgcgccccctggcggcgccctgaggccccgccccacgaggccggcgcgacggggcggggcgcggagccccagccgagcctagccctgcccggccccggaggacttgcaacactccgaggccaggaacgctccgtctggaacggcgcaggcaagccagggggccggggccggcgccgttggggactgtgggcggtggggactggtccagggctggggcggccatgcgccggggcgcctaaacttttcggagcgcgctcccggcttgcccgctcctgggcccaaggagcccgttccagatggggatctcccctcctggcccttggcgtttcgctctccctgggcgcgcgggtgggcggccgggtctgtggcacctggttagccttgggagcccagcagcgtgttgtgggcactggtgagcggagccagggtctgggggtgtcctcgtgttccctctttcgggcacgagtggcctctctgtcgcagggcctatccaccatgccagcccgagtggccagctgtgtgggatgagggctttcatggccctcagctggtgagaagagggaagagggaggggagacagccagggcctggcacggaccccaggttgcccccacacgcgctgaggccagtctcggtgtagacaggtgaatatttaaggggtggggaagggggggtcctagcttgcagctggggcagaagccaatgagcagctcaagtgtttggcatggggaagtggccacctctatcaccatgactttgccctctgccagtcccacttccagccactgtttcccggctgggttcacagaactacaggggagtaacatcctcctcgtgacttctttgggttagagtgaaaacaaaacagagaaacgggaaaagggaaagcaagtggagagactggggcaggagccagggaccagtgggaggaagcagagggaggctgctgggaggccaggccctggccttgtggggtcggcaccaattcttgtcctatggggtctccatctcctctccctcctctgtggcctctacgtggtacccaggagtttggggttctacctgagcaccctggacatgggataagtaggcctgggaacgcaggtcagagccagatgtcat

SEQ ID NO: 8457 - DNA, 6000 bp, Homo sapiens
gtaagtacccatggtagggaacacaaagattgtggcggggagcagggcagcaaagggctccccataccctcggagacatcagtcagctgcggagttgtggcccgggatacggagaagccaccactctccaagatagaagcctcctcatctgacagctctgagtctgtaatggccaaggccaatgctgttttcttcacatccacctggcaggagaaccaggatgaacacgacatgtgaggggataagagaaccaatttatcaggagcatcccctctcccaaaacctctggcttccacctcctttggaggtggcagctccaaagcagaaagatttttcctctggctttctatttgacacccccgctttccctggacctcaccactggggagaagccagccagctctgcctcgctttcactctctgtctctgccagtggctcatcacctcctgggggtgcattcttcccctgacgctctagaaaagcaagagtagtagagcaatgaccaagcatgaatgatgggaggggagacaaacacagctaaagaactggagaagatctcaattccagggcatctcatgaaccccaagccaaggccctcccgctctttcaccctcctggcttagggcagccccttactcctcttgtcgtgtttgtgatgcagggcattggcttctgccttcatgctgtagtccagctgcatgagcaggggctccaggcgagtgtacatcctctggatcagctcatgataaaccaccaggggccacagcaggatactcaacactatgggttaagaacgtgaactaagagctccctacgccaatttcctaagagcccccattcaactggtccctaaactgaagtgctgaaggtaggcaaggtcctttcccaaggctgtgccaacctcttcttgccacatccactgccctcctccccaggtaagtcttccacagttactaatactaaagcatccctggagatctccacaaatcagaaactgagcagagagagcatagtcttccctctgggtcagtccaaggaaagaagaaaggagagggctttaaatagggcagggacagaccctactcacagacaatgtaggaaatcataatccctggaacatagtgtcccaacacagccaacacagcacagccagagcagactcgaacgcagaactgcagagaagagcaaaagtctaagaacatcacgctgagatatgcgccccgctcggctgggtaagaaactactgctcagctggtagaaggatgggtatgtactcaaggaatggggtggtccagtttggttaagaggatgctcaagaccaccaattcaggaagctggcaatacataatgcccaccacctgtaattcacactggtctgccttggcaggagaaagtgtcaggctatcaaaagcttatttcctgaggtgagactgcctcctgcaccagggattagctgtgaatgttgcctcaagaaggcgcccaggcctcttctttcagggtctccaagcggggagtttatatcactccactcccatcccccgccacctctattccccttcagtgtagtgaactgttgtatgatgtaggggaggttacctgagctggattctgcctcttgtactgcagcagctcctgcaggtgaatctggaaggtgagccagctctcagccaggtatctgcacaactcgggcacactcagcaggtgcggccgggcgcctgaccccgcaccctcactggggagacatgacatgacccctggaggcctcagataccagcttcctagacacttaaatccctctgagaatgccaaagatatctttagtctaaaaaagcaaatgaccccacctctcaaaaggaggctgtcctggtcttagaagcaaagccaggaggacccaaccctctgccccaaaaggagcaggcacgcaaacacctacacaggagcctaggaccatgaaaaacccatggcttgttaccagttcattcacaatgctggggcactgccctgctccatggtgacactggcaccagcaagcaggacaggatgtgggcatttgtcttcaagaggtggcctgtactcacctgtcagagtgtggctcctctggggatgatgctagagagagaggaggggggcaaattattgagtggtaggggccctgggagacactccccaaggcagaaatagttgtccctcctctgcagccccagagcaccttcttcagatgccaatgggggagctgttacatgtttttgtttgcgtctgtctcctttagacattacccttctccaacataagaactagattttactcatgcttatctcccaagcaactcacatacagcctgtcacctactaagtaaattatatggataacaagaaaaacaacactgacgttctatttataaggcttatatgtgaaacactatcataagtatagcatgtgtattaactcattaatcctctcctcacctctctatgaagtaagttctatcatctgtgttttacagataaggaaattgagacaaacagaaattgagctacttttacaaggtcacagcaatggtaaatggcagaacagagaatggaacccaggtaatatggctgcagacttcaccatcttaaccactgcacctacagtagtattagtttgggaaaggggcaattctcattttagggaattccgtacaaaaaggaagtgggccatgcctgggaggcaggtggcctgctgtacgttcccctcgccacttaaccccacccagcggaatcaggcaccaagcaagtacccaatgggtgcttactgaatgaagaaacactcacctgaaacgtcagggagaaagcgaggctgccagagatccagcagaaaataggccaaaagtgagacgctgagtaggaagaagggccggagggacgaggaagacagcaaccttagggagagacaggcacctcagcagtgagtgggtgagacaggctcatgcatccatctcagaaggtggaaaggcgcctactgatggggtaatggcacctccaggcctaactcgcgactcacgactcagagatagaaaaaaatgggcaattcaagcggatgtcagcctgcaaaaactggggatgggtcatgcccccaggccaagtgataacccagaaaggggaatggtgctctcgacccctccctcccccgctcatcccggccccgccccctcctccgcggccgttaccagaagaggccgttgagcgcggccgccgtgaccaggctgtgcagcggcttctcccacaccagcaaccgctgcgccgccgccagcaccgcctcccagccgcggagccgcagccacagcgtcgtggccaggcgtcccaccgcctcggccgtggccgcctcctcctctgcctcactggtggcctcactcatgcctaggctcagacccagacccaggcccaggctcaggcccatccccggccccccacccgcgccagtgttacccccgccaccgccgctcgccatagccccgccgcagccgccgcccgagcccgcgaggagccagggctgcgcggccgccgccgggggcgcgtcaggcggaagggggcgccgcggaggacagcagaggttgcggacgagcgtcacgtgactgcggagcgctgagcccgtcacgtgacgcggcctaacccccccccccccggatagggcgggccgcgcatgcgccccggcggctgccgctgacactgcgcctacacaggttcgttttctggttgacgaagtaccccgggttccgagtccgggtctaggtccaggcagtcgagcccgttttcttatcccacagtaggcagggcggctagggagtgtggtgctgccccggtatccccgtgtggggcaggaagtgggcttccagattcccagtatccccggtagggtctgcttctgctcgctcgggaagggcggtggccgtcccattactcaaccaaccctcaacgcactggtcctcccagttccctcccctcagtgggtaaacaaacacacaccagcgcttgactcgacagactcgaaaacaacatctactcagaaaagttgtttctttcctatctccttaaactttcccacttccacatatcggagcttcttcccacctcggcctactcaagcatgagatcggaggcgggaggtgggtttcaacacaaaaccttgggtagatgcagtttacttttgggtggacgtgttgacacgttttgaggccttacattcgcttaagatcacagaatttcctcagtagccttaggtttaaaagttcaaattacagtaaaaaaaaaaaacaccctgagtttctcttccttttcatagttcacccactgctaaatttcctgtgtgtcctttcagacgcttttcatatgcattgctgagtatgtataatatctctcctaaaaagcaactgggaacaacttcctgttgtgcgtttcgtcttattcacattaacttctccattgctacgcctggcttgttcatcctcagtgcggcgtggtcccccctacgaattgtccccatttctcagaggcgcctggggcttggccacgttccgtgagaccaggagttcgagtccggttcctgcccgcgggtcggggcgggaggctgggccagatgggcggcaggaagtgccaggcgctgacttgcaggcggcacccccgcggcttgtaaacgccgggcggacgcggcacaggcggagtacgcgcctcgcagccgcatctcctttctgctccgcgaggtgagcgtcgcacggacgcttgacacctcccttcccgggcctagggcccccgcgcgccgcgccaagcccggggcggaacaggaagaggcgcccagttcagcccgggccccgccttccgccgccggggggagggagctgcgagggcgagggcgaggacggcggcccgccccggggaggcaggctggcaggtggacaggcgggcaaggacagctccgcgagccccctacaactcgtttccttccgttcaccttcgcagggcggcgactggcggcgcgatggacctgaccgggctcctgctggacgaagaaggcaccttctccctcgccggcttccaggacttcacggtgagtgggggtcccgccccctccccggcctcccggcgcgcccctcccggcctgagcggcgctgcgagctcgcctgactgctgtgccgggactgggcggcagctgctcgagcagtgcttccttgaggccgcggctgcttgggccgggagggagagccgcggagtataggaatgggcgtaggggtggccacacgagggcccttctcggagaacttctcccggggaaccctcgatgggggtgggggcattcctccctctatggaccaggctgccattggcaagcgatttacagaacgcgggtctgggtaaggcacgggccccctagcagcgaggccggcctgtcccctgccccgccttccagcccagagccaggatctgcatcatacctttccgtgcccttcaccctccgctgcccctgccctgtttcagttcctcccaggacaccagaagctgagtgcccggatccgaaggaggctctactatggctgggactgggaagccgactgtagcctggaggagctctccagcccggtggcaggttaggcagtgttgtgtgactggacaagtgagaagcatgaaaatgggattgtcatcaggcagaaaatggctcgaggtttgccccgtggctacactgtctcttcattgctagctcgttggtacttggttcaagagggcagtttgcatttcccattcttttagcccaaatgaataaaaaacattgctgccacatatatctatacaaatcactcttgatttatatattgaaaagctaattttcgaaggatatccatcatatgttccccaagtaaacaaggcatgtttatgccacagatgaacagcagtgacagataaatctggatagtttgatgtgacagggcaataagctttcctgttagaatgagctgaaattcgaacttg

SEQ ID NO: 8458 - DNA, 6000 bp, Homo sapiens
cttgtgaccttggtcccgcccttttaggtgttcattttggaagagttgctgagccccattgtcacacccctcatcctcatcttctgcctgcgcccacgggccctggagattatagacttcttccgaaacttcaccgtggaggtcgttggtgtgggagatacctgctcctttgctcagatggatgttcgccagcatggtcatccccaggtactgggagaggagggagccaggtggcctgggatgatgctggaacatacagtgtctttgggaaaaccgcaaaaagacacctctcctgagtcacacaaaggcagtcctataccaggggcacactgcttgggagcctgggctggatttcagccctaattcgcacccttggccaagctcccttaagaaaggcacaacacggccaggcgcggtggctcacgtctgtaatcccagcactttgggaggccaaggcgggtggatcacgaggtcaggagatcgagaccatcctggctaacacggtgaaaccccttctctactaaaaatacaaaaaaattagccaggcgtggtagcgggcgcctgtagtcccagctactcgggaggctgaggcaggagaatggcgtgaacctgggaggcggagcttgcagtgagccgagatcacgccactgcaatccagcctgggcgacagagcgagactccatctcaaaaaaaaaaaaaaaaaaggcacaacacaagtaactggctcagcatgcagtgcagcccctcctgggtctgggggggcaccagtgccctgggaaagattgacagtatactgtggtctccgttctccaagggtaaggcctccccactaacaggaaaggtgcaggaaggctcctggaagagaacagccctgcttactctgctcttccttgtgcagtggctatctgctgggcagacagaggcctcagtgtaccagcaagctgaggatggaaagacagagttgtcactcatgcactttgccatcaccaaccctggctggcagccaccacgtgagagcacagccttcctaggcttcctcaaggagcaggttcagcgggatggagcagctgctagcctcgcccaagggggtctgctccctgaaaatgccctctttacgtctatccagtccttacaatctgagtctgaggtgtgttcctggtgactgggagatgatgggcagagtggacttcaggagctgggagttgagggaccgggcatggggtggaaggcttcctgctgtctcttcagtatgtgccactggggcctgagatacagaatactaggggaccccagagacctttctcttgcctcaagaattctacctacccgtttcgttcatagcccctgagccttatcgcaaatgtggtagctggctcatcctgccggggccctccactgcccagagacctgcagggctccaggcacagggctgaagtcgcctctgccctgcgctccttctccccgctgcaacccgggcaggcgcccacaggccgggctcacagcaccatgacaggctctgggtgagtaaatcggggccaagatgggagggcacggcagccctcagcagcttgtgtgggtctcagagaagttcacagctgctgtctgtctctgttgggagagacagggtggatgccaggacagccagctccgggagcagcgtgtgggaaggacagctgcagagcctggtgctgtcagaatatgcatccacagagatgagcctgcatgccctctatatgcaccaggtgagtgcacagctaaaaaagagagtagagggtttagatgcggagaagcaagaccggggttccaaacccttctctgccatttacttgttctgccacctccactcccatatctaccttcttaatatcctttttagctaagcctgctctcatccagggccttcacacactcgcagtttcccctgcctagaatccagttccctgggatatccagatggcctcctccttcttcttgggtctctgcagctgccgtttccctgagactttctctgatcactctcagtaaaaggctcccttgcccaccctcctgaatcttcctgtcttagttttctccatagcatttagcaccatgtgacatatcatgttttttccttatttatttgcttattccatatctcctctaccagtatataagcctcacaagggctggcatttctgtctgttttgttcactgctatctccccacacctaaaagagtgcctggcacttagaccgtcagtcagtttgttcctgaatcaaatgaataggtaaaatgagggccattacaacacaggcttcttccggggatctgctgtgaatgtaacctgtaaagatcagaggtatattacacactattaacataataggtgctctgaggcaaggattctcagggaaggggtaaagcgggaactgactgataccaggttggagggcagctgtttcagatggacatccgtctgtcccccactaacgagccccccatttctccagctccacaagcagcaggcccaggctgaacctgagcggcatgtatggcaccgccgggagagtgatgagagtggagaaagcgcccctgatgaagggggagagggcgcccgggccccccagtctatccctcgctctgctagctatccctgtgcagcaccccggcctggagctcctgagaccactgccctgcatgggggcttccagaggcgctacggtggcatcacaggtatccagtgggggtataggaggaaacagaggctgcagggaagggtggttcttccagggcctctcaaggggaggaaagaggtctgagagaacaggcccaaagactcaccccccaagcagccccccagccctgttcctcattcttgtgttccttctatgagtatgcttactcttacttgtctctccagatcctggcacagtgcccagggttccctctcatttctctcggctgcctcttggagggtgggcagaagatgggcagtcggcatcaaggcaccctgagcccgtgcccgaagagggctcggaggatgagctaccccctcaggtgcacaaggtaagggccccggggcctaggaaaaactgccagaaatagtaacttccagggtgaggtaacagcttttcaggggaaggaagatatgccccacccccacacagagatactgtaccctcccttccaaaacacactaccccttcttttctcaactgctctgcagggcttggtttttccttaccttacctccccaggaatcaacctttcctgtccctttacctctaggtttctatggggctagcaggtatcaaccagaagctgaagactatctccattaccaaccctttctccccacaggtatagacaaggctgagcagggttcctgtggcccaggatggaggccaccgctgccctgccatcccgtctgcctgccatgggacggctcctctgagtgttccctggccccacgtgtgtggtgtttgtgtgtctgtgcctggccaagggaggtgccaacactgggcttgccacagccccaggagaggaatttggggcctaggaaccgagggcacacgggactctagcctcatccccaggacccccttggctcagagtgtggtgctagaaactggcccccagcccagccccagtactgccacctttacacctacccctgcaagtccccagagggctgcccacgatagaagctgccaagcagggagaacctgtgccaactgtggagtggggaggttgggcctggaccctcaacccctgcaaccttccctagccccctcaatagatgagcaggtcaggctgtggcccttacctcacccgcagttctcgcccagtgctgcagccggctcacctctctccgcttcttgcacatcactggcctgtgtgtgctgcttgctcctgttctgttcgcttgctcccgttccgttcggcttttgctttgcgttagggtgaagaccctagcgtccagctcccctcaacgctatattttgacactaaaaaagaaggtttctaaattgtaggagcaggatggaaatactttgctgcccttgccatcttttaggatgggcccccaggagactgaggtcttcctgggccctcattgctgcttatcgtaccccccatcacctgcacatgggacagaccgggctggagggtgaccttggctgtgtgcgtcccagcaaaagagctctggcccgcatctcgctgtgccctgaagggggatgaagggcgatgcctcgcccgaggctttgggctgctgcactgcatgctgggactgctcctactctctgtcccacccctcacccagctgtggtccggctttgggagagtggtgaattgcgctgcccgaactcggagcggagcagggtagggaccgtgtacagcttgataacccttaataaaaagggagtttgaccagacttcttgttgtctcgcgcggctagaatcctgggaacaagagaaatgggatggggactctgccggggtctagaagaaagtatgtttaggccgtcgctcagatacgctgagcaaggcggctggcggaagggcagcttccgacccacagttccgtggaggtctgtgtcctgccccgagccaggattccgtgaggtctgtttccagccccgagccacgattccgtggaggtttccagctcggcctggtcgtcagatttcccgccctgggcacgtgaccaagccggctctgcttctctaatttgcattcgttgcctgcaccattccccccgctcccccctcggagacatttggccaatgggagccgtgggtaggggctgtgggcggggctacagccgtggagcgcggtgcgagtccaacaccgagcattcccgtgggcctgcagttggcaggagggtcccgggcccagagccagcggggccgtgctgagacggcgtacgtgccctgcgtgagtgcgtggcggcggcgcgtgcgctaggggagtgggcggtgaggcctggtccacgtgcgtcccttcccgggacccccgcagcttggcgcccagcggctacgtgagccaaggcacccggatgtccgcgcccctctccgagtgaccagtcccggcctccggtcccgcagtgcccgcagcctcggccggcgtccacgcattgccatggtgactgtgggcaactactgcgaggccgaagggcccgtgggtccggcctggatgcaggatggcctgagtccctgcttcttcttcacgctcgtgccctcgacgcggatggctctggggactctggccttggtgctggctcttccctgcagacgccgggagcggcccgctggtgctgattcgctgtcttggggggccggccctcgcatctctccctacgtgctgcagctgcttctggccacacttcaggcggcgctgcccctggccggcctggctggccgggtgggcactgcccggggggccccactgccaagctatctacttctggcctccgtgctggagagtctggccggcgcctgtggcctgtggctgcttgtcgtggagcggagccaggcacggcagcgtctggcaatgggcatctggatcaagttcaggcacagccctggtctcctgctcctctggactgtggcgtttgcagctgagaacttggccctggtgtcttggaacagcccacagtggtggtgggcaagggcagacttgggccagcaggtgagggactctgtgggaagggggaagcctctgctggccgggcttgggagaaagcactgcatgtccagtcacactgcttccaggctttaggatgcctctaagcaaagggagaagggaggggctgagtcctgccgggagctgatagccagctggtggggtgtgtctttgctgagtcactgtggttttgcttttttttttttttttaagcctgtaagtgctgaatgtgttcatgacaccagtccccggccctattataagtagtaatacaatgaaattttatcctcaatgatactctctccacttatatttcattctaggttcagtttagcctgt

SEQ ID NO: 8459 - DNA, 6000 bp, Homo sapiens
ggggaaacatccataacaaaagagataatagatttggaaaggtcactaaacatgtctcagtaattgctaagatagacactgtgggtgtgtgtttaaataaggaaatgggtcagttatgagagtagggaatttgccagtgcatttttaggacagaaactcagatctgacagttgccagatagtaatcaaaccctgtttgggagattcctcattctgccccagcgcttccttttcatccctgcagatctttcttatttcttcctcagtaggcttctttctctcctctcttactgttttccagtgtgtctgaggtgagtgcagtctgactgcttcccgagggtcttcttctgccataaaagaaaagatctttctcaaccttagctgaggagaagctagcgcaggtttctctcaatgcagatgtagctgggctgcagtccaaggcttagaaaatcctctggatataccaatgagaatggaggcttaggttggagagaacaggaaggtctagggaattgggatctggagcaaaggctcaccatagacatgcaaagtggtcagcttatggagcacacgctgtagctcttggaaggtgggtctgcgggtggcgagggggatatcccaaagtcggggatcccccctttgcaggggtgctcccttgcctccaaagaacaaagaccggccagagcggggagcacgcaacagtattgtaccagcctcctccagcgccttagcccagcttggccctgccagcaggtcacgaacatcctagagaagagagtaactcagtcctgcataccttcacttgctatttataaatctccaactaaaaaaaatggcccacagaagtgcaaggggtggaaagtagaggataacacggagaaagaatagaggactaaggctcctggggaatccctcatctacctttgtctacctataatgaaaattggaaggatatgagtcaaaaacctccctacttaacagtgagttgaacagagatgcaaaaaaagtatggatcagtaccaccagatctaaaaggcttaactcaccttatatagtgtggcttcattgtagcgcctcaggttggctccagcagagtgtgatggcccacctcgggcatcccgaagcccctgggctgtgccccgcttggcccgaaccgtatagcggtgaaaagttttgtgtgtcaccacttctcttctgtagacagcacagactcagtactggagaccagctggtgctccctggctaacaggatccactccatccttacccccatgcagcaccctctcacccttgaaatatagcaccagcaaagtgcccagctgcagccatgagcaccacgcagtctctgggacctctactttgcaggttctgtagcagcagttctgcctcttctgggggatccttgatgacagagaagcatcagaaacatatctgttgcattcactgagagcaagaaactaagggccaattttcacaaacattatctcatttaatattaccaccctgaggcttgtttccatttgacaaacaaggaaatttgaggcttggcgaggcagtcaagatgaagtggtagaatcacaattcaaacctaaattggtttgtttccaaacttaattccattacacttaacccttccacaattcaggccagtttcaattcaagactatgttgtcaagcgtgatacccacaaccaacaggaaggaagagaagcagggagaaatgcactaggctaagggaaatctaggctgggtgtacaaaaggctggggttagccatgcaacctgtactgtcacttgcctgatgagggcctaggacacagcggtaggcataaagaaactggccctgggcattctggaaaagaactcgatgagggtaaaagcctgggggtcggctcaacttctcaaatgtagccctctcccgatccagtgtctgcaagtcctcctcactggctgagtctgagtcttctgatcccgagatgctggaaagatctcctgaagacagacaatatgagatacacaagtttggtaccccatttttgttctttcctcaaactctaaactagtgctttcttatacctccatgtcctactcctacataggtccccctaccactcatcacctgtggagctctgcttttcaaagtccagggcagacaggagaggcttgtccttgagacgttgctttaggttaaaccgatgccagtcaagcttataatgttccctctagtacaaagacaaagagtgagataaaggtggaaatatgccccagcctggccttgtactggccaagaccagttatagtattctaggaagtacaaccaggtaacaccaactgcctcagtcaaagcatggacctttattaagacaaatcaaatgtctacctctccccacccaccattacacttttgcttctaacatctagctctgcacctgacctattacctgttcttggtggttctggaaggtctggtcacaagttgaacaaaataacttctctgaaatatccataggaccctggagtagctttctttctgggctttctctctcccctgagcctaaataagggaagaggaattggacatagaaagggagcccaaatccacagtgacaagaattatattcagagtgtgatatacaaagcagaggaggatacaaaagagatggcatgatactgccttcaaggaatttacactctaatagtcatgaaataaacagtacagcaatcacttaatgcaataaacatgcttctgaaaacatgtacgtaaaatgaatgtaaataaaataaaattggccaggtgcagcggctcacgcttgtaatcccagcactttgggaggccaaggcagacggatcatgaagtcaggagatcaagaccatcctggctaacacggtgaaaccccgtctctactaaaaatacaaaaaattaaccgggtgtggtggcggatgcctgtagtcccagctacttgggaggctgaggcaggagaacggcatgaaccggggaggcggagcttgcagtgagccgagatcacaccactgcactccagcctgggcaacagaacgagactctgtctcaaaaaagatgaagaaaaataaaataaataaaacgaatgtaaataaaaactggccctgggcattctggaaaagaatccgatgagggtaaaagccttggggtcggttaaacttctccaacgtagccctctcccgagatccagcgtctgcaagtcctccccactggctgagtttgagtcttgtctaatttaaattagccaaacagattgtttaggtgaatcctaaagaaaataatttctgttcagtttaaaattatttttcactgcacaaaaactacttcccaaatgctttttaaagtttacatttccaattagtgtacagtttgtctaaggagaggtgcaagaaaagatgtagccaaactaaagttacacaaaacaggaccgacacggtggctcatgcctgtaatctcagcactttgggaggctgacccaggcggatcacttgaggccaggagtttgagaccagcctggccaacatggtgaaaccccgtctctactaaaaatacaataattagccgggcatggtggtgcgggcctgtagtcccagctactcgggaggctgaggcaggagaatcacttgaacccgggagacggagattgcagtgggtggagatcgtgccactgcactttagcctgggcgacagagcgagactctcaaaaaataaagctatacgaaacaaataataaattgtttcatattcagcaaaaaggaataatttgagtggggcctggttaaatgtggaatacatctgagaattttatctctacaaagtttaaagtgtttttgaagggaatggtgttaacgtgaggagatacatgcaatggcaaaaagacttgtttgaaaacaagggctgtgctggacattacccagagattaagtgaatttaatcaagcagaaagataaatcaattggcctcctaagctcgggaataccaataagaatgtgttccctgaacgggcaatacgctgtaaggagccctgtcacgtttcacacgaaaccttccaggatacctgaacaggaagtacgcggagcccgggccagagcctccccaggcgcgtggctcaccaggctcaggccctgaaagaccggagcatccgcgctgaggtcaaacagggagatcgacgcaggagccggggctgcatctggagccggcgacatggctgagcagaaattatttagcagcagctcctggagtagaaagcgtgtaagaaacagggctcctgcaaacgagatcctactgctgcgtctcctgcctgcctgacttggtttctcctgcaccgcaagacttctcgtctctcatcctgctaccaactgtgagatgaataccttggcccccgtccactttctcaaacccccagtctcagcccacaaaagaatgaaataggcattcggctcccaaatcgagtccaacagagttaaaaatcactgagcttgcctagccgaactttcttcgttacccatgcgaccagcaacaactggcccgcgtaaactcgcccacgcccttagaagacgcaccaaacgtcccgggagctgagcggctcgcaagtcctcaggtcgattgccggatttctgcaacacaacaatccccgtcactacggagcagcgaagaggacaaccggcggcgtccgcacctgagccccgccccacgtagagcacactattgggccgctgactgtccaagacccgcctcgagactttagtcccgtccctgaagccgagaattggccgttgtgtctccgccccccgtgcttattggccagcctggctgcgggtgacagtgagtggcagacacccggcctagcgccgcgggtcgcgccgagccgagccgagccgagcggagccggcggagcctctggaatcacccgggtcgctgttcctgaggtaagacgtgagaccggttattggaatcccaggccccgtgtctggccttgcccaggggtgcctgcggagccctaagtgagctcgcggcgggtaacggaggaaggggcgccgccggcggggcgggggcgcgcagccggaatgttttgattgctggcgcgcgcagacgggggcgcgcgcgggcgccggggccgcgcgcgaggttgtccgctgttgggagctgccagcccttggcctggggccgggcgaccctggggcgaggtggactccggtccacggtcgccgcggctgggtgtggggaggcaagccaacccacccgggctatcagctgtaaggctgactcgatccctgcaacatccgcaggaacccctgagcccaggcccagccggccggggctccacgggccctggtccacactgaccctgtgagtggtgacttccctgaggggcagggctctcactagcccagggaatcccaccggggccaggctgggccaagatccacggcccccaggggctgcacggacaggtgagtaccacctcgaccatgcctggcttacaggacctagggaacccacaaattcacctaggatcgggggtctacactgacccagtcaaggtttcccatccagaaggtttgctcaccggctggatctttggtgctagggaagtaagagaaggggttgaccagaaaggtcctcttcaggaaagactcttgaggttttgtggaccctgagaagtatgtcatttctgaggctaaggtagggcaatggagaaatagtccagaggcgcccctggcctcaggtctgtacccactcattctccatggggtccctaagttacttcttgagaccctggagttggaagagtggcccggtttagcacagccagaggaagtgctcgtagtcctgggctggaagggtgcttcttccccactgcagccttcctgccccatgcttggcctcctcttggtggggtgtggatggctgggagggttgggttcctttttatccccactgcccactctctggggcctgacatcttctcctccagcagctgc

SEQ ID NO: 8460 - DNA, 6000 bp, Homo sapiens
cgtgtgtacaggaatattcataatagcagctgggcacggtggctgacgcctgtcatcccagcattttgggaggccaaggcgggaggatcacgaggtcagaagttagagaccaacctgaccaaccttgtgaagccccctctcctaaaaatacaaaaattcgtcaggcctggtggcatacacctgtaaccccagctactggggaggctgatgcaggagaatcacttaaacccgaggcagaggttgcagtgagccaagattgtgccactgcactccagcctgggtgacagtgagactccgtctcaaaaaaaaaaaaaaaattcataatagtgtgtccagaattggtgggttctcggtctcactgacttcaagaatgaagtgctggaccctcgcagtgagtattacagttgttaaaggcagcgtgtctggagtttgtttcttctgatgttcagatgtgttccgagtttcttccttccggtgggttcttggtctcgctagctcaagagtgaaactgcagaccttcgcagtgagtgttacagctcttaaggtggcgcgtctagacttgctcgttcctcccagtgggtttgtggtctcgctggcttcaggagcgaagctgcagaccatcatcgtgagtgttacagctcatgaaagcagtgtggaccccacaactgaacagcaggaacttaatacaaagagcaaaaaaacaaatcctcccccacgtggaaggggacccgagtgagtcgctactgccggtggggcagcctgcttttattctttatctggccccacccatatcctgatgattggtccattttagagagagctgattggtctgttttacagagagctgattggtccattttgacagggtgctgattggtgcatttacaatccctgagctagacacgaaagttctccacctccccaccagattagctagatacagagtgtcgattggtgcattcacaaaccctgagctagacacagggtgctgattggtgtgtttacaaaccttgtgctagatacagagtgccaattggtgtatttacaatccattagctagacataaaagttctccaagtccccaccagactcaggaggccagctggcttcacccagtggatcccacaccggggccgcaggtggagctgcctgccagtcccgagccatgtgcccgcactcctcagcctttgggtggtcgatgggaccgggcgccgtgaagaagggggcggcgctcgtcagagaggctagggccgtgcaggagcctacagcggagggggagactcaggcctggtgggctgcaggtcccgagccctgccccgcggggaggcagctaaggcccggcgagaagtcgagcacagcagctgctgacccaggtgctaagcccctcactgcccggggccggcggggctggccggccgctccgagtgcggggcccgccgagcccaagcccacccggaactcgcgctagcccgcaagtgccacgcgcagccccggttcccgcccgcgcctctccctccacacctccccgcaatctgagggagccggctccggccttggccagccggggaaggggctgccacagtgcagcggcgggctgaagggctcctcaagctcggccagagtgggcgccaaggccgaggaggcgccgagagcgagcgagggctgtgagggctgccagcatgctgtcacctctcaatagcattatgcataatactaccaaacctgaaacaacccaaatgtccatcagcagaaaaatggattaaaaaaaatttttttttttgatacggagtctctctctattacccaggctggagtgcaatagcgcaatctcggctcactgcaacccccacctctcagggtcaagcaattcagctgcctcagcctcccgagtagctgggattacaggcatgagccaccacacctggctgggactacaggtacgtgttaccacgcccagctaatttttgtattttttgtagagacaaggattcgtcatgttgcccgggctggtctcaatctcctgggctcacgtgatccttctgcctcggccttccaaagtgctgggatcacaggcatgagccattgtgcttggcctctacaaaaaaaaaaaaaaaaattagccaggcatggttgctcacaatggtagctgctcaggaggctggggcagaaggattgcttgagcccaggagttgaaggctgcagtgagctatgatcttgtcactgcactccagactgggtgatagagtgagaccctgactctaaataaataaataaatgtttaaaaatgtattagtcactgttagaggtcactacactacacagactcattattttgcagaagggtaaagagaaaaagctgagaatatatgttacctttccagttggaattgcattttagtgtaaactaaacccagttgatgagagaaagcccttctttacaaagtaaaataagcgataaacgtgaattgaatgataggattataaaaatcaccattttgcaacctctaatgaaatcatttagtcaaggatggatcaccagtgaatagtgaaaccattaggtgaaaagttgatgaggaactagatagtctcacagtgccaaagtatcatccaagaattacatgctggtcacattagaaaaccacagctttacatacagagatctggctgtctctaccttaaaccagtgatcaattttaacatcactaatagaacagtcagacatcatgtacttcctgaaatgatgcaatgagaggcattttgctttaaaaattctttaatttgatacagtcaatacttcatatataacttctagtttacaggaaatacaggtgatatacaggttatacactggagaaatacagggaaatacaacatgaagaaaaaaatcagataaacccagaagaagagttctaaagaaaaattgacctggtctatcaacatgacaatgtcaaaaatgggggaggggagagaggatatggtgtctatgctaatttacagagattaagaaacataacaaaggccgtggttgttcttaattgactgttattttgaacaaaacacctgaaaagaaaaggcatttttggggaaacaatctgagaaatttgaatatgaactgagcattaaattatattaaggaatgcccgggcgcggtggctcacgcctgtgatcctagcactttgggaggccgaggtgggtgcatcacgaggtcaggagatcgagaccatcttggctaacacggtgaaaccccgtctctactaaaaatacaaaaaattagccgggtgcagtggcaggcacctgtaatcccagctactcaggaggctgaggcaggagaatggcgtgaacctgggagggggagcttgcagtgagccaagatagtgccactgcagtctggcctgggcaaaagagcgcaagactccttctcaaaaaaataaaaaaaaaaatttaaaaaattatattaaggaattattgtaaatttttttaggtgtcataacagcacttaggttatgcaggaaaatgtccttatttcttggagatgcataatgaaatatttagaagagaaatgtcatgatgtctatcattcatgtttaaatactaaaaagaagcaaatattgtaaaacatcaataaccattaagtatggatgatgagtatgtaagtattcattatgcatttctgtcctttttaaattttattttattttactggaaagcaagagaggaaggagatcaaatctgaacttaagaagctcactcccctacttattggatgactagagtggaagcaaaagagcagttactagctgattgctgcagtggtcgtggtgaaagagcacagtgtttcagttcaggtagtgaggatggacagaagtggactgatgggagatgtattttgcagggagaaaccataaaatgattgatagcctcgaggtggcacagacggagagaaaggagagtcaaagctaatgatgaggccaggcccggtagctcacacctgtaatcccagcattttgggaggcgaaggccgttggatcacctgaggtcaagagttcaagaccatcctggccaacaaggtgaaatcccatctccaataaaaatgcaaaaattagccgggcaaggtgctgtgcgcctgtaattccagctactagggaggctgaggcaggagaatggcttgaacccagaaggtggacattgcagtgagccaagatcacgccagtatccagcctggccaacagagcaagactccatctcaataaaaaataaataaaagctaatgatgacagctaatatgtatggagcatgtagtatgcaccagtccagtcatccttctaagtgatccatattagtgtaacgaacaaaatcttcacaatcactgtgtgaggcgggtagtaactattaacacctccactttgcagatcaggaaacttggacgcagacaagttaaacaaggtgcccaaggtcatacccttagtagatgccctgctagaactggaatctaggcatgcctaaccattttttcttaaggaagagaacagtatcttcaatgacaatgagtaagagtacttattctacccacttttctgcttcttgtcttcgggtttatcgttctggacccacctatctttcctggccccccacttaacttaacccttttcacccaccctggggcggggagacagaggtgatcctagaagagggctacagggatggggccaagtgggaattctagcgaggcgcctactatttgatggaggagggatgggctaggtaggtcccccgctccgacagggctcttacgccatatgtgacgcaaattagcttacgagccgggggtggaggtgtcgtcagcacccgcctgcggttggccgcgttgcagcgagaggggcatgtagaccccgcctcgtagggaggtggggagcggcaagccccgcctcagcccctctggcaggctcccgccagcgtcgctgcggctccggcccgggagcgagcgcccggagctcggaaagatgcggcgcccgcggcggcctgggggtctcgggggatccgggggtctccggctgctcctctgcctcctgctgctgagcagccgcccggggggctgcagcgccgttagtgcccacggtcaggaggaaacttgggctggcgggtggtggggggcggggagcagcttggggcctggagcgaaactcggtgggggtgagggtgaaatgtcatgaagctcggggagaatatgggttgggggaggcatgcgagatgaggaaggtgagagggcgtctcggaggaaaggggcgtaggcctggaggtggggctgggaatacgggggcgggacctaagagaattgggctctggggaaaattgcaggttcgggagaaggacacggggtgcatgtgggcagagggacttagagaccggctgcgagaccacaggagaagccacttgctccgaggcgcctgggaggtggtgacaggcgctgaggaatgggaaggggaggtggcggggagaatgagggaacggtgatctctgggcagtggaagcctgggccgcagacatagagtcccagctgggcagagagagaggccagggtttctccgtaagcctagagaagctgattgcagcgatctgatctcctgtaacgggggacagcacggggagggggcagaagaggatgaagaggggagggtcctctcttgtccccctccccacagccaggcctggtgctgactcacatctgtgcggacagagacagtcagcgctgactcacggacagggggtgggggatgggagggtggcgcgtgggggaaggggcgcagcctcgccgcctggcgccctctttccccacccgggcttggaggcccgagaggcagagtacttcctgtgacgctgtgggttggcagaatacaacagagggctcaggtctagtggagagtcctcgctctgtgaccccttcctctctggtaaccgcctccaaggccagcccttggcggcgccagactcagagcttcagca

SEQ ID NO: 8461 - DNA, 6000 bp, Homo sapiens
cagccttccctgaccaccctaactctaatagcttccataggtcattctttcacattatcctgcacaatgtctctgtcatatcactctacacaactggaatcatgtttgtttgcatctctgttatctgtctcctgcctgccttgaatccataaggacaggaaccttgtctgtgttatctctgctgtatccctggtgcctggaatggggttggtgcggagccagcactccatatgttgttgtggaatgaatgatggcacctgggtgctatcctcccagaccctgagcaagtcagctctctaccgccatcgaggccttctgctgctgtcccccactccccagtcacttggcccccaacccatccctggccacccactcctctcatgtccaccttggcctgtgcccccttaccttccgtgtgggagtccccctcagctgtcaccctccactgcaccagaacgcccatcaggctgagcaggggccagagtgccagcagggcccagcttcgccagcagagtgggggcacaggagcagcccggagtcgctccaccacgtagcgccccagcagtagcagctcggcgaagtagtcagcggcagtggcgatcagcgcagcaccagtcacggcggtggccagggtggtgagtgggcggggccagcgcagagtgagcagggcacagagcaggccgccccccagcaacagccccagtggaccccacacggagcctggctggtagtagggtgcggagcccagcagggcagcagctgcgagcagcaggccgagcagcagccccaccaggaagaggcccacgctgcgcactagcatggccaccagcccgcagagcagcccgatgcccagagcgatgcccgcgctcgccccagcactcagctgtgtctctagcacccgctctcggtagcagaggaggaagatgaccaccgagccaaacagcaacccagtgagaaagagcactgccttgaagcagcggtaacctggaggggaacaggggctagtgaggggccaagatgagggcaccaggctggagggagcaggtccaaggggtcaaggacatgggatcccaggggaaccagagacaaagacactaagatcagagaattgagggtcactggagtcatgacggcatcagtgatggggccattgaggtcaggggaggttagagagatatggctgttggtggtcaatgggaaggcaaacataaccattgagatcatgagggttgatgtatttgaggatcacaggagttaggataaatcttttgagtcaagagtgaattcgtgcattggtgtctttgggatcataggagtcagagagagaagtcactggggtcccaaggggatcagaaaaagagtcattggggtctttgagaagggattgctcacagagatgaggtatttggaaatcataataaactcgagggccgggcgtggtggcagcactatgggaggccaaggcgggtgaatcatgaggtcaggagtttgagaccagcctgaccaacgcggtgaaaccccgtctctactaaaaatacgaaaaattagccgggcatggtggcacgcacctgtaatcccagctactcaggaggctgaggcaggagaatcgcttgaacccaggaggcagaggttgcagtgcaccaagatcgcaccattgcattccagcctgggtgacagagcgagactcttgtctcaaaaaaaaaaaaaaaaagaaacttgagaggtgagggtcacacaggttcagaaagatgagtctttgggggtcacagggcttcagagataatggcaccactgaaaggttacaaagaggacagagtagcagcattactggggagttgtcccagaaaatgaggtatttgtaggttagggagattgacagaaatagaatcatcgagagtataaaacgatttccaagagagaggaacactgagaccaaaacaaggaattactgggatcacagtatggggaggggtgatcagataatgaggttatgggaattagagaggagtaaccagggatcaagactaggagtaatagagggggtcagagggatggaaggtaatgacataactggaggtgagaggaggtggaggtcactaaggcttacatgaggtcacacagaatcaaagagaaggaaacagtgtttgtggagtttcagaaataaggaggttatagggccattaggcccattagagatacttgaaagggtgagggaagtggagattctgaatagttggaaagatggaaatcagagatgggggtcaaggagtcagagagagccaaaaagaaagataacagaggagagtcacttccaggagtggggggaagtatgagagtccaggaggctcgtgatcagagagaggagtagggcgtggacaagggctcagagtccatgagcctgggcgtagtgacatccaagaggggtaggatgtcaggaagcccaggagagggaatatgaggctgcattgagcaacatgcagagggagtgggtacagatatggagggggtgaggtgatacagaatccttggaggcccagaacgtgtcctgaacccttgcggggggcacttcctcctgcctactcttcagttgttcagcccagagtttgggggaggaatgggagggaccatctggctcccaaccctgtctacccacccattgcagggggaggctgcagaacacaagtcttgcactacctctgctcaacctggaaccccagcccccaagactcatttgcccccactggtcccactcacctacaattctcctggaggctttctttgggcccccagcccatagagctcactctcctctctgaagttctgtaactcttgctgcaaagccactggtcacttactcccattatactgggccactagcccatctggcacctttatgcatattagaaaaaggtgtgcctttctctaggcaaagcagctttgtgccaaggcccagagtttgtcagagcatgagctggactttagcccccacttgcccactcagctgagctcccttatttagtacccgtcctgtacaagtattcacagcagctctgattaccggagcctgccttgtaggctggatggatgtgtgtgaccaccatccagcccactctaatatgtatcccaggtgtaaatgctccagggagtctcctccctgtcagacaatatgccctgtggtaagggaccatgtgtaataaccctgctaagtgttttcagtggctacctagcacagttagccaaacacatcctcacaatagctacaatttattgaatgcttactaattcttacaacactacatgagacaaatattgtgatcattgttcagatgagaaaactgaggctcagacagattaatgtgcccaagacatcacaattagtaactgcaaagctaagtaaattcacactcaggtgtgcctaatccaaaaacctgtttttcctataatctagagtctagacaatctataaatgtgtgggatgaaagaaaaggaagaattattcatgatggtagagggattcagagaagacttgggggcccagaaaaagaactcggggaaacactggggagcccaggtgagggatgagatggggatctcaccgaagaagcagtagacgactccaaacaaacagcacatgatgcagacgagggccggcagtgcctggtacctgcgctccaggggctgttcacaaggtgcaccccagaaggcatcatctggctcagggggcagcagctggaaccgcagtgttgccacagtccccggcatagtgctgggaatagaagggagtcaccctcccaagttaacctgacagagggaaagttggggtcacggaggagtcctgggtccccaccaggatgggggtgggagagggattgggagaactcagcaaggacagtggacaaaggaatagtatccacatttgtgcagctccggaagcatctctggagtggggagcaaagacaaagggaaacaaaagtgcctggctagtggaggctgggatgaagttaaaagagggacgggagtcggggggatgaagggagcgtgctgccagtgagaaggaggcagccaagagattcatctgtgggcggctcaatatgggattgtccaagatttacctgggctggaggcgacctgagcttctgagtgaaagaggctgtgcagaggcccgaggggccggggttgcggggcgccagaggctccaactgactggggtccagggaaagtccgtcgtgcgaggaagggggctgctgggccggagagaatggtgtcggcgcggtggcggcgccgctccacgtccaacaccggctggcactccagtcccgcggcgtccgggaactcgggctgggcctgaggaaggggaaggcgcaggagccggggctcgggccgccccagaaccgcggccccatgccctgagcccgcccgcggcctttggtgctgatggacagctccggcctctgctcctgacgtcactcagggcgcaccatccaggcaggggcgggctgcttctgacgtcacatgggacgcaccaaccacgccgcgggaggcaggggactccgcccccggcgtctccctctcccgcactgaggagggggcacttccgggggtccttcccctttaacctcccccttctcctccctctccggtagcgagagcccgagaccccaccccgggggcggggcccttgcagtgacacgtcggacagctgcggccgcggctgaggctccagtgccgagcgcaagaaccctgcgcagcccagagcagctgctggaggggaatcgaggcgcggctccggggattcggctcgggccgctggctctgctctgcggggagggagcgggcccgcccgcggggcccgagccctccggatccgccccctccccggtcccgccccctcggagactcctctggctgctctgggggttcgccggggccggggacccgcggtccgggcgccatgcgggcatcgctgctgctgtcggtgctgcggcccgcagggcccgtggccgtgggcatctccctgggcttcaccctgagcctgctcagcgtcacctgggtggaggagccgtgcggcccaggcccgccccaacctggagactctgagctgccgccgcgcggcaacaccaacgcggcgcgccggcccaactcggtgcagcccggagcggagcgcgagaagcccggggccggcgaaggcgccggggagaattgggagccgcgcgtcttgccctaccaccctgcacagcccggccaggccgccaaaaaggccgtcaggtagtgatcggctgcgcccgctctaccccctgggcagcggccgggaagcgcgcggggaggtcgcccgggcccgggtcaggctccggaaggaaggggctggcgagccaggaagtctttgggccccgataacttccgatggccctgccttcccgagagccgtggggccagtccgagactttctctgggccctatcccggcctgggctgaacttactggactgtgtcctaaaccggctcgacccgatggcgccccagagatcctactagctccctggctgggctgctggtgttagagaaatgacttatatatagggtgagtgtatagagacaggggaagagaaaggagagaactaggatttacctggatctcttgttcctgagtgggttacaagggccacctcagggtgagatgggggagggaggaatgtacctatctcattaatgtctctgctgatgagttgaaataacttctaagtaacattgggttcaaatgctggttctgcaatttaccttctgccttaccaaaaggtaagttcctagagcccctgagtgcagtttgcccctccccgcaaaaacactcagtacacccctatgccaaacgttcctttatgtcatttatgtgaggcatttgtggcataatggcatatttatatagaaatgagtagatacatggtgtgtccagcgtttggctgggtgctttaaacagatataatcagtcccattttacagatggctc

SEQ ID NO: 8462 - DNA, 6000 bp, Homo sapiens
acggacggcatcaaatgaagttttagaaaagccttgctcccttgagaactgcaaccttcctgtctgcccctcctcacctcagtgatgcaaaagagattattattctaagtgaagtaactcaggaatggaacaccaaacatcctaagttctcactgatatgtgggaactaagctatgaggatgcaaaggcataagaataatacagtggactttggggacttggggggaagatgggagggggcaaaggataaaagacaacaaatacggtgcaatgtatactgctcgggtgatgggggcaccacgatctcacaaatctccactgaagaacttactcatgtagctaaataccacctataccccaacaacttattaaaaaaatgaaacaaacaaacaaaaaaaggcctcttgctttgtcttgctctctcatcctcttgatgcatgaagacctgagctctgcagccattttttttcccactcaggtgtaaagggctcataagtgtcctgcttcttatttgcataacaaacagcatcaaagccttgacatcaaaggatgaactctgcagttaggtttcctgggggcttccggaagcccaccaattgttgtgtcaaatttgtatatttaagatgcagtagcttgtggtagaagcgttttctaacaacggtgggaatttcattaggtagagctttggttattcattaccacttggttgtgggactctggattcctcacaccttctttcacgtattttttacactattctatttgaagacaagcatagcctctaggtccaaatccagtggaattacctaggaatataaaagttggatgtcagctgtcataaatcaacaataaaagaagagaagaatttagaatttatttcccttccctactctaggagttaataaaataaagcatcttattttctcatggagcacgaaaggtaaatcacagtgcttggtttccttctggaaggaacaattcaagctgaacaaatgatttctcatttcaaaatgtgaatgcttattaattaaatattattttacagaaacaatagccaggcatggtggctcatgactataatcccagcattttaggaggatgaggcaggaggattgcttgagcccaggattttgagaccagcctgggcaacatggtgaaaccccatctttactaaaaatacaaaaaattagccaggtgtggtggcacacatctgtagttctaggtatccaggaggctgaggtgagagtatcacgtgagcctggggagggtgaggctgtggtgagccatgatcacaccactgcaatccagcctgggtgacctgagtgagaccctgtctcataaaataaaaataaaaataaaaatgagtaataacagctggctaacacacgccaggtactataccagaagctctataacattcattcagtatttagaagaaccatataatgttaactatctacaatttgtagatgagaaaaccatatctcagagaggtcaaggaacttaaagacacacagctagaaaaagcccagctaaagtatcaaattggggttgtctgaattgaaagttctggttctctaaaagagaactcagggagtcattggagcactatgggcaggttccatttttttcacaaaaaatccaccaggatgcctagaaaaagcagagtggattcatcttcttattctctctgtctctccagtctttcatacaccctccttatcattatttgtctacgggtcaaaggctcctttctctttactttggtgaaattggccctccacatacaggtggaaaccccgggatgcttggtgctatttacaaacgtcttttacggattaaaaacacctttggaattcaatcttaattcaattcagcatttacaaggtacttcgtagctcaaacgtttgtggtaggcactgtataaaaaaaagtatatcattgttttcagattattcaattactattttcattaagtgtgtaagcagatatgttttgacatgtttcttagtgtattcaaaataaccccaaatttttactgtagtaagacttgtcttactcaagagtaaagcaattttattttaaaattaggtgattttaggtacttttttaaaggtatgatattccattgtatccttatgactccgttgatgtgttgtaaacagtctccaacatttgaaaactccaggttgtcttcccataatgtgggtggttttctgcattgatggtggcctttgtccaccatcatttttaaaattttgccttactcttcaaggaatcatatctgctaggttagaacacctttgttctaggtagtcacaatggacagaggaattttcagcagctcatttctgttctgcaacccagaaatgatttaaagaggaagttatagttcagtttttccaagttagcatttcctgcttcttggttctcctgattatcgggctgccttgggtcctgaactaaaacataggaagaaaaaagggaaagtcagtgaatgtactctagcaaatgatgccttgctttcaggcagctgtgtctggaaagactttgtttaatattcaatgtgcatatcctggggaaaaaaatggtacatgttttagaaattttactgtttataacaatgcaggcagtcagtttcccgtttcaaacacagatagatacatgcaacactcaagatcctgcagagaggcagccagcatctattgtttaaaaaggtttcaaaaagaattcggattgctcttttctcttttgaatctgtgtgccaaatgacagggaccaatattcgtcttctttttctgtaaaactcagaaagacacatgaaagaacccagaaatgcatttcttaaagggatttagtgcagttattttaaataatttatgcacgcacacacacatacatatatcccccgagtacatattttttccctttttacttgtgtgcaatcagtagctacaatgactgaaatccacttctttggactgtgacatttaagcaaatcttgtatctagaaaccgaaatgcccagagtctcgcacaagctgttcgtctgggccaccaactcacacagccgccgcccagcgcctcggcacgcgtgctcatcttgtgtaaaagtaaaagttgctcatgtcattagctcggctctgagtttgcatgagaaaccagcgcagctctcgagccacgggagaaaacacgatctgctgcggagcccagtgacctgaaactgtagcagtgactcgagacctgtcctctcctcgacgtcgccctataaccctcccgctttatttaggatccgcttttccgagagcagccactcaggcaacccccggaaggtttgttaggagtttctccttgaaacgctttccgattccatcttttgaaatccagcaggcgagagtcacgacagactccaggacctcttgagcgctgtccgcagccccacggtaggagtagccctagtgcacgagacttggcggtggctgaaaagctcgcccaaacgcacgcaccacctctctgcggggttgcggattgcgggttgcggtctttgtccgctcgcccttcctccggggccgcacactcccgcatctggccggcaggtggcgcggttggctcacgatgagctgcggccggggctggagaggctcctccacctcccagcggccgcccggccgccgggacccaggctccccaggaaaactcggccctgctctggagggagtcagaggaggggcggcctgggaaggggaagggaggcctcattgctaggaatcagtgcccctgccagcgcctggggaaatgcaccgagtggcgttggggaccggtccctgggacaccggctgcgctgccttcgccggaccgctcttaggtggccgcgtccacggctcgggcatcgggaaaagaccacagcccgatggtgccagtgcccccggggccggagcagccgggcggggctctgcgggtcctcctgctcgccgtcttctcccggggcagggagggctgccccggctaggtcggagcggagagtcgcagcagccgctccgggcagcttcccagtcccggtctgccttgtctgtgcggctgcaagtccccgcacccacacttaagcctttcacttctaccccaccgctcccagacgggctaggcccggttccagggactgcccccaaccctgcccccgggaaatccacaactggttccctgcccaaggccatctcggggcgtcctgggccctgggcgaggtccacggcgtgtgcagggggacggggccagcggggacttccttactgctagaaagtcattcgttcagtctctggagacagtgacggagccctgctgcggactggacgttggggaccaagtaggtccccgctctccaggcatctggggagccagggaagaagcgagtgatagagccacaaaactccccgcaaagagtatttcagagggggaagcgccataaagacaaaacagggcaaggtggcagagggtggcggtggcaggcgcgagtctgcagctcagcccgggcgcgctggacgcagacacgtcgactctcctaaagaagcaaccgcaggtcagcttagacttcttttatttcaataaaagagcgttttcctccatcttaaaccgcccgtggtgggagaaaaggtttccaacctcttctctggctcccctcggtcaattccgagcttttccaaagtccctccgccgtccaggggctcgaccttcgaggtaacgtgggggatcccgctggctccctccggcaggcgggggcggggaccggccgtgctcgccccctagagccccgggagaccgcgcgccccgtggagcccggagggggcggaaccctggggcgggccctgctcggtgaaggcggggctcggccgccctgtctgcgccgccattggccgcgggccccggactggcgggctcacgtcaccggccgggcccgcccccttggcaatgtcttcagcccgctgctctcctaacttaagcatttattccactgggatagaagcggcaggagcagcgttggcaccggcgaaccatggctgggattttctatttcgccctattttcgtgtctcttcgggatttgcgacgctgtcacaggttccagggtataccccgcgaatgaaggtaagagcgggacggcctttctgtggtcggggacagcgaggggccatcgcgggtgaggggtcctcaggagcgcagggccaggtggtgcggggggagcccagtgtgaatggtgcgtcccgattcgggagaagggggctgaggcgaggggatcggcgaaggggcagcggggaaccgccggacagcctgccccgaggcggtgacccgtgcacgcggcgggtctgtccaagtttgtaaccaaaggccaaagtttatcagcatccgccagagaggcccgctcgaggcgccctgaggggatgcacgggagacaacgccgggatttaaaaaaaaaattacaagaaccacgtcctctcctgagccagcccggggcgaggggaaaacgcagcctggagcacagtgaaggcttggtgctcccggattctagcgaaagcctttcgagctctggtttctgcaaagtttcccgagccctgcgcttctcgggaccgggctgcggggcctgctccgcagcgcagcggtcgtggcgccgctcgtcaggcgccagtgacctgatttctagcacccggagtcagacacctttctcctcgccaagcccagcgccccgagggtgcgattgcgggcctgaggggcccgagctcttcgccccgcagacttggggaacccgccggcaagttgaacgcagtcgagttttagcttttcgccccagaattgcacacagtttagagctaacgtgcggggtcgacgggacccgtctgggtgctcagttttctgtgcatccgttcggacgtgctgggaggattgtatgtgcctgtgtgtctgtgtcgggaggtggggcggggcgggggggcggtgatcatttagtttctgagaaa

SEQ ID NO: 8463 - DNA, 6000 bp, Homo sapiens
aatagagacggggtttcaccatgttggccaggctggtctcaaactcctaacctcaggtgatccacccaccttggcctcccaaagtgctgggattacaggcttgagccacagtgcccagccttccctgcctttttggctactgcagggacagcggcatctcccgggccagttcagcagtcgggacctgcgaagcatttctgcagataagtctagaggctgcttttctagcccttccagcaattttgtacacatgattctcccattacatctcttcccaattccatagctagaatttcagttttctgcaactaactgacactagtctatgaaacgcccttctatcttttataccaaattctagccacgctccaaagctgtgtggaatcctggctcccagcccttcttgatggaatcttcctttttctgaactccaaggcttttgctgttttggcacgccatgtgacaagttatttgcatacttttccatccttggttttagcaacttttagttttagctcttttggttgcagaaaaatagaaacccactaaaaacaatatgaaaggataataatatagaggcatctcatagaaaacaaagacagagtctgcagtcagttttcatagggtagaaattaagacgtaaaatgccattgagaaaccaagcagtcaccctttctctaccaccctctaaagctgtgtggtctcctacctcctcttcctgcatatttctcctctctgtctctcctcctccttctgtttgtatagattggtttctctgtttctcccagcagcgttcatgatttcattgtattgtattgtatttttattatttttatttatttttctttttctacagaagggtctcactctgtcgttcaggctggagtgcagtggcatgatcatagctcactacaacctccaacttctgggctcaagcaatccttccgcctcagcctcttgagtaggtggggatttaggtatgtgccaccatacctggctaaatatttttgtggacatggggtctccaggctggtctcaaactcctcacctcagatgattctctcacctcaacctcccaaatcactgccattacaggcataagccaccgtgcctggctgttatttttattttttgtagggatggggtctttctatgttgccctagctggtcttgaattcctggccccaagcactcctcccacctcagcctcccaagtagctgggattataggtgtgagccaccaagcctggttaagctcatgaatttaaatatggtagagacttctagttgcctacccaatacccttggtctcgttctccccagttttaactgggcacagatcacttggaataaatactacctttcccatgctgctacatggctacattctaggcaatgagatggctctttgaaagaaagagggtgagcctttctcttctttgatccttcttgttttatttattttttcttcttctcttcctttatccttctgagtggggagcagatataattgttggagctatggttgccacattttgaatgtgagaatgaagagatcagatgaagagatgcactgaaaggatctctgaggaagtggagctcccactccaactcttgagtactgtactagtctgttctcatgctgctaataaagacatacctgagactgggtaatttataaaggaaagaggtttaattgactcacagttccacaaggctggggaggtctcaggaaactttcaatcatggtggaagaggaagcaaacacattcttcttcacatggcagcagcaaggagaagaatgagcaaaagggggaaagccccttataaaaccatcagatcttgtgagaactcactcactatcaggagaacagcagcataggggtaaccacccccaagattcaattacctcccaccaggtccctcccacgacacgtgaggatcatgggaactataattcaagatgaaatttgggtggggacatgtccaaaccacatcaagtacttatcatctgactttgtgaataactttctatcttaagccatttttattttaaatttctttttgtgtgcaactaagcttaatcttaacagatacacatgccctcccatttcatgcatactggggaataactaatttctcttggtttcaattccaagctcctagagagattggaagagcatagcttctgtatctaccagtattccgatcaacaatggccaggggagcaaagttccataacacaaatggaatacagaggatctatgcatgtaagttacggggggttgtttttacagaaacaggcacgtgtgttgggcagatactaaaaagtggtcatcattctcctcttcagttataagctaattctcttttcagctttatactgaaatatcttccccttcatcacatacagattaaatttctacatttttacagaattcttcagatacttccttttagccacaaatgtaaggagtactaaacccgagtggaactatgttatgcccactagcaaaagcatgcagcttactcagttttggtcaaatggcaaagactctggaaatcagacacttgattctcacagtcaggtggagtccaaccgatccagttccctacatataaaatgattccctaaacagttcttcaattcaacatcttatgaagacagcaaaaagatttgaaatggcacaacccacattctaaggtaagtaactaccacctcccactcattcaagtcagtaataaatatataatttatgtattataatatatagttatagaatgagataatttatatgacttagtgggagggtaaattttagttattaatttttataaaataaaaaatatatttttttagaatattatataattatagtagaaatctcaaccatgcagaagtatataaaccatacaatggaagtgtctcctgtctctcaacccagttgtattctttcagttattctcggtgttttgtgtgttgtgttgataggtgggtgttttttgtttttgttttaagatggcgtctcactctcttgcccaggctggagttcagtggtgtgatcttggctcactgcaactactgccttctgggttcaagtgattctcctgcctcagtctcctgagtagctgggattacaagcacctgccaccacacccagctaatttttttgtatttttagtagagacagggttttgccatattggccaggctggtctcgaactcctgggctcaagtgatcctcccacctcgccctcccaaagtgctgggattacaggggtgagccaccatgcccagccaataggtgggttatttttaatccttttatacaaatcctttcatacaaaggatttcacatttcactgaggtccagtaactggaccccctagtctggagctactgttttggtgtccattaccagggatgccccttgtaccaggctgtgtgcgccccccacactgctgcagggtggagcgctgctctctaagcctactacgcctgagcttttggcccacactgactgcaccgctgcatacattatttcaccattcccaacagcactcactgaatctatgctctgggctgagcgggggattacacagaagcagaaggaaggcgctgtagagattagagctgcctaatgtcccaatcttttctcctagacatattggtttgtatttccacccacttgaactcatgcataactgagtgacttttttggccaatgaaatgtgaacagaagtgatgtgggtcgcttctgggcagaaacatatagatccagtatgtggctcaccacatttttgtaccctgcctctgtgactgtggaagcctggatcaagaagctgcctctgccagtctaggtctaggtctaagtctaggtctttcagtaactaccatgaccccatttagatcaggatggtcagtcagcataagcaagaacttttgtattgtttttgttttttgagatggagtctccctctgtcgcccaggctggggtgcagtggtgcaatctcagctcatggcaacctccaccccccaggttcaagtgattctctggcctcagcctcccaagtagctgggatcacaggtatgtgccaccacgcttggctactttttgtttttttggtacagatgagggttttgccatgttggccagactgatctcgaactcctgacctcaggtgatcctctcgctttggcctcccaaagcactgagattacaggcgtgagccaccgcagctggccagaacttttgtattttaaagcttatgccaactgatagtcttttctcaaggagctcaccagctagtggagaggcaatgtggaaccacagtctagagatgtaaagtactgcacatggccaagtaagtgttcaagggcttaaataaaatatgataatctcctcatccaatctctctcctattgctatctttcagtctggtagcattagccaaagctctcacatgtcttaggtgggctatctctaaatgggttagtctgcaacactggaataatatgacataaacattttcttttgtgtatgtgagcatacggcttgaaataaactctaatatttgcagcagaggaaatacctttctccacatctcatacgtgttcattttcttgttgaacaatttcaaaataagaaacttccatagctggtaataatatcgatagaacaggaaaatatagtttagctggatatttttgtttttactttttagaagccatactaataaaggagtatattaaaggagcttatcgtaagcctatcttcttacataaatttatctcatagatttttttttctgctttccttccttcacctcatcataatatggaattattttctcatttcccatcatagtcatcataataatgtcctaccctattggactctgaactattttccactattcattttttattagcgttaaattttaaccagaagattgggataaaaggcaacatagtaccatgcaagcatagccactttgacaacgtttctgagccaggggtgaccatgacctgctgcgaaggatggacatcctgcaatggattcagcctgctggttctactgctgttaggagtagttctcaatgcgatacctctaattgtcagcttagttgaggaagaccaattttctcaaaaccccatctcttgctttgagtggtggttcccaggaattataggagcaggtctgatggtgagtgatatttatttgacttgatgtgaagaagggcctgcctatttcaccaaaatcctaaaagctgtcttccagtcttgcagttaactatgtcttggcttatgataaaatttggagcagtagtatggcattaatttatattggtcatcagtgaagaatggtaatttaaataaagtacactatgtggtataggatagagagctgggcaaaaaaataaattaattagtagaagttggctgggttattatctctcacatttctgtacaggtagggctgctctttcaagctttgtggttagagttagggaccttctgaattaattccttcaactttccattgctccataccagtctctaagtatttacagaaaatgcaataggagtgacaggttgcttaatagggatgagtagaaacattcccatgtatgatgactagcctgggtgatggtaattacgaggcatgaatgctgcattgcctgtacctgaagggagttgggctaagagacatggacttaaaatcctgggtctctggcctcaaggaatttttgactcagctattatatagatcctaggacatcgagcttgttgaatagtttggtgattgttactaggtctacctctgttgaaatctgcagcagagcagtgcaggatggaactcctaaatataactgacatgaatcacccgaggcacttgcaatagttagatttacggattttctcctgagaattctgggtgcagtaggcctgggtaggacgcatttgtatagggaaaacggctttcaaatatggcagaa

SEQ ID NO: 8464 - DNA, 6000 bp, Homo sapiens
tcccttggattattgtagtcagcctcccaagtagcgggattacaggcatgcacggccacgcccagctaacttttgtatttttagtagagacagggtttcatcatgtgggccaggctggtctcaaactcctggcttcaagtgatccacctacctcagcctcccaaagtactgggattacaagcgtgaggcaccatgcccagccccccctgctcaactctccagtggcttcctgtctctgaataaaagccagtttttttcctgtgattttcaaggctttagggtgacctacagacacttccctctgccttgtggactttgtacctgctactcttcctgctaggatgagcttcctcctgtcattctcatggctcattccagcacttcttattgatgctttctctctcccttctaaagtttcccatcacaataacccttcaatttccctgtccttgcctaatttttttcttagtgcttattactaattgtatatatatgtatgtatatatatacatatatatagagagagaaataaatacacatacacatatatgcattacatatatataacttgtttttcttgctcactggaacatatacttagtgcagaaaagcatttgtgttggttttgttcattgctgtatccccagcacttcataaaatcacatcatacacgttcagcaaatatttgttgaatgaaaaaataaatgaatagctgaaaagtaactactagcacatatggttcatggataaagcataaaaatgaggccttgctgaaatctgaaatttatgaggcacccagaagccatgaccaatgtcatctcagtgtggtggttcttatgagactccaggctgctgaaggctgctatcagccctgcaacctccttctgtccccataagccatgctgaagtccaaaatccctggaggctggtttggcagcaggccaagactgaagatacctgccaagaccagatgtaaccaaggtccccacttggtaaaagcatctgcacttacggaaagataaatccagtcacagggagaatcctgggggggcacagactgacccaccaagccaagaggtggcacggatttgggcacagcactggatttctggccctgtgtaagagaaagcatttccttcctccttcataaaactttgcctggctgtgcagcgtgtggcttgccctgtgatttctgagcacacttgcatttcaggcacttgtgttctggattctagtctttgatctcccacattaaactcagaggagtggggaacagggccatactgagagacagaggatattcttggtgaccatgtgggttgtgggtcatctttacatctgggctggctacaacaatgaggcagtcacggtgacactttaaggcatttctctaaccccttcaatgttctgtgctagcaactttctcaaaagctaattctatcccactctgtgcctattctacaccattaaaccaccaaaattaaggcaaagattgtccaaattctcagtttcaccccaactccaaggtgggattatgaaatcaattgagtacatgattagaactaagagaggaggcttttacaggcagcatgtgaattagtttacattcttaagatgtaaggttgttagctaatgcaattcaattaaaggtaagattgctattgagagaaaatatataatttgcctaaaaatcaagggagaatgtcaggtttctctacttcagatacatgaaaagagtttagcgcttatattttacattctaattgaagatggattttttttttttttgagacagagtgtcgctgtgtcacccaggctggagtgcaatggcgctatcttgtctcacttcaacctccgtctcctgggttcaagcaattctcctgcctcaacctcctgagtagctgggattacaggcacccaccactacgccctgctaatttttgtatttttagtagaaatgggttttcaccgtgttggccaggctggtctcaagctcccgacctcaggcgatccgcccacctcggactcccaaagtgctgggattacaggcatgagccactgcgcctggcctgatagtggatttctatttatttaacccagacataccaacttatgggtcacagtcctctttgctttgggcctgtcctcaatccacctgtgtcactgagagaccaacagacaggtaagagcagtgaaacttatgaagacaaaataattgatcagaaaagccttcatggtccagagtagaagcttctcagagagccaattaaagactgcctgggtgtgtggaggtgggacaaggattacaaagcagcacaaggaaaattttggagtcatttgattgaggtggtagttccatagacgtgctgtaactcatcgaattgtacactaaatatgcatagttcatacgagatccatcctacctccatatgctgaaactcatcaaattggacactaaatatgcacagttcatatgagatccatcatacctccataagtgggcaagttttcagagaaaaaaaaaacagacttaaaaatcttacagacttcttttccaacaaaatggatcatcggcaattgaagtgcttgtcaggaaccctaatcttgctgtcaaaagcctgcttgaaatgagtggatatgagaggcaccgcccaagggaacactaaccatccagttgcccgtgttcttatcagcaaaagtaagatatgtaaaccactgaagcctagcacctcatcaaaatgccctcacttggccacaatttctcacaattttctcaaaatttttttttcttttttttttttgagacagagtctcactctgttgcctaggctggaatgcagaggcacgatctcagctcaaggttcaagcgattctcgcctcccagattcaagcaatatcgtgcctcagcctcccaagcagctggaattacaggcaggcgccaccacacccagctaatttttgtgtttttagtagagacggggtttcaccatgttggccaagctggtcttgaactcctagcctcaagtgatccacccgccttggccttccaaagtgctgggattacaggcgtgagccactgtgcccagcctcaataatttttaaatcaagagttgatataagattagctgggcatggtggcacgctcctataaccccagctacttgggatgctgaggcaggagaattgcttgaacctgggaagcagatgttgtagtgagccaagattgccactgcactctagcctgggtgacagagtgagattccatctcaaaaaaaaaaaaaaaaaaaaagagagacagaattgatataagaaatagcaatataggccgggtgcagcggctcatgcctgtaatcccagcactttgggagggtgaggcagccagatcacttgagtccaaaaggtcaagaccagtctgggcaatataatgagactccgtctctataaaaagtcaaaaaaattagccaggcatggtggcgtgtgcctgtagtcccagctactcaggaggctgaggtgggaggatcacctgagcccaggaggttgaggctgcaatgagctgtgatcatgctactgcactccagcttgggtgaccgaggaaggcaatgtgaaatacatgtgaattttttttcaaagaaacgaaaaagaaggaagaaaagaaaaaggaaaagaagaaagaaggaaatctgtggtaggcagaataatggtctcccaaagatgtccacatcctaatccctggaacatgtgaatttgttaccttacatggcaagaggggaattaaggttgcagatggaattaaggttgctaatcagctgaccttaaaatagagagattatctggattatctcattggactcaatgtaatccccagggtccttaaaagtggacaggggtgggggcagaaaaggggagacaaggcaatgtgagtatggaaagaagacaaaatgacgcagcagtgctggctttgaagatggaggaagagccaccagccaaggaatgtgggcggcctgcagaagctggtggctctcccctacagccacgagaaggaacacagccttcaaggtggccaacaccatgatctcagcctagtatgacccatttcaaacttccgacctccagaactgtaaaatagtgaatttgtgtggttttcctctgctattactgtggcagtttatcacaacagcagcagagaattactgcaaaaccttcaggcgggaaaaaacagcacaggcttcatcgactcacacattcacttcaataatacagaaaactgtccaaggcaaagcactatgttgtgtgccctgctgggaatgaggtagggaggtattgagatgaaagttgtgcctggtgcccacgaaggtaggtaatggacgtgcagaaagagcagggagaggtgggacccagggtggaaacaagaatgagggactggccggtcacggtggctcagcttgtgatcccagcactttggaggccaaggccagaggattccttgagtccaagtgttcgagaccagcctggcaatatagtgaaacccgtgtctctaaaagagagagaataagggactttgagtcctctttggccaaaaatatttcagtgagggtctgtttcatcccttctctcccatctcagagaaatggaggctactgctagtctcacttgcatcctggattagatttcaggacctttccgccagtgataaatgtgcagcgccttagcggaacctcagccaaagctataaacttcaaccggccacaagagtgtgcatgtgaggtgactgcattttttttccctgccaaaccagaattagccggtataggaatgaacgagcatgaagatttgaaattgctccgattggaaggaagcccaggttaggtttgggcacctccaaacgcacccgttttaaagccacctggactgaggcgtcgagctttcagctccaccaaacgctcacctggcctggcagcgagcggcggaagagcccgggagcccctcacagagcgcaccgagccgggcggagagctgagccgcaggcacccgcgtctccaggatgataggcgacattgcaacaaatctctacacccagcagctcagggggctccaagcagagcagcaagttcgaggatccgggcgtggagccgagtgaggccgcagcccagcgggcctcgggcggtgagtatccgaggccgcgcgcgccgcgggcctggggaatggagcgacgccgggggcatcggagcctaggtttcagatggccgctgcacccccagggacccccgggaaggggcagccccagcccaaggcaggctcgggaaaggctgcccgggcggtggagggcgagactgtgccggggcaggtggtagtgccaaggccgccgcgggggcttgggagctgcgggcgggcagggtaaccggcggttcagggcagaccgccaggcggagcttggggacgcgcgccttgctgctcaagctggccggggccccgcgagcgtcatcctgggcacccccgtccggctggagaagcgcgttctgcccggagcccagcctcgctgcccggctgctctctaggcccgtttgggactcgaactggacagtgatgaggcgcagagcgggggacccggggctgcgcctagggacttcgcggggtgcggatgcctctctgcacaggctgtggtgctgcagccggcccagcttccccggtgggctgctggcttccgaacgcgccgagggatgcggggtgcccgaagtggggatgtggtctcggggtgccaagggagcgggagcaccgagcgcgggtgggggcgggcgctcgaagggtggggcgcgaggccggaccccgcgggcacgatcccgcacccagggcgcgcagaggctgggcccccttagcgcttccgattgaggctcctcaagagaggctgaaatggggtgagagaccggggacggccatttcggggctaaacgctgccaaggccatgacgatgttttaggagctgaactctgctttccaattaag

SEQ ID NO: 8465 - DNA, 6000 bp, Homo sapiens
ctctactaaaaatataaaaattagctgggcgtgctggtgggcgcctgtaatcccagctgcttgggaggctgaggcaggagaactgtttaaacccgggagacagaggttgcagtgagctgacacagtgccactgcactccagcctgggtgacagagtgagactccgtctcgaaaacaaacaaacagtgccattacaggtaaaaaacaaaaaagtaggggaaatatattatgcttttttgaattttgtggcataaaacattttcagggaaaaagctgagaaagaaaacaattttctttcccaaacatacttttgttcttcgtacctccatattctaagctactgctatttgtagcttttaactcttatcagtttagtatatagtgaatacatataacttaccacaaggaaaagcaaaaaacaaaaccacacagactgtgccataaatgttacaaattcagtgaaagagaatttatttgttgtcatcttcctggacttcagaaaactaaaaattagtatacttttaggcaagcttttggtacatttccaaaaagactaatacttttcaggtgctgctaaaatgggcgagggagggaattttaaagatgtaagaagagtcacaagccttatacaaagaaattgctgtgtcaccataataaatagagctcttaaaaatctcagattgcattcctggacctacagaaatctgtaatattcaaagttgcagcattattagcacacttgttttcatttctaatcagcaaactaagaaaagtcttgcagtatgagtgagctgccatcaacttactgctattcattgagaactgtattgatatttctttgatttttatagtaatcaacataaatgtactttgattctcaaaaagttttaatcacttctgatatttaaacaagtattctaatgataaaagtctatttctaatagctgattactgtgattactgaggacatgcagagttgagcatatctactccaaaagatatttgggttatgatcatcaactataattccaggtatagcagtcttttgattaaaggacaacaccattttatgacatcaggttgtactctagagtttcgatgacaaaaaaaaatcttattcttttgttctggcaataacctggcaaaaattgtctagatcaacttttacacaggaatccagtaaaaaacttaacctggggagggcttaaagaagaaggtgctgtattgtggtaagacagcactgtggcatcttaaactgtctgcctaccacacccccactcctagactagctgtgacagtagagatggcagcctatcacactcctggtataggctgttaatgccagaggaagcaacacagacttcatatacatatgagatgggatcaagaacctaagtagaagtcaattgtggaaaggaatgataacatgatcccaaagaaggataggatggatgaaaagaaagacattttgagaagacagtgaaggaagcttgtttttgatttgtcaaagtctttcgttaaaataacaggcagtcagaagagaatgaaggagtctaacgagaacagattaagtttgaaatagctattcttatagtttcagctctttcactgatcttgtcaaagagaatgaacatgagaggaatgaataaaaagaaagctgagaaatatttgaactccactgtaggtcctgttgaagtgagctagtcttagttctaccttatctgtactatagttaccaatatacttgtttgcatcctccataaaattataaattacatgaggacagaaaatgtttaccttattcattaatatatctccatgagcatatggcacttagtaaatacttcacaaatgaatatgtagcagatacaatccctgtcatgttaaacattcctttatggttactgtttaataggtattatgactgagaggtaaaaaagtgttcttggctgatatttaagctgtcttcctagacctataaagaatattagactgcccttttcggtcaaagacagaatctgctcaataaattaaaaagacatcagggagaaaattcaattgtcttagaaaaaaatgtgccaattaggtttttttggttattactggattagaggctgagtctgaccttgaagttactttagtaagagttactttatctgaagcttttgggaaaggaaatattctacacaaatgaagcttccagatattaaaaacttcactctaccattaagaatcatacttttatatttcttattatttgcatagaaatatttaataaattcatttcacatttatttgctgaatgaacatgatctagccttttcttaagtacacagaagtcatcactgtgctatccatcattatgccacataaaatgttgtcaaagggcgtggggtgcggtggctcatgcccgtaatcccagcactttgggaggctgaggcaggcgatcacttgaggtcaagagttcgagaccatcctggtcaacatggcgaaaccccgtctctgctaaaaatacaaaaattagccaggcgtggtggcaggcgcctgtaatcccagctacttgggaggctgagacaggagaattgcttgaacctgggaggcagaggttgcagtgagctgagattgtgccactgcactccagcctgggtgacagaggaaggctctgtctcaaaaaacaaaacaaaaacaaacacaaaaaaaggtacaagtctctactttgagtagacctacatgtttatacatttaaattcttgttttttttttttttgttgttgttgttgctgtttcagttgaccctatttgctattatcaaagtgcttgtccaccttttaacttgttactcaaatctggagtaggcagggaaacatgtttattaaaattgtctcacatgaatttatcactcaacattcttttgtactatctacatctaccaccatgtacaaatgttattttcactaaagaagggggagaggcaaagttttgtgtgtgtgtatacgtctgtgcgtgtgtgtgcgtgtatgtgtgtaaagagtaaaaagatatggagtggggacttagaggctactttctacttaaagtgcttagggttttagagcacaggtttagttatttgctgagactcaactatccttttatataattatttatttattattattttgcttttttcttgattctcagctatgcttcccataacttgagattgccaaataagtagctgttctaactagttacgttccttagacattaaacagacttaaaaaagcaaaaataaaaaaaatcagagtaccaatcttactttttataagttgaggcaaaaaatgagtgaatgtgagtgaaaggattaatacaggcaaaatacaacaatgactgcatttttataatatacttaatatttaaaaaattttatctataaacaaatcaataaaggcttatttcatacaagtcttttcactggatataaaatggtgctgctattttcaatctgacattacttgttttgcagatccctacctgccttcataagcacagatgtcaaagtgtaactcacaactaagcagtatttaaaaataatttcttttcctcttttttttttaatcttggagacaagatctcattctgtcaccccaagctggagcgcagtggtgtgatctcagctcactgcagcctcgacctcccccaggttcatgcaatcctcctgcctcaggtctcccctgacccctaaccctcaacccctccgccgccgcccagtagctgggactacgggtgtgaaccaccacccttggctaatttatgtggttttttttgtagagatggggttttgccatgttgcccaagctggtctcttctagactcaagcaatccacctgtcttggtctaccaaagtgctggaattacaggaatgagccaccgcaccttgccttaaaatattttcatattcctgaatagaaattctggtacattaaaaaacatctgatttctcttgaatattatttcatctagaattcttcacaagtattttttctaatatagtaaattttgagtttttaaaaaagcagcaaatactgaataaaatctgaagtgctcagcagagctaaaatgaactaagtattttccaataacattcaacatgagcaaaggaatacaaatttgaaacaagaaaagggcacaaatgtcatcactgatttataagtaattaattttaaaatatgcatctataatgatcttttaaaaggaaaccttgagaatgctgaggttctaatactaagctagtcttatggttacagaaaacttaaatagcataactattaagatttaaacaccaattttctgaaataaggcaaaaacgtattttcattacttgtattttctccaacgtaaagtctatggggaaaaaaagctgtgaaccactcctaaacccagagatcatctgtttaaaaataagcagtaaaaaagtttctgctaaaacctatgtatacatgtagaattcaggcctttctgtgctcttctatataaggttgcaaccagagcaaattaatggtgttccacagcaaaggcacaaaagctagataagaatcttgtttcactgctagaaatcagaactgtagaaatcactataggcttttaaaacggcagaatcttcaaagaatgaaacctctaaaatagctagattatatcttattttttctcaaatgtgaaaaacagctcaggcttaaccccaaacaaaactatctgaagctaaaatgatcaagtttattacagtccccccaaatattaaagagagctcttaaaaatataacttgaataagggccatgaactggttcaacatgcttaacagtggttttatgaattacaatgaatgctgctactctctaaaaatgaatgtatcaaagaggaaataacctccttggcatgcttgcagctatacaacgtatttgtttcactgctttcaaccgcctgtgctggaggctcagaataagtcaatgggaggaggatttcagtcacagcagcaagcaagtctagtgaacagataagatgacatgctcagcaaaataacaacgaaaccagaggtaagcatttaataaacacatatggaattaatctaaaggtttttttttttaatcttcaagaattctgctatcataatctttcatttctattcagcggtttaaaaatcaaaatgaaaaatttactaatgctaaaggagagtttttaaaaacgtgatttgtacatttgatgaacaaataaatggtctaatcttccttttggtttccctttcttctcaaggcaactgggaaggttaaaaaaataaacactacttaaaacaaaaaaagaactggtttgaatttggcaaatttagtgattaaatttagaacacaattgttgcaaagacataccatgagagatgaaattactaaacacaattatttggatcctagtaatacctttttttttccttctctcaaactaaaggaaatctaaaatgacatttatatcagtactcacaaacctgataagacaaagctaattacatataaggatccctagctggtaaaacatttatttagacccttgttgggctttgagtgtttctaggtgggtggccagcgcatactaaaagttctattctgaactattgtgtttcgacttttctattcttctgtaagtaaaggtaaaaagacattcaagggtcaggaaacacctaactttttattataaccattgaaaaaattaatgtgtcttctgtttcattaactgagcaacatcagaaatacagtatatttggagaattggctgcattgtcacaaatgcacaacagacttactaagaagggaagggctatgaagttcaagtgtttttaccactttcagaaatgaataaaataatgcagtctatgtattttgtatctagggggaactctctggcatgcaagttcaaacacgactctacaactacggcagaaaaagagagagagagaaactaaaaatatatatatatcct

SEQ ID NO: 8466 - DNA, 6000 bp, Homo sapiens
tttccctgtgtccagcagttgctgttgataggcccagcactgtgtacttacctcctgattcagtctttgttcctaagaacaccccaaccctagaaagacgcattccgtatgcatgcaccactgtcatttcatcaccactttccggttctttgatatatttcctccaatttaatgttattccctttgtaatgctgaccttcctcgcactctgaatatttactgctttagtatctattggctgtggcagcagcctgccttgggaacaggcaataatggagaaggtttggaaaagagttgttgaactgactaaaagtggcctgctttttaaaaagtggcacgatgtgccagtgattctaaacaatgttggtgataaaatattactcctgccaggcggactgcctccttaacacctactccctggtaggctactgcctattggacagggggaactaatggtattcatagaacacttctaaactcaaccagaacagaagcatttagtggtaaagaagcattatgtctgcaactgactctcatagtcccccaaaaatataggaatcctttgtattattctttcaactttcctgtaggtatgaaataatgctaatataaaaggttaaaaaggtcagggctgggcgcggtggctcacacctgtaatcccagcactttgggaggccaaggtggatgcatcgcctgaggtcaggagttcaaaaccagcctgaccaacatagtgaaaccatgtctctactaattagcctagtgtggtgtcacgcacctgtaatagcagctacttgggaggttgaggcaggagaattgcttgaaccggggaggtggaggttgcagtgagctgagatcacacacaccattgcactccagcctgggcaacaagagtgaaattctgtctcagaaaaaaaaaaaaaagttaaaagggaaaagaaaaaaaactactaaatcaaacacagcaaactgctgcagactaacaagttcctgagtcctgatgctggtcacctgttgcagggggagaaacttttgttctgaaacctccctctgatcatgactatgagaatttataaatgggaagaccccaagaggagcttctgtaacacacccaagtgtggtgtgttagctgggaaggctggtggacttgagggtggcctttattgcttggaggagtaggtgccaggagcaccctgtgggcacacaataagatctggccccagtccagggtggcatgagggacacacaggccctagacatgagagacacaggctttttctggccttctcactgtgtgacttgaacatgtcctccctttggccacaagcggaggttggggcctggtacacaggctgagcccctgtgaggaggtgaccggctccctgtgcccagcaccctgcctgaagcctgtgagctggctgtctctgggagagctcaggaacaggcctcacagccctcagggggcaaggggctagacagtccccagtggtcccctctaggagcaggagaggcaggggcgatgctccccggaggtctcctccgctgctggtccccaccgggctgcagggccccgactgcctgcactgtggctgggctccctgcaagcctgtgtgctcctttccactgggactcagctctccttcccggggtgctggggaccttgcccttccaaaccctactaaggacagctcccaccccagccctgcctcccagcagctttctggtatcttccagagaattccaggctcttcaaccctgcactgagtgcttaaacccacattatcactcttaatcctcatggcatccctgaaggacaggggctatgtttgtgttttacaggcaaagaagctgaggcctgaagcgcaaagtggcttatctgaggccacgctggcagaatgcggagtctcactctggcctcacagcctccaaagcctgtactcaccatgttccctgcctggcttgaccatctctcccaccagtttctgtgagcagaccagggctggtggctcagggagcatgggtgcatgatcacacaaaagccacgtggctccctgaggtgcaatcccagcccccaagttcggaaccccatcacctgaggggcccagaccatcctcctctagctcctggccatggccaggctgggaccccacagagcagagctgggtagggagctctctgaccttgggaggtgcccagatgggtacagcgactctcccttgcttcggatatttactgttcttgttctccatgtttgcccaatgaagcctagtgatgggggtcctgggtgatccccattgcccaggctgcagaacagtgcctccctcctgtccagagctacagtgtccccaagctcatctcatcctccctgcctcccctctgtaggcagtaagtggggtggggttggggcgtttctgggggaaccatgggcttgccaggagctgcgggtcagcccaaggctgagaaggttctggtttaagcctggcctgagtttaagcagcccctcttggctctcagggactcagcaggatgaggaggggatacggagctactcacatgcctctggccccatgagtcctgcacacgcctgggacttgggtggtatctcagcagctcctggaggtcccagtggccctccctgaatgcatttgctgttgtgcagagttgggtccttggccccctcatctgggcagacgcccaccagccaagcttagatggatgtgtacacccagaaaactggggggtgccacctcaggacggagcaggagcagcaggatgtcatacgtttctgatgggacactaccgtggtggccttgagctcaggcccggaggccagggcccctagggccctctgcacagtgcggaagtgagggccacagccattgtggccactgagcctctcctttttgggggctgctctttagcctttgatggctgctaatgttatgtgaatgatgcaacccgctgtaggaattcctgactggcaagagtcattctgcctctgcaaggctaggtgggtccttccccatcccctccagggctgtgtgaaccaaagggtccacggggactttcggactgctcagagtctgtgcagagtggtatgtgtgtgcgcgtgtgtgtggtgtggtatgtgcagagtgatgtgtgcatgcatgtgtgtgtatgtgtgtgtacatgcatgtgcgtgtgtgtgtgtgttccagtgaagggctggggtccaaatgctcctcacttgctaagagcagcctgtgatgccacagtggtctctgatgctgagtgatgtcatccctccttgcccgtctgttgtgctggcagccctgttactgaggatttctcctggactagctcatcaggggctgagtagttaattcccagggcaccacagaatcctttctcccaaggccctgaggaccacgtgcccctgcacttcccacaaccgtcccctgcctgggactctgtttacatgtggagttcctgggaaggccggcctggtgcaggctccttgagggcctaactcccatccccaagcccagacagtgacttatggaattggggggcagtggggaggaggagggtgcaggaaagcggggggaaggaggagcctccagttgccactaaatggtgacaatcccaccccacatttcttgagtgttggccatgtgccagcccctgtgctgaatcttgacgctcagtgtctcatgtcaccttcacaatagtggcgatggtggttagcccattctacaggaaggggaactgaggcacacagagcttctgagctcacggtggcctctcggggtcctgtggctttgtaacctctcctggtgctcctcagtgtgattctggggcatggggctctccagagggcgtttgtcaaacatgaggatttctgggccttgcccaggctaaggagacaaaactctgggcaaaggccccggaaccagcattttactctgtgtgatccgtcatttctagggtccctagaagtttctgatgaaacagcttccagctaaggagctgattgcaggactagggagtgggagcaggtgaggcactgggatttgcatgtgggcagtgtgggggagcaggaggctgtggctgggcattcttaacccttccctaaattccctccatccttgtctatacccccacccttggtacagtgatgggggcagaagaacatttgaacggataagggggacagtatttggggctgaggacaatggtgaggagagggtggcccagggaggcaggtgaggagtggggaggtccacccccaggctagactttggtgtgctctttttcagaaggcagtgggggggccccaaggaagggtttcgagggggtgatggtcgttggtggctgtgggaggatggactggagggagaatagggggctcttgcccagtcctgcagggccgagcgcctggactcagggactggaggccccgaagggagcagcgggtgagaggggctgcggaggctgcaatcatgggccttgggacagaagaagaggcctggagcctgggaggatgaaccgcaccggggcatgtcgacttcaaggggctggtgggccgtccctgtccttggaggtgggtctgaatggggggcaggaggagctggaggccgcagggacaccgtgacggcgttaagctaaactcagcacgctggagggcgggaatcacatgtgagccccaggtctctcgggctcctcctctgcggctctctgaggctcagttttctcatctgtaaaacgggttgttgtgagggttccgtcagataacgctgcttgtggaggtgtcgcctccacgctgcttgtggaggtgtcgcctccaacggccgcgtcctccgccagtgcgggagggggcgccgcccgggctgcggggactgcactgccccctggcggcgttcccggccggacaggcggggcgtcggggcgcgggctggggccgctgtcagtcagtccactggctcccgcgccgcgtctgtgtccgtcgctcggagggtggaagccggggtctcgcgggccgcgggccgcatggtaggtgcgcaggcgccggcgtgggctagggcgcggcagctgggccggggctcggtgcgggcagggtcgtcctagggcgggaagggtccgagggctccgtcggggtgccccccgtccccgccaccggggagcctcgcaacttctcgggtcatttgtgtcttccggccaggggcgccggggggctgcgggcttgcgacccttcctcgaggaccagggcgcctcccttgaacccgggctggcgcctgcgcgttcccaactggttcccgaggctcccgcgctgctgtgcagcgggggtgagggcgggcgggaggaagggtgtggggctcaatagaggagagggaaccccagaactggcagtgccaagggcgtcaaatatggagactgaacagttcaggtgacagaaaacagaaaaaagaatcaacttgtggatgaagcatttgtagtgtgtagccttgacactccctcacttgactctcatagtgactgggtccccagagcaagggggtgatccccgtgcccttccgtatgccaggcaggccctgtgttaatgtctttaatggattaaactccctggatcctcctaatagggaaacagcctcagagaggttacctcgctaaaggtcacacagcctggaactggggaggctggattcgaatccaggcagttgcttcctgagcgcttgctcttgaagaccctgcaataccaggcattgtgcccattttacagatgcccaaacgagtgcctcatctagcatcattgcttgaaagaggagacacccaagatctgtcatttactcaaaggttccaatagatcatgaaatttaaaatcaaaaccccacgtgtttttttttttttaaatgtagatttttactttttcgttgtttgctttttgtttttttgagacaaggtctttctctgttgcccaggctggagtccggtggcacaatctccgctcactgcaacctctgt

SEQ ID NO: 8467 - DNA, 6000 bp, Homo sapiens
agcagcacccaggtaggcaaggagggagagacccccttctccactaagaaagggaggaggaggggccagagctggagacaggaaagggataagaatgagaggaggaggtgagaagtctttccaaggctgggtttggagtgcagtgagtttccagcgccagcgggtgtgggtgggacctgggaccagagccaaacacctgggcacagcatccaggggatggaggaagggcaggaggcagggaaggtgggacagggcgggcagagagggagagtgcgaggcaaaactctgggccaaggccttaggatttggagaccagatggggtgagtgagacaacctaagtatccctcagtcacagagggtgaccccgaggacctctggcttggaaacactagcacaggccacatggggaggagaggcactcaaccatccatcctattgtgtcctatttattaaaaataaatcagtaagggctgggcacagtggcccacacttgtaatcccagcactttgagaggccgaggtaggcggatcacccagagttcaagacaagcctgggcaacatagcgagactccagtctctacacaataaaaaaaaattggccaggcatggtaggaacacctgtagtcccagctactttggaggccaaggtgggaggatcacttgagcgtaggagatccaggctgcagggaggtgtgattgcaccactgcactctctctgggaaacacaacgagacgtcatctctaaaacaacaacaaaaaagacgataaaataaagtgatacccaggtgggcctagatgctccccctgcagtggtcgcagagcctacctggccttaccttgggagggctgaggctgcgtgaacgaggactttcatgtttctcctctacaaacttgtgtggcttcaatattttaaaacaagagaatatttacatgtttcttgtacaaaaacaacattgctccagaggttgggaggtgaccccaagaggagtctatgcatggcgaggacaaagcctaccacggggttcagagtggagaggaggggtgcaggagggtggaaaagtggcccccactttgtcatctggtgggttccagagcaaaggaaaggtgttcaggatctgagagcctgggcaggtttgcctgggtgctgtgcctggtgtatggcttggcgctgagagatgcttcaggcagggcatctccatgaactgatcacggacgtcacctgagtttatcatatgcgtcccctgtcctgggctccagaaggggccgcgggctacctggaggggaagaacaggggctgccataggagagactttgcatccggtggagtaggggcctgtggaggcagcacctgaccagatgggagaggccacttccaggtggccctgaaggatggttggcaattggccaccgtaagaggggacgggggaagggtgttccaggcagctgaaacagcaagtgctaaggcctgagggatgacagagccagccatgttctgggaaatggaaatagatcagagtaaccagaggaaagagggaggtatgggggtggggaggcagagagggacaaagacagagaagagccaggaggaggccctgccttgtgggccacactaagatgcctgagctcccccgtgaggggtgaggaggggttctgccgtggaggccggagtggaggccaggtgtccagcagcggaggccagtgccagcagtcgaggccggagtgggcctagtgtggggtcaggacctagcaaaggagctcagccagaggtctggacagggtggaggaagccaggccaggagggccggggggtgtggggaggtgataggccaggccagggagcccaagggctgcccttgaggcacaggaatctgaaagccagtggaggacagatccagctgtccccccgaccgccctgccagaggtaggccccactggaggctcaggcaggaccaacgggcacccgtcaccccacctggtcacagcaatggggaggagtggaggcctggggcagagtggtggggtactgggcctttggggtctctcagttcggctgtgggccccgagctttccaagatgaacctgagtcagcaccgtggcggctgtggcggccacggcggctccggccttcctccaccccctccctgccaccccggccacttgggagagtcatttcatttctcaaattaaaaatccattttgtgctgtgaataatagatgggatgagccccgagaggccgggtggaggacaggaagctggctggaggcgtgtttttagggctcagaagataccacagatctgcaggggaggagtagggcctggttggacagggtggaggctggcggggctcgtcctggagctgacaccctgctgcagcacaccgaggcagggcaaggggttcatccccacccacgtgcaggccgcaggagagaggcgggtccgaccacaaatgggctccagtcaggaccaggcccggcgttaggtgggcagccccacctcagagcagggcacttagcagcccacatggtgaacgtgcaacagatgcaagctactggtgacagcacactgtcctcagggagggctctatgtccagaacccaaaccaagtgatgccctgttcggcagagttgctgggatctacccttggtcaaggaggagacagagagtcaggttctgaacccctcatctctgcccccttgcatcccctcgggccttttctctccaaggcagctctggcagcacccaactgctccctgaagctgggcacccagctgcctcactcagggcttggctgggtttagctgggcaccactgtggcctgtcattctctttctcatgagtcatggggtcatcttggtaattaggggtaggaagagatcccccaaaagagtgagcaagctacaggccagaccactggtgcctactcccctacagtgccagcttcccttacagagaaggtgccggagagtcaaggaggtgggcctctgacttctctttattggcagtctgtgtggggtggccaggactgaggggtcagagggcccaattccaagtcaactcctgtaggccctggttgctgctctcagcccggggctgggggatgcgatgtgaaaagaaaaggtgaggtggagccaggcaggtcgcccggcagggagtcgggaggcccatgagcagaccaatagcagctgagtctgggagagggtggctggaaggggggtcccagagctgacccgggagggaggaggaagggatgagggagggcaaaaggagggaggagagactgagggcctgggggctgccccccaccccacccccgggactggagcagaagagtccctagggaagcgtgtttgcctctgtgcctttctgtcggaagaggctctctgagacaatatccatttttacatttcttggaaatttcatggcattcatttcggggaaaataaaagctgtccttgctggagaaatgataccaatcagggcctgaaaaggctggaaaattatcctcctggagacgggaacattgagggaaaaatgcagattaaaagcacaaagagccactttgccacctccctgccctcccctccccccttcatggaatcgccacattataagtaattccatttttcctctttagaattaataggacccaagaaggatgcatggggcagaggacaaccctggggtggccagagatggaggcagggtatccggagtgggggcttagagatggagagatgaagaggcagggagaggcaagacaggggcagaggccggcactcagggccagggctcaggagctgggcagatgcacagaccctgaggaggagaacaggatgatgggtaggttatcagagtccctaccttgttgtgatttttattagatggtgctccatggctctcacacattgtttaagccaatcctacgggctggagccggcagacctgggagggctggtgctttgtggggtctcctgctagagacaccagaggcagggtagggcagagaaagcagagactccagaaacagtatcagtcttccaaggagccccaagttctctgtgtcccattagggccaggctgtctggccaaggcaggcaggcaggtagaagagggctttgcctccaggcagtggggaggccccacatttaaaaagccagtttacctggaagaaggcaggcggtgagtaaattcagagtccctgcacccagcctgccctcccatcagtccacataccagggtcttgaggctcagggcctgtctgaggcctagggctgctggccagagggggcaggctccagccttccctggctccagcagggagacttcgctcattcttctcttggccttttcttcctacctgggccagggactccctgagccgtggtgccagggccacccaaggctggggaggatggggaagggggcggcaagccctcttcttgcaggagtccccgctgagctcccttcaccaggggctaggtgaagggagcgaggccaaccagaagccctagtggagagcccatccagggcaggggttccaaggaggacaaaaaagccggttagtgaaggtgcgctctgcgccagggactgtgccggcagacacaggcactactgacaccgcccccagcccttcggaggagtcctcggctcctcatctccagctccagcccctttccagccggctggtgggcggctgggagtggggacactggatcggaggggacccttcacgggagtactcgctgccctcactcgtctcggaacgcggctggacccggagtccccgaccgcagcccgcgcacgacccccgggagcctgtctccgcggccgccgacccacgtccgcgctgccgccccactgccaggtggcccgagagatgcaggaggaaggaggggcgcgcggggcgggcggaggagggtggagccgccggcgcgccccctccctcgggccggcaggcgggcggcgcggcgggctcggcgcggcggcagaggaggcggcgggcgctgggagacaccggacgcccgctcggctgcgctgcggctcaggcccccgctcgggcccgacccgctcggtcaccgccggctcgggcgcgcacctgccgggtaagtggcgcccgagtccctgccgctgaggccaccaccgcggccacttccgtcgccgccgccgccactgcgcggagcctcccggctttgtctgcgtcctctcggctgcggctccggctgcggctgcggctgcggctcccgggctcggctctcgggctccgcggactgcgccgcacggcgccggggctcgggggtcgccagccagctcgctccccgccgggggtgaaacttcgcccaagtttgggttctggggagaacctgttgaagccaggagtggctcggggcggggacagagatggtgggagtggggggagggaacccgtctcgggttctccatcagggccgtccagtgggtgggttgtgtgtccgccaccctggggcgttggcgcgcgcccctagggaaggggcgagtgggccgtcgggccaccgagcagaaggagccagggagcggggttggcgtggtcgatcccgcggacttccgcgaggacaaagtttggttctttggccgctttgcggagcgtctgtctgggtccagcgcggagagctgaaagtgtcgcatagacgcgcccctgaccgcacctcctcactccagcctccgcttcttcccccactccacccggccttggctggggcaggtcgtggaagagaaaggcgaaggggaagagggacgacctttcaatgaaggcccactacgtgccaggccccttgcctggcgcctcttgcttccaataagagccctcccaaccctgcggccctcaagtgtgtgcagggaggggacaggggggaagactccactgtgcacccgggggtggtggccccgccgaaccctcatagtccctggtttccgcagtgaatgaggcccgcggctggggcctctgcacccaggcctgtgtccct

SEQ ID NO: 8468 - DNA, 6000 bp, Homo sapiens
tgagcttagctgcctaggcagggtggtaattagagtacggagttttacaggagaatctactgcataattcatgaggaaactgaaacgcaaaaaagatgtgtagttaaagccatgtgctcctgtgagtgggtgggcacgtgcagtcactctgcctgcaatagcagaggcggaagagccgcagagacccgtgggctcaagaaaagtacattcattaattaattaatcttataacataaaaacttttgatgttcaatcggcctactcagacattcctcaccaaatagaagtaggaaggacacggggaaatgcaacttttcaatgaagcatccatcagcaatttaatgccttgttttgtccacttttccttcttgtgaagagtgtaatgtcgaagttagagccacatctccacctttagaaagacgtggctgaaatgtctgaagggcaggagaggtgacccttggtgagaagatggctctttgctgatataagtcacccccgatggcatgggtccctggtcaggaggctgttttacatccttagcttgtagaaacgcaaagcacaggggaatggtgtccccagagtccatgagaggagcttcgcacagggacagactgcggtccccagagtccatgagaggagcctcacatggggacagactgccgtccccagagtccatgagaggagcctcgcacggggacgtgactgctgtccccagattccagactcctacctcctactcagaaaaactggagccattaaaatggttactgctgaatgtggagctttttgtggtgtgagagagccccatgtttatttcctgaatttcaattaacaaaaaccctcctgtatttgtctttagttttatctgactcatataaactgggaaattacctacctgagtttgaacaaagctgaataatttttcaaattttacaggggaatttaattaagtttgaatgacagcattttattttccaaatttgttttaaaatgaattgagctgtaataagagttggaagataacacagagctcccaaacctccttcacccacctgctcagtgttaactctatgcacggccacagcacagcaaccaggaccagggagtggacgtggatccaatgctggtgattacatctcagagctcaccctggtatccccagcttttccatctgcatcctttcctcttccaggatccagtcctggcactgtgcagcccacggccgtcgggggtcatcaggtccctgagtctcctctcatccatgttcatctcttaaaaaataaacttacaaatttaaaaatacaaaaaacagtgcgcgcacacacacacacacatgcacgtgcacatacacacacaagccaggcaccaaaagacaaacacctcatgatctccctcctatatggaatctaaaagtgtcgagctcatggaagcagagagtggatggtggacacctagggttacggggcaggtgcggtggggggcaggtgtggtgggggctggtgccatgggggggacaggtgccgtgaggggcagaaagatgctggtcaaaagtgagggtttcagttgcaggataaaaatgttctgggatctaatgtatagcttgatgactattgtttatttgaaaatcgctaggagaatagatattaaatgttcctatcacacacacaaaaggatgaatacgtgaggtgctgtatatgttaattagcttgatttaatcaccccacagtgtttacatgtatgaaaacatcatgtgaacataaatatgtataatttgtatttgttaatgatagcttgatgaagctgggggcgaggaaaacaaaaactaaaaagtgaatggcaagtaaaaaaggcaacatcaggctgtagtttgaagaacacaaggcagtcaggccctggccacatgtcaggtgagtcaagtgtgagcccaccctggatcccttttctgttacagtcacaggcaagggcctattacaggtggtcctgggcctcggttagggagagcctcttgtctgtggacagaacacacgatgtctgcagggagaaaggtggcctttctatggagacatcaagcaaaatgtgtgatttgctgtttctcatgcattgatcaaggtattcagtaatcagatttccccaggatatcaaatagttcattggcacttgccaaaaaatggaagcgtgcttgtcttctcggtgggcccgggactggaccgcagggctggtgccactccttcactgagacctgcttgtagcagggccctgcattcccccatcctgccatgtgtgagttggcttcttactgtatcatgcgttccttgcagatttctgtcttctttggagctccttgatttttctcataatgggagaagacgtgtatttttttctttccttctcatggctaaaactgtcctctttctcactgagtctcccctgcaatctctctgctctccattgctgggtggccacgtcttcccaatgctcctttctgacagagactgggggcttcagccagatctttagttgcctctctttcattctcccattatgtgatagcctcgggttttccacgtccccctgcagaaatcttccttcccaagtcccccgtcttctttctcaaaaatgtgtgtgctatccagtgggcctcctgcaaacccgccattctcagacttttctccgctcccctctcaacatttccagtgtaacagcttccattgtacttgatgcattatttatattgtttaattagtattaaaataagcacatcatgtaatccagctaaaatatgtattttcaaatgatagatacatttctcatatttgtgcggggtcaaatggtaacagcaacttagaggagaggctacaaaacgacctggagagttgatgtgccggctcggcctcccccagctgtgcatgcaaaccccctcttcccaggtctccatcggcactcggcattttcaagcgtccttctgtgatgaaaagagcatccagtcagtatttactttacattttaatgctttcttcttcaaactcttccttgagtatttgccccacgctgtctcattttaccacccacctttctggctgtgtgaatttcctgcgaatgccttaacaaagggccacgtgcttagtggctttactccatcagctccggaggtcatagatccaaatgagacttttggcagcaaggtccagggacaggcctggttgtgcctggagaccccagaggccctgctcctggcctcctccagtttctggaggctcatggccacggccctccagtctcagtttccatcatcacttccccctttctcccctcagactttcccacctttgtcttgtaaggagctgtgtgctaacactaaggccagtggataatccaggctaatctcccctcctcaaaatcttaactgaatcccatctgcaaagccccttttgccatgcaggttgcagtcacaggctgggggactgtgtcccctagacgctggtgctctgagctactcttgaggtcttttccatccacattctcccaagaagaatcccattcactcacagtccactactgtatcccccctcaggactcccaaatgtgtctttttaagctggacttcacccaacagctgaaagtacatttccaaatgcccaagagctcactgcccgcctgtgccacgggcacctccaacacaattccaagcctgagtctgctgctcctttgcttgtcacagccagtctcctttcttctctggccttcctagggccagtacatgagattttcacttgcttaggcatcaaaccgaggatggctgaatcctcagaggctctgtgcttttcttctgttcccaacagtaactcatcattgagccatggaatcctctttaatgagccaccgagtctggtccttcctctctatccaaaccccaccctcctagtgaccattctcagggtgcgtggggggattatatcactgttggctgatctcctccctgctcttcagagcttgtctaactcatttgttatcttcacccatttgaggggtgagtgatgaggattgaggggagaatgttaaaggcaaatcatcacattcttgggcttcagaacatcttctaacaaagattaatgttctgaagcctttgcatcgtgttttagcatttggtttcaaattacctagaggaagcatcagtcacatttggagaagggaaagaaaaggagaaagatgaagatgattttcacaaactagaaacccataggacttccgggggcatgaagaggctccaagtctcaggagcaggtcattgaagatgtgttattttatcattttcatgatgagatacagcctgaaagcagatcacccatgaaaacatgtcatctcccagtgttcggaatgcagtcatggtgaccttcctacagaacatctctgtctttgtggggactcttttgatgggtgcatgatgaggattgaggggagaatgcatgctggtgaacacacactgaactgtgctcatttttcacctcaacaaattggaaaaaagtgtactttattcacctcttagtgataagaaaactaggggcttggggacaggaagcaaaaggctcagagttgtagagcgagtcatcggtgggcctgggagctgcacccaacccaatcctcggaagattaacagcccctttttcacagggtatttaactgtgaaagtaagagggaggaaaatgcaagtgtcacaagtctggatttagttggtttattctttctccctgtataatttttcccctcttcttcctaactcattcggccagaggctggactgcatgtggaccccgatgacatggcactttgtttctgaccagtcaggacacacaagaggcccggcgcaaacacaacaaagcccgcagacattctgtccccacgaagaacggacgccactcgacttcctagcatcttgacgggctatccaagcgcggagtcagtttataaggtgggtaaccaagtccctggaaggcaattaaggcgcccatttcagaagagttacagccgtgaaaattactcagcagtgcagttggctgagaagaggaaaaaaggtcaggttgtaaagctttttatttttccattttctaagagaaattcatcattggaacttgtaaagtggcccaagagtggctgtaatttgggccattatagcaggtatgggtggcgtctctcagcaaagctgactgactgactgatgagtgctgtttgcaatgacctccgctggaacatgtgagtcctgtagggtcgattcctagatcaccgtctactgagacacattcctgtcagcatggactcactggtgctatcctgcttaacaaaattagtggctcaaaaatagccacagaaagcctaagagaagaaaacaaggatttgaaagtagaaatgatgaattttgaatcttctgttttgtcttaacaactagaattctaaaatcattttatggacataagaatgctttaagaaattcaataggcatttaggggttttatttatcacttttataaagactaaatttctaatagtactcactttttgccacatagatgcattaggggaaacagatttttttcattcccaataattattcccagtactgttacactatttgacattaccaaaaatttaaataggttattactgagatatattggcaactggagctgccaacataaaaactctgtttttgaataatgggggcctgggaggcctgctcagcgctgcagtttctgtaacctcctgacatggacggcgactctggtctcgcagaccccaggcctgtgagggtcgctcactgcggtagaggctgcgtggagtcagtggagggagcccctcagcagggagacaaggacacagcggttcccatggccttgtcagtgcttgattacatactctgtctccttccgttaattttagaatgagagcgctcgctgtgctgtctgtcacgctggttatggcctgcacagaagccttcttccccttcat

SEQ ID NO: 8469 - DNA, 6000 bp, Homo sapiens
tgtaatgccagagacacttggaggtagaagaatgaagttcaagacccggttctaccactaagtgtgctttgatcagctcagttaatctccttgagcctgcttcctcatctgtgaaagaggatcatggtcttcctggtatgtctacacctcgtgtgtatgcacatatcacatcctgcttagtgttttgtgttcagaccttagtgagttggaactgctcagtattctgtttatcagacttgctttgctctagtactagtatgaaaatgctgatttatttttgcatgctccacagtgcctggcaaatattgtggggggaaaaaaaaaacttgttagatgaggaagtgagcagaggtgacttctccttgtctgtgtacactaggacaaatcctgagaattccctggccttaatttctctgaccaaaacagtgacaatgataacaatggctgtcctaaaatcacaaaggctttttgggtgaaaaagaaaatacagatgagaggactttgggccctgaagaaggatggtagatgatttcgagagattattacaatgtgctgcacttaatatgtaaaaccgtaaagaaacctaagaaagcaggagagggagaagtgaggggagctcttattcggttgctctcaccagaaatgctgttctatcttatcctcataacaagcctaaaaagcaggcataatcttgctcctttgttttcagctgggaaacctgaaacatagcaagtgtaagcggcttttctgactgtctgatttcaaagcctaatctgtttctacagcaccgtattgacttgcaagggacaattctacttgcatttttctgtactatagatctgtccccatagaaaaactccccagggctcttctcagcaaaagccagaacaacccacgtgagctgattgagattcaaggatatctgggctgatttggaaagggcatcatcttcggatggctatgaagtaataaagaagttcaaaatatgtcagctgggagtggccagaggacaacagaccaacgaggccagcctcacccttctggttcccaaacctgacgggactgttcaatgttgcacagacttcagctggctcaatgcacgatcagtgccaactgcagaaacatttcagaagtaactaactaaagccaaattcataataagctgcagatgactcaagactcctggcatttcctccccagcctttattcctgggaagagatggtgtttattatgacctgggtactatatttttcataacctggggagtattttaaaagcagtgattaaggcacacaaacttttaagtcttttagcagcagatttcagaaactttaaagttgtatagggaggggacagaaaatgggttgctaaatggtgcttcaggttgaaatatggaagaaaaatactttccttatacagtgtaaatgctaaatcatactcttttaatataccaagggagcaggctccagaactttttgttgttttctccctatttatctgttaaaggctgatctttgtgagagaaaaacacaagttagctcaaaactggtaagtacacatgtggttgcctttgagaaatgcaaatcaaacaacctcttggacaagattcccgcccgccttgccaccttttcaagatgtaagttgtttaacaaggcatctttatttggcttcagaatcttactcaagttctgagctgtggtaaactctgatgacattggattatcctttactgataagatacatttgataacttttttgatctttagaaagcaaacagcagaatgccaagatttatgaataatatataatctcaatcatgcaaagaaatctgcatctatacatgaatatgcattaatggtaataaagaatttaaatgttaacagcagctaattatagaattacaagtaatttttattttcttccttatacttctctgtttgccaaattctttttaaaaaacagaaatttcaagctcattcttgttggagaaaagaaaaggagagaattacctatataagcagataaaaagttatttgaaaaatatcaagctacccctgcagcagtagacatcatccattataaattcagctatgaaacaagaaacttaagatgtgaaagaccagaaagattttagattttgagtaggaagattttgaggaagacaaggaacactgtaggtccttattattttcttaatcagatgatgtccagaagttatttgtgtgtttttgtttttgttttgttttgttttttgtttttggagatggagtcttgttctgtcacccaggctggagtacagtggcatggtctcgactcactgtaacctctgcctctcaggttcaagtgattctcgcgcctcagcctccctagcagctgagaccgcaggtgcgtaccaccatgtccagctagtttttttttttttttttgggacggagtctcgctctatcgcccaggctggagtgcagtggcgcaatcttggctcactgcaacctccgcctcccgggttcacgccattctcctgcctcagcctcccgagtagctgggactataggcgcccgccaccaagcccagctaatttttttgtatttttagtagagatggggtttcaccgtgttagccaggatggtcttgatctcctgacctcgtgatccgcctgcctcggcctcccaaagtgctgggattacaggcgtgagccaccgtgcccagccagtttttgtatttttagtaaagatggggtttcaccatgttggccaggctggtctcaaagtcctgatctcaagtgagccacccgcctgggcctcccaaagtactgggattacaggcatgagccaccgtgcctggcctatccaggagttatttgtgtctgactctcttaattcacagaacaaagttttgttttgttttgtttgttgttgttgttgttgttttggtttggtttggtttggtttggattgggttttttgttttcttttttgagatggagtttcactcttgttgcccaggctggagtgcaatggtgtgatatcggctcactgcaacctctgcctctgggttcaagcgattctcctgccacagcctcccgagtagctgggattaaggcatgcgccaccacacccagataattttttatttttaatagagacggggtttctccatgttggtcaggctggtctcgaactcctgatctcaggtgacctgcccacctggcctctcaaagtgctgggattacaggtgtaagccaccacacctggcacaaaacaaagtatttacaggtaaccaggtgtatagaaagagtggtgccacgagccaggtcacagatacttctaaatgtgttgctcagtctctgagaagccaggtccatggctttgaaccttgcagatgggaaaatgtggactaaaatagaaagcatgtgttcttcctcaccctgattatctagtcctgcaggcttgttgggagcagtagaaaggacataagactcagccacaggcccgagttccaactgtagctctgacataaccagctgtgtgacactgggcaattcacgtaacttctgtgggcatctccacccttgtttgcagatgagatctgcccccagctctaagatgttttccctggctggataaaatgtcgtgcctggataacgtccaagattggagaccaccccgctttaatgtctaactgggccactccttccctggaatagccacttaatgtcctcaaacataccggagtttccccatcccttggtttcaggtatcctccctcaggaagatgttgcaaggactgactaatgcacattagtgtcccaataacgatgcctgctgcaggtgctgggacttccaagtctaacctaggctggcagtacgaccccactgtgatcttaaagccacctttctgtcccgtctctggggcttcccatcccaccctatgtgattacagcttaagtctcagatgatgtcaaatccttctgccaaagaccctgatgcattcacaagaatgggttgatagataaggctagtttacacaggagggggagtccacgtttaaggaagcaagaacaccgtctccaatgccccctcgaaggacactcttgagatcttcatctttcccagaaaccactgaaaacatcgcccacatggaaggatgctttaaagccttctccttcggtccagagaaaatgaattctccgagttttcctttggttttgtcttgtttttaaccttcacacgttaatttccagggtttccccctcctggttccagacagcaccgatcatgaactcatctctgatcgtcgtacggtgagttgtaaccgcccccccaccccccatccacagggcaattcggaaggtggagagggtgaggtgggagtttcctgggcaaccgggcgcacacccgcgcccacacggacaggaaaagcttcgctgtctacgcaggtgcgtcccgagcacctgcgcacctgttgcgcggctccccacaggtgggccctgtctcttgcactggcctggagacacctgggagtaggtgattcccctgagatccgcgcatgtctctgtgaggcgagagtgggtgggcaagcggggctgcggcggccgcagcgggagggcggggtggtcccgagctcagagccttttcccgactcccacccggctcagccgtccacgcgtcccggacgcggcagcgcagtcgtgcggcaggagaccccgtgggacgcgccgcagaagcccccagggccccggccctcgcgcgtaggggactggagaccctgcgcgtctcctccgcgccttcctgcccggcgcctgcacctgctccccggctctcgggcccctggctggagcgaggcgggaggcggacggcccgtatgcaaatatcctgcggggccggggccgcctccagagcccgggataaaaggcggggcggggcgcggggcagcgaagccgctgcctcccgggagccggcagagcgctccggccccgcacccgccgcccgtcgcccgcagccccctaccgcgcggcccgcgccccgccggctcccggtaaggacgcaccgcggagcggggacccgaggcaggggcggggtggggacacaggcacggggtccggctgcgcaccagcctgcgctttcccattggaaacgtgggcagcgtgcacctccgcgcgcttccccgcggccgggctggtagcatctccgcaggtgctgcggcgggccagttcgtccccaggccatgggcagtcaaggcggaaaggagctgcgttgggtctgcgcggggttaggagagaacaaaatgccctcggattggagcgggaccgggagtccgaaaggaagaggttccaccaggggtctctggctcctcagagcttatcctgctttcccccagccgtccggagacgccgcggggaggcaagcggaaagggggaacctggccgagggggaaaggtgcgggtgtggacacctgtgaaggagcagcacgaatcgaatcggccgtagaggctgcagacgcggccgcgaaaccaccggccacgccgggcaagggacccagcactgctgagcgggcacctcgcctagtggaaaaaagactttagtagttcccctcaccccctactacttttttttttcttatttaaaaaaatcctctgaagtctatttttaaagctaataccaatcacaaggttggccagtttgacctgcggtttgacctggtagcctgttgtgaaaatcccttcctcatcccacgccttcctccaccccatcctgcatcccagaagatgcagtgtggaaggaagacaaatattcccccagaaggtgtccgcctccagcttactgtcctcccgttttatgatgcctgataggggttgttcactgaggtggagagaaagaaaggaacctctccctcctcctctgctcctgaaaaccagccagaaccactgcagggaccaaggagctttggagtttcgggaacacctgagggctgcccaggtggagataagagctttgcttttg

SEQ ID NO: 8470 - DNA, 6000 bp, Homo sapiens
ctgctttgaggtctccacacaaatcctctagctctgcagatgtagcaccttcgtccatctcatctctgctctgttctcagcgcccagaacagagcctggaatgcagtaagaaccacccctgccggttcaaaagacgggtgcatgcaccttctctgtgagctttcccctaggccccacgctgattcagagcctcccttttccagggtagcccttgcacttggctcatacatctcctagcagctggtccccacctgctctccacctatcccagcacctggtcaccacctgtcccagcacctggtccccgcttgtctcagcactgggcccccacctctcctagcacttggcccccacctgtcccagcatctggttcctatctgtcccagcacttgctccccacctgttccagcaccaagtccccacctgttctagcactgagtccccactgtattctgtagccccatcaccgtgtactgtggcagtctccttattccacagatgaaaaattggaggcttaaagaagttacagcttgccggcccggcgtggtggttcacacctgtaatcccagcatttctggaggtcgaggtggtggctcacgcctgtaatcccagcacttttggaggccgaggtgggtggatcacgaggtcaggagatgagactatcctggccaatatggtgcaacctcatctctactaaaaatacaaaaattagccaggcatggtggcgcatgcctgtaatcccagctactcaggaggcggaggcaggtgaattgcttgaacccaggaggcggggattgcagtgagccgaggtcacaccactgcgctccagcctggacgacagaaagagactccaactcaaaaaaaaaaaaaaaagttacagcttgcctaaggccacatgtgttagtatcttaagactgtcgtaacagaataccacaaactggggtggttttaaaacaacagaaatttatgctctcacagttctggggaccagagtccaaaatccaggtgtcgtcagggttggttccctcttggggactcagagggctccatgcgtctctcccatcttctggtggctgccggcagtccctgctgtaccatggcttgtggcagcatcactccaacctctgcctgtgttgccacgtggtgttccccctgtgtatctgtgtctcttcttacaaggacaccagtgattggatttagggcccaccctactccagggtgatctcatcttcacttacatctgcaaagacccaacttccaaatcaggtcacattcacaggggccgggtttaaggcttgagcatatcttttgagaggacacagttgaacccacagcctcataccaccagtaagtgtcagagcttggcaaggcctccacctgtagcctctctgttcactatgctattcaacaaatgacaacgtgtgaatatgtaagtccatgtcacccatttaacagcccgggaaactgaggggcacatgaatgccagccttctgctcccccatctaaggatacagggctgatcctcacagagcaggatttgtgtctctgcctcttctcttccctcccctggcttctggctgcaggctggtctcgcacctccagccttgacctgctatttacagctgtttctttctcttgcccctgttgtcattgggcacttgctctcctgtgggctgtgtgcggacattctctctgctgggctttgcatctgctgcccctcccctcccacttctgcaccagaccagctttctccccactgggcctgggatttgctgaatggacttggagtcagagtcagcctctggctgctatgacctgattcaagccgtatttatttttccacgtctgatattctctgttattttctaatactcaatacgttaatttcacagccagctactgagccacgacctaaagtatgaagtgctgacttgtggtccagatgcctccagggccgctgagaccctccggggtctgtttccagctgactccaccagcctcaggcctgccagcctcacctccaaaccgtgtggccctttcagctgagcaggcaggtggcactcagacctccaggctcagctcacgcactggctcttccgggggcctgagtctccagcttgtcatcacatctttctagattctagatttgtccgcctgccatcctctcagcctggggtcaatagtgtattaactatgatttcttattttctgcattcctgatgactggcaatgtggcctcacagactggagagactgcccctcccagtgggtgacatccttagagattgcgaaaggctggagcgtatctttcacaggcaaacccaccaattccaggcccagacccccaacttcccctcatcaaactctcacacaccaaggcaatatttccctgccctaaatcatcccagaccagggaccaggcaactagagaccacctctgtagttcaaagcccaccagaattatcccaaggagccaatcctggactctttcctctgttctgccctaacttttcccccaggaaaccccaatagagggcctggcctcgttttcccctcgctcctgcttctgcctggccacacctggaatttcctctggcgtgtcctcttctctcaggacatgttagtaatgcgttctttcaatgacattgatctctctaaatcccagcggtataattttaatgcaccagcctctcctgggcctgcccaggtatctgcaaactcccgggttccacagcaccttgtatttcatgacgatacaaaggagtagctattggggctctatctgctgagggagattcatcagacaccccgatgcaaacctgagtgagtgaaggctgggcttctaggcaaatgcagcccctccctcttccaaccagatggccgcccctcagcgccccctgtggagaaattcaggaagcaccactcttgtataatacatatacccctcttgttaaggtcattaccccaaactgttaattattatttacaaaaaacatattatctactagaatatgaaccctgtccccacacctagggtggtgtgtgtatgtgtgtgtgtgtgcatttgcacacatgtgccataagagctcgataaatatttgaataactgagtgaatgaatgggtatttagaagcccattaagctcagactaggatgcaatttgaacttaaccctgcaggtactcggacagctgataaggggagtagcatgcataaggattggaagaggaagctggggtgtgtgtaggaggtggtgtgtagcactgtactggggagaagaataggcctcagaacccagcaggacaatggttaaatcccagctccacagagtgatctcggcaggttacctgacatcttgtttccttaggggttgctgggaaattaaatgacaaaaatgcaaagcactcagagactgcactccgatgcccatggagaataagtggcaactcttattattactcaacctttctgagcctcgatttcctactctgtagtagcatgtcattgtctgatgctaaatggaaatgaagtaaaatttgtaaaacgaagtttcactaaataatacttcatgtgatgtattctaatatattctgttttatgctaactcattaaagaaaaaagaatactgtcagtgacccagtaaattgatttcataatccattaacggacatgtccttaagttttaaaaaacccagcctacagaatacatttttaaatagactttatattttagagcacaattcaacagaaagtacagagaattcccacatgccccctgtctccacagctctcccctgcgcatcaacatctcacacagggtgggacacttgtcatggtggaccaccccacatggacacgtcatcatcgcccagcaccgagtttgcattaacattcgctcctggtggtgaacattctatggattttgaccattgcataacgacacatatccgccattatggtacgtttcactgccctaaaaatcctctgctctgcctattcattcttccctccagaatatttttaacacgatctcgaggccatagatgatatcagtaatttgcagtattgatgatagtggtgaaccggaggagagagacactgttaggaagctgctgtagtggttcaggtgagtgaggacagaaggacagctgtggctgcaaaggctggaagagaggagggtgtgggacactggtcaggaagagacaggccttggtcaaggagtgaggaacggggaagcaggagccactggaccctaggggtctggaagctagtggccttggtgtgggactgcagagagataggaggtgccagacggcagggacttcaaggcagaattgaaatctgctgaacagcaggcgtcggtcagctgggacagccggaaagctcgggatcaggaggcggtcaagctgagctctgctctcattccgccgcgtgaccttgggcaagtcccttcccttctacaggaggctggactagatgtcctccttgtacagcgttgcggggaaggtgagacagtgccaccaacacagcagggcattgctgggtcggggggatggggcaggaaacgcttcaaggatcaggcaggattttcctcccaccaggaaaagccggcgcgggtctaaggccggaggagggacccagacataggagtcaccttctaaggggcttcctggagcacattttcctgcccagcaacaggcggcagcattctctccccactaatcctctccaaacagcagtgagagagaatgcctgccgcttcaagccaggtcgcaacccctcggtgacccgctgcgcccgaggaggggccggcggtgcgcggtggtggcggcgggcgcggcagctgtgcccgtctgcccaagggttaatccgtcccctgcagctgccgcgcgtgccttgcagaatttcaccagaagagggtacagtttgaaaagctcctgacgtcaggctggaattcctattgtgtttagaaaaggctcgggcaaagccagcccaagttcgctctctgcacacctcgagcacctcgcggacggcgtgggtccgccagctccgggacctgccgccgctgcctgcgcgccccggggcggaggacggtgccagccgcccacgaggagaccccgctcccgcaggaggccgagctgaagcggcggagcgcgccgccagccagccggggtgagtgccccgggcgaggccggcggccgccaaagcccccgcgggctcgcccgggcgcccggatgccagccccgagccccgccgccgggtgcatgcctcccccgcggcgcgcccccgcaggctgctgcccgctgtgaccgcccttccccgcaggcgggcgccggccaggctctccccgagatcagcgcacgggtggcacccgccggacccccagcggcagcggcggcggcggctgcagggggcgcggggcggaggctgcgagggcgcgcgcggggaggatggacgggtccggggagcgcagcctcccggagccgggcagccagagctccgctgccagcgacgacatagagatagtcgtcaacgtggggggcgtgcggcaggtgctgtacggggacctcctcagtcagtaccctgagacccggctggcggagctcatcaactgcttggctgggggctacgacaccatcttctccctgtgcgacgactacgaccccggcaagcgcgagttctactttgacagggacccggacgccttcaagtgtgtcatcgaggtgtactatttcggggaggtccacatgaagaagggcatctgccccatctgcttcaagaacgagatggacttctggaaggtggacctcaagttcctggacgactgttgcaagagccacctgagcgagaagcgcgaggagctggaggagatcgcgcgccgcgtgcagctcatcctggacgacctgggcgtggacgcagccgagggccgctggcgccgctgccagaagtgcgtctggaagttcctggagaagcccgagtcgtcgtgcccggcgcgggtggt

SEQ ID NO: 8471 - DNA, 6000 bp, Homo sapiens
gagtagctgggactataggcacccgccaccatgcctggctaatttttgtatttttagaaagatggggtttcaccatgttggccaggctagtctcgaactcctgacctcaagtgatccacccaccttggcctcccaaagtgctgggattacaggcatgaaccagcacacctggccacttttcattcttaaagtatttgttgagcatctataatgtgctcttaagatattgagatgaacaacaccacttagttcctgccctcaaggaactcacagtttaatccatccatatagacaatgaatgatagtacaggagtctaactgtaatcggagctttgtacaaagtataatgggacccagtagagcaagcaactaaatttgctttgcgagtcagagaaagcctcagagaatgggtgacatatactggatcctggagattaagcaggcattttccggtggagaaggaaacactataggaacgaggcaccagaaaggcaagactcagatggcatgcagtgagcatagaggagagatgggccacttctgtcgggctggaatgtgaggaaagtgcagaggagaggggaggggaggtggtgatgaatgagtaaggcagagagaaaggtgtgaagagcttgaaatgtggtaaaaaatcaagttgtgaccagagtatgagcaatctggaaggccatccctggaaatattttcatgggctaacttctcagacagagcctttcctatactagagtgttatgaggacctgccagtgtgatggagtaaacaccttcctttccgtgcctagggtcaggcacaggtgttctgtggcactcaccttgggcaatactcaagggccttcagagggtgattctgagtacctgaggacagcattcctttgtgcctggagacatagcctgtcacagggttttttctttctttaataatttataaagtgtctccttttatctatagaaacataaagcttttagacctggcaagggccttaaagatgatatagtcccaacccaaatgtagggcccaagaggaaatatcactgaggtaatcagggacagagctgaatcagaattcaagtctttgtacttgaagatcataaagatttaaggaatttttctttttcttttctttttcttttttttttagacagggtctctctctgtcacccaggctggagggcaatggcaccatctctgctcactgcaacctccacatcccaggttcaaataatcctcctgcctcagcctcccaactagctgggactacaggcatgcaccaccatgcctggataatttttgtatttgttatataggcagggttttgccatattgccaaggctggtcttgaactcctggactcaagcaatctacccgccttggccttccaaagtgctaggattacagatgtgagccactgcacccggccttaagaaacttttgatataaaaataataccacagggcagttagagtaagcatacaataattttgtgaaaagagcatgatcattgtagcaataatctgaaataaaaacattctagctgattgagaactaaatttaatttaatgtaaatttagttctgagcttcctggcagccaagcaaagacagcgatatgatggtttacatgttttatttttacctggcaaaaggtagcgtagaaataagggatttaggttttgactaggatcagatgaaactgggcagccttcagtaattcacttcacaaacatgcagatccaacagaagttcctggaaattcagtcttcaaggagcttattgtctagtggaagacaaacagttaaaatcccatatggtagattctatgaaagtgggaggcaaaggctgctgagggagtgtggaaaggaaacacacaacacacaacccaggatgagagaggcggcttcccagagggtcgtgattatgatgtgattatccactgaatctcatcctaagggagaaggggtctgttgggcaaagcaaagcttggtgatggggaactgtgttcttagctgaggaggcactgctgtgcattcagagagtcaagaaaaagcatggtgggtctggggagttgcaggtgtttcatgtgctcagactaactggagtgatattcaggcagctgggtagaaagtggcaagtgagaggcacacaccaaataaacgctgctcattatgactatacccctcactcccaaccttcctgccagagatgagcacatcttcattttcacctgcagacctgttccaatttaagaagctaatgagcacttccctttccttcaggactaaggcaagtactaatctagctgatttctgtcatttgaactttagtgagaataaaaagtcggggacaggtttggctctggggagggaagggaagacatggatgtgtgataggtgggtaagagagggagacctccaaacgaggcctggaagacagactgaaatgcatcccacattagtggcatgtgtctccatccactccaggagtcctctgaaaccacagaggagtgagcattattgtcaacgatgattaaatgattgacccctcacagattaaatgcatggtttatctagatgtttctctataggcacagttaattaagagggaacgggatgtcatatcgggaggcataaagactgggcaggaagtgggtgtgtggggaaaaggaggcagttagttcacagcatgcccccggtaatggagactggggttggggaaggggctacataccgtgtgtgtgaatttaccactttgcctagctcaaccttggtcaacattcaagagtaaacttttggggagcagacctgcctcaggggtcatccgatgtggtcctttttattatttcattggcttcacatgattaccctgggagagaggaaatttccttacagatgacaaaatcagggctgaaagacgaagtggctccctgcagggctcagcagggtaagaagtcctgtctgtctctgtctcagatctgtggcccttctctgtgcccactcctacatgcccaccgtggaggcccaccccttctgtcctcagctcctgcagatgcacaggggcccttactggctcccactgtgtgtgccttcccgactgctcacatgttccgcccagaccccaggagaaagacctcactgccaactcttctgcactgcaggtgccttctgcagtgcttagagattctgaacatatttccttctcaagtaaaccatgctggactttttggataaacttagtgattttaaaatgattaaataggtaactgctgggagagatctggaagcattcttctaaggtgttgataaaatgtaaatatatttttagaacaatcttagagcttatgctaaagatgaactatgtaagaaagttaccttcttcagccacttgtaaatagcagtgtggaccaatgctttggatcctcttccacaggagaggagacaagattggaggaaccaaagaaccatggaattagggacaaatggctcagaacagtgctctgcagacacatgcatctgtactttgcttcccagaagccaaatgaaactgttggagcttggtgggctccaggcctcagggggaagaccaccctaggctttatcttttcctctgcccttcctgcctgctgttagcctctcctctggaccaaaactccctttaaggggaaaacctcctctttgaagcccacaagatacggtgaggattactgcctttttctgatttccaacgtgggtttttcattaagcaaagaacaattagaaaacccacacataacatagggtattcagtaagttcaggaaagtgttttccaccatctctttgcccccattccctccccagcgcttggctcaaggtctggagcttgaatctgcatcgtcttcctaggtgcttgcctgaggtgagtggtcagcgggtgctggcttgggggcagctggcagggcgtatgctgcgggtaggaacccagggaacactgggcgccttagcttggagcagctggctccgaggaattgttccacgtctgcacaacttaaaaatctgcagtttgggggcgggagggggagcgcgggggtgggtcccgaagcgtcccatttctcctcctggctgttaactgagcgctctcgctcagtgcagcgaggccagcgatgccttctggaccacacgctgtcctcgccgaggtcctggtttgttcctcaacgtcggctgaaggcatcgtcccctgacttcctcttccattcgtccttccgaaaggggacccgactggttcctcttctacatatgaggcgcatctgcttggtgcaaatgtccaagcacctcttctgactcggtgagtggaggaataagacaaagcatcttgttctgcactgtgcctgagtcttcaggcagcgggaccgatggcaaacattggcaggaactggagctatatgtactctccttcgcactttgttttaaaacaagtttgggcctcgcgatttcctgaggaaatccaggcaaattagcaaagtgtcgcttgggccgcgactttagaaaggcggttgccccagccgccggggccgcgggggaggtcatctttttcccgcagggccacggcgcttccggcccaggagggcgcgcaggtgggaggcgcggggcgcgctcctggtcccacccggacagcgcctgccgctccggggtgactctgcacttgggcctgggcgggggcgcgcggccggcagggcagcatctaggtctatgggtctgtccgcctgtctggcggtcggagccccgcagtcctcagccgcccgcgccctcggcccggggcgcccggctgcgggcccgaagcgaggggctggcggagctgcgaccaatggggcggcggccgagcggcgggccccgccccgtcccgtccggccccgccccgcccgcagctcccgggagcctcgctctagcggggcgggaccgacggacagaccggccgacgcgggccaccccgctctcctcgccgccgcggcggcaggcgcggggccgcgccgcgaggcctgatccctgcagcgcgggcaggcggcgtcgcagagcggagctagctggatgcgtccggactcctgcaggtacctggctggcgtccccacctccctgcgcgctccggagacttctccgggcgaccctgcaactttaccgcgccttcccccaccttttgctgccccagtctcctgtggtccaggtcgcgggtgcacgaccccgagggtctacggccgcagagcactttccgtccttctgggcgtctggcccgcggcgcccgcatcctctggtccccagagcccgccgtcgctggagccctaaggctccgcctgttgcgtgaactgcgggctgttgaagcggtggctgggttgatttgaaagcctcggggaaggtatttaggatcagctttcggggagtggggtgggctatggtcagggggaggaccacctggaggcgggagaatcgatgagccgaagaaaggcggcacctcgcgtaggggcatccccggggcgtttccttggccgggaagccgttccttcccttcctcgagaggaggcgctttcctggcgcttgtaaatgcttcccgggccgtctgctccgccttctttgtcattcctcccctcccctttgccctgcagctgtgctaggcgccccgcgacagttgcagggaagagcgaacccagggcccttgctctcgtgcagcgctgcgccctgggtggggacggcgtgaggcttgcagcgcaggtgtggagtcacttgcggactctgcgtttggatcagtggcagtggtggggaagggtcaccccggggtcaggaactcctcttttttttttcgcgcctttctgggtggctgcccgacctcctgaggcaccttggctagcaagcgagccagtcttgccggcaggggccgcggcgagcctggctgggcgcctttcgcattgcagggcttgtcctgcacccccaaccccgctctgtcccttctcgttcatttggagaaaggag

SEQ ID NO: 8472 - DNA, 6000 bp, Homo sapiens; identical to SEQ ID NO: 2065

SEQ ID NO: 8473 - DNA, 6000 bp, Homo sapiens
ggcttgagccactgtgcccggcctaataaatcttaatgatggcttttcttctgtgaaaacacctgaccactgacccaccaaatctcccacaggaaaagtaaactttgaagttacttttgtcttgttccctcttcctggttgctagtttaatgtaatgtttttgcaatagctagactgctgtaatatactgtcagtgtttttccaattaaatagaaacagagctatataattattttttttgacacagggtttcattctgtcacccaggctggagtgcagtggtgcaatgacagctcactgtagcctcaacctcctgggctcaagcagtcctctcacctcagcctcctaagtagctggaactacatgcgcatgccaccatgcccgggtgtgtgtgtgtgtgtgtgtgttcaagcagtcctctcacctcagcctcctaagtagctgtgtgtgtgtgtgtgtgtgtgcgtgcgcgcgcgcacgcactcaagcagtcctctcacctcagcctaagtagctggaactacatgcgcatgccaccatgcccggggtgggggtggggtggggtgtgtgtgtgtgtgtgtgtgtgtgtgtgtgtgtgtgtgtgtgtgtacagggtctcattatgttgagcaggctggtcttgaactcctgggctcaagtgatcctcctgccttagtgctgagattgcaggcattgagccatggcaccaagccagggctatataattctaatatttttaaataattgtggctgggcacagtggctcatgcctatgatcccagtactttgggaggccgagacagggggaactgcttgagcccaggagttccagcctgggcaatgtagcgatatcccatctctacaagaaaaataaaaaactagctgggcatggtggcacacaccagtagtcccagctactcagaggcggaggtgggaagatcacctgagcccaggaggtcaagactgcagtgagctgtgatcacgtcgctgcactccatccttatctcaaaacaaaaacaaaactgtaactttgggaaggtgagattatgtctatactactacaccttttcaccgccaactttggagtccttttcctctgtacttacctctgggagcacataggaggctgcaggaatcagcaggtaggaggctgggacaccagcatggactagagaacgtagtgtgtgccttccttccagccatggccggctgtccaccactaccacccgaaaccgccggccctctgtccaagcctcctgaagaattcgtgataccagagatgagctagagtgaatgaagaggaggattcagttataaatgtcagtaactgatgactaacttattcccaaaggcaagtgggtagtcccttcttcagatcattccaactcccaatctgctcagtcacaaggtctggaccataccatccatataccaggatcacatctccattactgatcttctggtaagcaaagcgtgaaattgcctgagctgctagcacaatcttctcttgcacataccgatcaatggctgctcgaagttctgacttggcctaaatggagtaaaatccttagtgaacaagaaatggacacttttatccctctgatgatcatgccaggtgcttgaatatgtgtatgatgacaagcctatagagggctcagagatggcacaagtcagaatggccaaaccattccttaacccttgactagggcaaaaaaaggcttacgttggccttcccgggagtttttaacatgtttcttaattttacccacaggtgcatgccttccttatttctcatactcatcacctcctcttcccgcttggaactgcccacactggtgatttccttgttaaggaacttgatggcgttgtgcatgctcgctgacaggggacggcactgagtcaggaagctataatacaacagcaataccttatatctgcgcaactcttcacaacttacaaagccttcacatttaaaaaaaaagtctttaaaaagaaaatagaacacaaaatgaaaagagagatagaaaagcaggaaaaagagtacaagacaaagattgggcgagctgggagtggacttatagtgttgtccctacctcatgtagggttttagtttattcactagatccctggagagttcttcattaggcggtgttgtgtaatcctgaatcacctatagggtacacaaggtgatctgcaaaataccccttaataaagatctctgaacgggggctgggggtaagcttcactgaggaaaatgttctgagggtaggagtattccctctgtcccccagagatgaccttgggtgacagaagctggggtagtattgggggaggtggggttggatcataagagagaacaggatgggacatacctgctgcaaggcacgaagcagggcaatacaccgggcattggagccactgaccaggccctgggagtactgcaggccgagtcgcaccatggctgggtggatcacagaggatgggatgctgatgggatggcggtgtcacatactttgaaagggagcttgagcatctactgcccacctgcccctgatgaaaaggaactcccttcactagcagatttccccactcctctacagttctgccttgggttcatactttttcctacagagtccatctcagattactagaaactttcaatactgacttactaaaactcctcagactcaaaagttatgacaatttcataggatcctacctcataaactgggtcagagagttttgtctgctgtactggggtaggtgagagaagagactgactttggatccataatcctttcgtgtaggaaccttgacaaaacaagggaacaggaccaatggcccagagtttaaaaaggatgggataaagctggaaaggaagtgaacagtaagactactctgacccaagcacctatccttctcactttgcacccagcacctttcctccctccagtccatttccctaggctctttctagccaggcaccaaacccacttcctacctgttgacgctctggttttttaacaagccttctcagaagtaggtcatcaacctgagggtactcagggagacgcttcactcctgaaagataatcatcatgttttcaggacactgtaggtcttgaaatgtgtaatttgctcttagggtataaggggcatcaagaaaaacaggatgaggtggagaaaacgggagaatagggtagaaaaggaaatagggataggataatggggttgcaggaacaattcagaactctgggtcccaagaatgagaggggagagctgttttactattgggcagcctgagctggcgttataattaggagtaagggaggtcttaaaatgaagggaagatacctgagggggtttctccagctgtgctggggctggccttaggaggtggtcctccttgttccccttttcttgcctgtttcagggcccgctcggcctcctgcttggctcgacgctcagcccgaagttcggccttactccgaccagctggaactttctcccgaggagtgcccaactgaatgcccgattctggcagttctctggttgggcctactaaaagcattaaaaaaaaaaatgcccaagctgcaggcaggtgatatccgtgccccagctaaaactagcttctctccttgtaaacctctttgctttacacacttgctcaaatcaactttgtcctgtctctcccttatctctcccaccacatccctctaccagctccacaccccagccctttaaaagagacccctcactcaccttgacattgggctgcagatacagcagagccagtctctggttctgcccccttttcttccttccgtttcttcttctgctgtttcttttccttccgaagctgcagcttttcttctttggtcatttccctccccactgcctgagacacagacataggatactgctcttccccaacaattccaaaggggaacaaatactattggatgcttacaagatttccacatggttaaatccctagttcttcctaacttccacaagctacctgttgcaagcttacatccacagaggctgacgtttctcctccagggacagaatcatatatccctagggttgcaagacctctgtaaaatctcctggctttactgagaaataaaccgacacgggatgggagctggggcggaataaagctggcacagcctcctgcgtagcgcttggcaggcggcttgggagggaagcctcacttaccccaggcccagggggaagctccgccttcatcccggatcccgagtctgcatcagaaaacagggcacaaagtgagccagagagactccgggagggtttgggggcacgagtactcggcgcagccggctgctgggttggcatgaccacggatccgccggcaggcgcgaggcgagccagggatccgcgtggggacgcactgcgcggcggatcaaaggaatggaggggtcaccgaccctcctcacagcaaccagccggtgcgcggcgcgggactgcgctcgagactgtgtagaccggagcccagcgtggcgctggaacggagcggcggggcccaaaggcgctcaaggcccggcactagctgtccggagctcgtcggctccgcgtaccagtaggcaggcccggctcttcactcaccctcgcgaacagccacggccacagcagccatcgccctcagtcctaggctccgcccgccgtggtcacggagccgccccgctgcctcgctccgcggctgcagggtccacagcgccacctgggctggaggctgagccgcagaagcgaagcgcgcagccccaatcggactacaatttccgacgggccccgaggccccgccccgcactacgggttgcaatgagggccaactccactttgggctccctatccggacaggtggctcttgccctttagactacagttcccagcatgcccaggcgattgcgtcccagaaccgacgtcccaccgccttcccacatcggatcgcagggctcccaaaatggcgagtgaggctgcggggactcgctgagcagcggagggggagcgtgcagagccgctgcggccctcacagtccggagcccggccgtgccgtgccgtagggaacatgcacttttccattcccgaaaccgagtcccgcagcggggacagcggcggctccgcctacgtggtgaggagcggccggagccgagccgggccgggcaggggcggggataacgggcccgagccatctcggagcggcctctgaggcctgaccgccacccttcgggcctggtcctgggccgccgactcccgacggcctctctgggagcttatctcatgtgtgtgattcgtgcagtggtcgcccgagctcctgtaggcccttaggccgggtcgcttccccgagctaggccgcagctgccctggtgggcgtcactggcctcttgggcagtgagactgcaacacaagcgtccgaatttcccccggactggctcttcagctttgggacttggccctggcgaaaacaagcgaactatccctcgggagattagcgcgttactccggcgagttgccaggcaacttccggccagggttctcaggggggttgcgcagaccgcaaccctaaaatgcttgactacttttgtgtcctcaggcctataacattcacgtgaatggagtcctgcactgtcgggtgcgctacagccagctcctggggctgcacgagcaggtgggactagcacccctgccttgagacagcttcaagcccttccctacacgtggacatcagtgtctccctttacccgctcttcttgttcccgtaggctgtagttcccctttaatcactgccacagggtagggccctggtttatcttgtctgacatttccgggaactccctaagaagcttaatgtccgcgcaacaactgctccttcctgttcttatattctggttttctgtccagtcttactgctctagtagcctttacccctgcatggacaaaccaacccctccccccactacctccacccaggctgtca

SEQ ID NO: 8474 - DNA, 6000 bp, Homo sapiens
caacaaaagaacgaaagcagctctctcggctttcggctcggaggaggccaaggtgcaactttcttcggtcgtctcgaatccgggttcatccgacaccagccgcctccaccatgccgccgaagttccaccccaatgagatcaaagtcgtatacttcacgtgcactggagttgaagtcggtgccacttctgctctggcccccaagattggccccgcgggtctgtctccaaaagaggttggtgatgacattgccaaggtaacgggtgactggaagggcctgaggattacagtgaaactgaccattcagaacagacaggcccagattgaagtggtaccttctgcctccgccctgatcatcaaaaggaactaccaagagacagaaagaaacagaaaaacattaaacacagggggaatatcactttttatgagatcgtcaacattgctcgacagatgcagcactgatccttagccagagaactctctggaaccattaaagagatcctggggactgcccagtctgtgggctgtaatgttgatggccgccaccctcaggacatcatagatgacatctacagtggtgctgtggaatgaccagccagttaagcacaaaggaaaatatttcaataaaggatcatttgacaactggttaaaaaagaacgaaagcagggatttattgaaaatgaaagtacactccacagtgcgagagcgtgctgagcagtggctcaagggccccggatacagaatcttcttgggtccaaataccctctagaagtttcccattggctacttcatgcccacctcaggtaaatgaagtggtagcccacaatcagtctgattgattgcagaaagcagccaaccagaggatgacgtggttacaaaagtgacactcctgtgcaaacgtatgattggttgcagaaagcaaccaatcagaggctagggtgaagttacaaatttatacttctatgcaaacgaagactccgcccgcaatcagtctgattggttgtggacagcaaccaaccattcggaggctggagtgaagttacaaagttgcaaaggaagactcaacccgcaatcagtctgattggttgccaatttcccatgcctggcagaaaaggtggggggtttgcaaagggagtagcctctggtccttttgtgatttaggcatgtaaagttagggttttcctttcagtttagttctaggaatgctgcgtgaaacagccttaggttccctgcctccaatccctatattctcctgcctcaatacaactactttccaaaacagtttggcagtttcttaaacattaattatacacttaccatattatccagctatttcactgctagttggttcctaagagagaaggaagctatatccttagaaagagttgtacatgattgctcgtagcaattttatttataatagccaaaaacaaacgaaaaaaatcccacatgcccacttataaactgtggtgtatattctttttttgttttgaacctcactctgtcacctaggctggagtgcagtggggtgatcacagctcactgcagtcttggcctcctgggctcaagcaatcctgccttagcctcctgagtagctgggattacaggcgcacgccaccccgcccagctaattttgtatttttgagtagagacagggtttcctcatgtttgtcaggcttgtcctcaactcctgacctcaggtgatctgcccgccttggcctccaaaagtgctgggattacaggcctgagccacggcgcctggccaggagcagaggtttaataggcggaagaaggagaaagacaaaggaaaatagctctctctctagtgagaaagaagggacttccaagaggaaaaggtcagctggtggatacgccagattttatagtccagcttgaggaggccgtgtctgatttaggtagggctcacaggttttttgggtcaggtgtgacgtttacatagcacacagggaaggctggtggccccactctaatcttattatgcaaatgaactctccacttggccggtgccatcttgtctgctccttactgtacacgtggctggcagagaaggggaggtgcagccgccattttgaacatgtctagtcccaggtagttctttcctgtcgcatccacctgtgcaagctcccggcttgcttgtctatgtctgcagcttgactttactggctgctctttgttagaaaatgatttggggcatggcatggtggctcacgcctataatcccagcactttgggaggccgagtcaggtggatcacctgaggtcaggagtcggagagcagtctggccaacttagtgaaaccctgtctctactgaaaatacaaaaaattagctgggtgtgttggcgggcacctgtaatcccagctgcacagcaggctgaggcaggagaatcggttgaacccgggaggtggaggttgtgggtgagctgagatcacgccattgcactccagcctgggcaataagagtgaaactccatctcaaaaaataaaaataaaaaatattcaatgggcataattaataataatgagaggtatcactgggtgcattcaatgagccaagtattgggatttactcagttttaaatgtaatttgtccaagatcaagtagctcattcctccatacctctatactatacaatgcttctaagccactccacaaagagacactaagattagggccccagataactatcatcatttaaaagaaaaaaaagtctcattatcagatcaaacgattcataggactgtatgtgctcctgatgaaagggacatcataaatcattacattcctttttgttgttgttgagacagaatcttgctctgtcacccaggctggagtgcagtggcgtgatctcagctcactgcaacctctgtctcctcggctcatctcagctcactgcaacctctgcctcctgggctcaagtgatcctcccacatcagcctgcctcctgagtaattgggactacatgggtgcaccaccatgttcagctaattttaaatttcttttgtagagatgaggtgttactatattgtccaggctggtctccaactcctgggcttaagctatcttcccactttctctatttaaccatgtataagaaaaataatttccccccaaagtcatttttcttatacctggctaaatagagaaagctttaagctttaaaaaaagttgtggtaaaacatctgtaacatttcagtggcattacgtatgtttatactgttatgcaaccatcaccactatcatctcaggaatacttttcatcatcccaaactgaaattctctgcccaatgaacaataactccccattattcccttcctccaacctccagtaaccacgtttctattttctgttcctatgaatcctactactcaagatacctcatctaagtgaaatcacacttgcccttttgggtctggcttattgcacttagcataatgtcctccaggttcatctatgttgcagcatgtgtcagaatttcagtcctttatttatgtattggagacagtctcactccatcacccaagctggagtgcagtggtgctatctcagctcattgcaacttctgcctcctgggttcaagcgattctcctgcctcagcctcccaagtagctggaattacagcatatgtccccatgcccagctattttttttttttttttttttgagatggagtttcactcttgttgcccaggctggaccgcaatggcgtgatctccattcaccgcaacctccgccttccaggttcaaccgattctcctgcctcagcctcccaagtagctgggactacaggcatgcgccaccacacctggctaattttgtatttttagtagagacggggtttctccatgttggtcaggctggtcttgaactcccaacctcaggtgattcactggcctcggcctcctaaagtattgagattacaggcgtgagccaccgcgcctggcctaatttttgtatttttaatagagatgggttttgccatgttggccaggctggtctccaattcctgacctcaagtgatccacccgccttgtcctcccaaagtgttgggattacaggcgtgatccaccatgcccagccttcattccttttcaaagctgaataatatttcactatatgtataaccacattgtttatctatccatctgatgatagctacctgggttgtttccaatttttaattttttaatttatttttagtttcattttatttttattttctttcttatttatttattttattttttgagacagagtctccctctgtcacccagggtggagtgccatggctcgatgtcagctcactgcaacctctgcctcctgggttcaagtgattctcctgcctcagcctcctgagtagctgggattacaggcatgcaccaccacgcccggctaatttttgtatttttagtagagacggggtttcaccatgttggccaggctggtcttaaactcttgacctcgggtgacctgcctgcctcagcctcccaaactgctgggattacaggtgtgagccaagatgcccagtggagattttttttttttttgtgggatggattctcgctcttgtcgcccaggctggagtgcagtggtacgatctcggctcactgcaacgtctgtcttccggggtcaaacgattctcctgcctcagcctcccgagcagctgggattacaggtgcacaccaccacgcctggctaatttttatacctttagtagagacggggtttggccatgttggccaggctagtctcaaactcctgcccttggtgatctgcccgcctcggcctcccaaagtgctgggattacaggcatgaaccaccgcgccagtcccgagattttttttttaaacctctgtacttttaccctttcttccttggctggactttgtccagctaggtttatttataaaccacacaaagttcattaacaagaccaagcattcagcaagccactcttccacctcccttactgcaggaaggcactccgaagacataagtcggtgagacatggctgaagataaaagcaagagagactccatcgagatgagtatgaagggatgccagacaaacaacgggtttgtccataatgaagacattctggagcagaccccggatccaggaagctcaacagacaacctgaagcacagcaccaggggcatccttggctcccaggagcccgacttcaagggcgtccagccctatgcggggatgcccaaggaggtgctgttccagttctctggccaggcccgctaccgcatacctcgggagatcctcttctggctcacagtggcttctgtgctggtgctcatcgcggccaccatagccatcattgccctctctccaaagtgcctagactggtggcaggaggggcccatgtaccagatctacccaaggtctttcaaggacagtaacaaggatgggaacggagatctgaaaggtacatgcccagagatcatttagggtgggtgccaggatgagattggtttatggttcttttgttcttcagaaccaaattatgcctgggttgttcagtaagcacattccattatgactggtcatgccaagttgctccttgtttatgatattcttagaaaatcactcagcagaacccagcagttattttactagctgaagggctatttgctgaaggcctttgagccaaacgagttgtttaatttattgcccactaagtacatacagttgttcagtcatcaattctaacttcttagagcagccttccttctaaaatctatgtcctgtttctggggactttatagttgaatatgtcagggtggcagttgggaattgctttcccagtatacgaagcagctagtttggctgtgtggctgggagtgtattagtgaataaagcataaataatatttttttaaaaatcaagtgatatctgtaaaaagtataggctgagtcttaaagtttaaattctaaaaaaggaagggaagtagaaaaggggtagcagtatgca

SEQ ID NO: 8475 - DNA, 6000 bp, Homo sapiens; identical to SEQ ID NO: 3697

SEQ ID NO: 8476 - DNA, 6000 bp, Homo sapiens
atccacctatgacctggaactcccccctcctacccccctttcaagctgtcgggcctttccagactgaaccaatgtacattttacaagtatcgattgacgtcttctgtctccctaaaacatacgaaaccaaactgtagcccaaccatcctgggcacatgttctcaggacctcctgaggctgtatcccgggcatgtccttaaccttggcaaaagaaacttctaaattgattgagacttatctcagatactttttggtttacatgacatattgatatgacattttaaattatttttaatattctaattcttcatttatatagacaatgaagaattatgtcatttggatgattaagtttatactttgtaatgatcttatatgtaaagaatgcagaggacatagatacttggtctgattgtttatctaatgggcttggaattccatttacctgaattctattattttcaaaattattaatttcaaaatttctatgtcaggaactgcttagctgtttagagattgtaagtttatgagtgcaaatggcctcctgatttttacagaacaaaaatactagctcttctttggcaggcaaaacacgttcactgatatgatctccttatctcactttaaataacaaaaattggctttttctgaatgttttgtctatgcatcatctttaacattttaattgatttgaaatgatcttggccttgtaaagtatgcttactaaatggttgggtttttctttttctttttaaccagtgtaagcattttatagcacccagttctttgaaaagcagaacgcatgccatacctacaagttggcatacagccaagaaagtccttttgtgtgcgtgtatttgtggtgaatcattcatagcctgtaagatctatcaaaatagctttgtttgaaaacctagttttccccatattttttttctgatgactcacacttcactgctttcatgtctagattctcttttctttcttgtttctcatcatgttcattcagaagatgttctttcactagttccaaaatttgtatttctatattctgtcagttttcatcttgaaacatacacacagcaatatgctctgaatcataaaattctgcattaaatcccaacacttaaaaaaaacacatattctcaatataggtttacctgctcctgttgccatttttatttagtacaaatttattaacatttaaaaatcattggcacttatgaaacttgaaactttattttactgttaggaagattttggctgcaagaaatataaaaaccaatgctaagtggtttaaatcataagaacacttaacacttcatggatgaatatgaaaatatggtggttcaggattagttgaattagtagttcaataatggcctcaaagactcaggatcttcctatctttctcttttgccattcttttaaatcgattttattaaggcataatttatatataattcaattttaagtgtataactagaggaattttgacaaatgtataataatgtatctattaccacagtaaagaaatttaacatttgcaacgtttcagctccttgcagtcaatcccagctcttcgatttcgaataaattattatattatatatactcctttgtgtcttcttttacatagcattgtgtttttgatattcatccagcttgttgactgtattggtgctttgctcctttttattgctgagtgatagttcattgtatagtagatatagtataatttgcttattcattcaccagttgatggaaatttatttccagttttggctatcacatatgaagctgctctaaagattcccctacaagtctttgtgtggatacaggtttagatttatcttgggtaaatatgcgaatgctgggttgtatgttaattatatgtttgacactataagaacctgccaaactgttttccagagtggctgtaccatcaacagcaatataagagagttccaagttgttccaaatccttggtaacttattagtattttttgaaaagcaaaagtttttcattttgatgaagttaaattgtcaatttcttcttttaggtttccagcttttaaattttttatactttataagtgcacacatttaaagattatatagagtttctgctaggttttctctaaaaagtttgagatttagatcttgtatttagatttagctgtatgatcagtttcaagtaaatttttacatggggtgtgaattaagggttgaggtttctttctttcttcttttttttgtatatatggatgtctagctgttctaacatttgttgaatattctgccattcctggggctttagattagtactttttcccatctttgtggtcacacgatgactgcagccattttaaccatcacatcagagactatctcttccaagaatgtgtccagcaaacttcttttcacctcgttacctagactcagcacatgcttattttgtactgtctaaaccaatcatgggaattggaatggggccagcatggttcatttattcattgaagaaggaaatggttgcccatatcctttctaggggttggggatacagtagtgacgaaaacaggcaaaaatgttgcctgacctcatgaaacatacaatttactgaaaaagattgtcttttgtcaaaataaataataaactgtataatatattgctgtatagcagtaggtactgggaaaaatacagggaaagaggctacgaaatattgtgggtgagctgaaatttcagataggatgtttaggaaaggtctcactgaactgacttttaaataaagacctgaaggaagtgatggagcagtctatacggataccaggttggagagtggtccaggtggcagtaaatgcgaaaagttcttgagaacagcaggccactgtggttgaagagagtaataggacattggggagtgggagtgcataataggtagatcagtgttcttttcaacgactggcaattttggcaaaatttcgtcatgttgggggatattttggttgttaacttgtgtgggagggagtgctgaggagaccagggatactgctaaatatcctacaatgcacaggacagcctatctctcaatcctcctccttctcccaaacccccaacaaagaattatccaggctgactgtcaatagtgcccaggttgagaaatgctgtttaaagtcatagcgaagactggctaattgtgagtaaattggaataacactgaattgttttaagctcagtaattatttaagcgttaaggatcatgtggctgcttgctgtgaacagactaaagggataagagggtataaaacatttaggagggtaatacaattacctagagaaaaaatatggtttgggccagaatgcaggtaagggtgctaagtgatagatgctggatgtattttgaaggttgagccaacaggatttactaacactggatacatgcctgtagggagaggaaccacctacaagtaatctgctgtggttgctactggagttgtttcttctcaaaagggagccggggaagtggtggaaagctaaacaaatttggaaaggaggaaagagtacccaatatggatattaggattattatgcatctgttacataaatatctgtaattatgcatctgttatataaatatcttaagaaaataagaaaggacactgttggaccagtgaatgactaagggcacaattattctatggactgtttctttaaaaatacttttttgtttgtttttagaaacgtcttctcatgccatctttcattttggtgacagtctgaaagatgtagggagccccaattccttattctatcaaagtcattaaagggctctaattttcctttcagtatttgtatcccaaccaattattggtggttactatgtagaatgctgacgtattaataatctttgtctaagcatttgtttggtttagtctaaaatataagcttactatgagtcttttttttctttccttcgagactgagtttccctcttgctgcccaggctggggtgcagtggcgcgctctctgctcactgcaatctctgcttcctgggttcaagcgcttctcctacctcagcctgccgagtagctgggattacaggcgtccgccaccacgcctggctaattttttgtatttttagtagagatagggtttcaccatgttggccaggctggtctcaaactcctgacctcagatgatccacccgcctcggcctcccaacgtgctgggagtacaggcgtgagccaccgcacctggccactatgagtctttatgtattagaaaactgcttaataaagtcctcaccttattgtcataatcttataaccaataaccttataatctaacaacaagggttatttccatttcacagacaaaaaaacctgaagtttgttaattacggtgttaaattatcctacgattaatggcagaaataggtcctgaaccaatatgcctttgagaacttaaacgcggtgagttacatacaggccctcctaactggagtcttcgctagtaccaatagttagttgctcggcgagagctcggtaaggactagccatttggaagctcgtagtactcaggttgtggtacaggagatctaacactcctacacaaatgcatgtcgtgcttatttcgtaccaaactggtctggcggcggttcttcgtccagacgctggcgggccagggtggaggtagtaacacagctcccattccccatgtagccgcgccctctccttcccctgggcgtctccggggcgtggacaggccgctgaaaggaaccggctgcggcctgtgtgaggctccgcgggccgctgcactgcgaggccgacgcagctggagagaagttaggcaggtcctagggagggcaggctcgagtgctgggcccgcctccccgcgggactgtaggcccgggggctccgcctcgtcgcagcggcaggtaggaggcggtgcgcgcggcccggcgacgggggatcctgaggcccggtcagtctcttgctctggggtcttgggtggcgggcggcacctccgcttgcagtgccggagccgcggccccgctcggaaaagggctgccgtcggagttagatgccggggactccgggccgtcccagcccccgggcctcagctccggcccgggcagagtcgctgcttccgcgtttggttcttttttccccgctgggagtgagaacaaggcgtccccttctactcacgtttgccaaaagcgggtccgacgtgttagcggaaaagtgggtggagtttctctttttgccggtgcagagagaacttgtggcgggaagttggggcgcggggttggccgtaggtccccggcgtgctaagggcggacggaccaggcggctgggccgcgctgcttctcgttaccttccgcagggtcaggggccgcggcggggttggaggtcagcccaggcacatgttaacccctgggtaccagtttgctcggaaactcgtgttgaggactcatcttagccctgggaaggtacccagaagccgaagggacacccctgacagggacgggccctgagaggctgtcgtttcccttggcagatgaactcgggactcgcccccaggatgtacatttcgtagagtctcccttaccgcctcaagccctgaggccgctgccttgccccaaagtgtatttatcttttttataattatttagaatttattccttaatcagtagtttacactttggagactttaagttttaaatcagtaaatctgtaataggcaccagcctatataatgtactggtcaagggaaacctccacaaaaacttttcctgctttatgatacaatcaatgctctaggcatagttcaccatccaaattcccagcccttgtgtgcctatcaggaggaaggtgaatattgttaaagatacacgcagcgactctacctgggacaatactgctaagtaaaaaagcagttaagtgaaggaggaaaaacccgttaaaggaaaaacagatactttcttttatggaagctagg

SEQ ID NO: 8477 - DNA, 6000 bp, Homo sapiens
ggaggtggaggttgcagtgagccgagattgcgccattgcactccagcctgggcaacaagggagaaactccgtctcaaaaaaaaaaaaaaaaaaaaaaaaaaaaaaaaaatatatatatatatatatatacacacacacacatatgcctattactcaaattttccctccacctttctgagtaaaaactgaccatgaaaaactaggcaaggtgcagtggctcacatctatagtctcaccactttgtggttgtggggccgaagtaggaggttcacttgaggccaggagtttgagatcagcctgggcaacaacccacaagaccctgtctctacaaaaaaattgaaaaattagctgggcatggtggtacacacctgtattcccagctactcagaagaccgaggtgggaggatcgcttgaacccaagaggtagaggttgtagtgaatcaagatcatgccactgtactccaacctgggtgacagagcaagaccttgtctctaaaaagaaacagaaaaaaaaaaaaaaaagatgaagaaatgatctaacctctcttgtctgactgtaggtcataagactccccattccatggcaggtcctgccccacacccagaaggaaggaatgcatgctctgagaggccaagaacctagacaggcttgctgggtttccccactgagttgattacctttttgttcaatcatatttctatgtgccatccatactttgatgaacctaagcataaaaatggacaatttcccctgttatcattatgtcttcattctgaaggctcctgtgtatacacattacataaacgtgtatgccttttctcccattaatcaatttgcctcatgtcagtgattttcagagaacctctaggtggctaagggccttggcattcagactagacaaaaaaatctgatcagtctaccttatataatactggactacccttaatgatagcttagcggccaactatttaaaacaaattgaggccgggtgcagtggctcacatctgtaatcccagcactttgggaggctgaggtgggcagatcacttgaggtcaggagttcaagaccagcctgaccaacatggtgaaaccttgtctctactaaaaatacaaaaattagttgggtgtggtggctggcgcctgcactccagcctgggcaacagagtgagatgctgtctcaaaaatacaaacaaacaacaacaacaacaacaacaacaaagttgatcagcaggtctaaagacatcaactttactttgattatatgactaaatggcaaccacctgttaacaaaataaaaatctgcccctttcatgagtaaaacctccaacaaaaggtcaggcgcagtggctcacacctgtaatcccagcactttgggaagccgaggcgggcggatcacctgacaacaggagtttgagaccagcctggccaacacggtaaaaccctatctctactaaaaatacaaaaaactattagccaggtgtgttggcgtgtgcctataatcccagccactcaggaggctgagacaagagaatcacttgaaccccaggaggcggagggtgcagtgagccgagatcatgccacttcactccagcctgggcaataagagcgaaattccatctcaaacaaacaagcaaacaaacaaacaaaaaaaccttcaacaaaaacaaattaagtacaaaatatttgagagcaactgtttgcttaaattgccaatttttgcaatttaaataaactcacaaaaaaatactatatagagaatgaaggcaaatctgtctcctgttaccgggaaggagggggtactaaaaattcaaacaacctaatttgttcagcaaaacaagatcttctaattagtgaaacagttcatattaccttaaaatgatcaactgcccatattttagaaaataatcattgcatggcaatcttatggcatgctgtaactgtggtcataaagatgaacgacagtggcatcttttaatttgtgcagtttcataattcaaatgaacttgcttaaaatttgtggaagggtgaagctcctcccaacagcttagtataaagacgtgattcttctagtctgcgttttccaaacctctaaaacttcctacttacttgcaagttgctaaatgtttggggccacttaccaagattcttgcacaaaataatgaggaagacaggcatatagttacatagaactcttcaccataaaaatcagttcagcagccaggactactaaaaacagattgcctctggctgaattctaattcaggggaatatgtgagtcagcagagggaagaaaatcaggcttgtatggacacaccatacaagctgacaaggtgacaactttgaaacaccagaattgagaaacgcatagttagggttgcctaagtaaatttgggctccagggtattttcaagaaagaaaacagaatatgtggaaaacagcctctaaataatgaagatctggccaggcccagtggctcacgcctgtaatcccagcactttgggaggccgaggcaggcattatcacttgaggtctggagttcaagaccagcctggccaacatggtaaaactccatctctactaaaatacaaaaattagccacgtgtggaggtgtgcacctgtaatccctgctactcgggaggttgaggcaggagaatcacttgaacccagtaggtggaggttgcagtaagcccaggactttgggaggctgaggcaggaggatcatgaggtcaggagatcgagaccatcctggctaacacgatgaaatcccatctctactaaaaatacaaaaaattagccatgcgtggtggcacgcacctgtagtcccagctactcaggaggctgaggcaggagaatcgcccgaacccaggaggcagaggttgcagagagccaaaatcgtgccactgtactccagtctgggcaacagagcgagactccatctcaataaataaataaataagatctgtgtggtcaaggtcaagtcattactatttactagtgatctggatcccttttcccagcccatttaatctactttgatgcagagaagagatcggatgctgtgaggggcgaatataagcatttacagtgcatctctgactacatacacagagaaactgtttctgtttcacctgttactctaagttattttttctccattagttaaggtcaagaattttacttaattcagaagtaacatttaactcaaaaagagacagaagaaatacaccctcttccaataaatcaataagcactttaaaaggacacttaatgaagatttccctcgatacttaaatagctatattaaaatttattttattttccatggctagaagacaatgtttatttttccagtaagttcacaagaacaaaggtatcatgcaaagtaaataaatgacacattacaatctcctggctctgagaagttcccaaacctgattgatgagaattacaaaacttccagtcctgagtaatttgaagaggtctaaaaatagaccccaaaaaagacctcttttgaatgtgtgttaataaacgagctatgaatttacaaacctctcaacatcattttcacctaccaacaatttatcaacttctcaagaatgttaacattaaaaggagaaaatacgttacgtcttaaatttggttttttcatcgtgagataattaaatgccaggatttcataagatattagaaatcggttgtccatattagatttattatgtttgaaagcaagccctgagaaaggcattccacaatgtaagttttccagtgttggttaccctcaagatgtttgcttttcgtttatgtgtttgttttatagaaataactctgtaacaagttgctacaaagccgcctttcatgtgtcaggctccctaggaggactgaatccctcctccccaaatcaaggataactagcccagtctctggcttactggaggagaggaaggactttattttcacctcttggacgattacaaaaaccagtcatcgaaaacgagaaaaggggcagggtataagaaaaactagcgaaatgaccagactgagtctcatatcctaagatcttttaaaactcatttccctaccgaagggtgtcattcgtaacgcggcgtggggctgggggtgtggatttacggagaaagaggtgatcacacttcactgggcttctgaaacattcagctctggaatctactgtggactcttgaaaagttcatcccgagatctaacctcaagcctcagttttcgccaagcaagcccttcccccttcggtcaggtgcaacaaacttcccactcacccctcctttgctaacaaagccgctccagcaggagagaaacgaactctctcccgccacacctcttttgcacccagtctgcactccttcacctcttacctacccgcctcaccttctccccagacgccggagcctgagatttaaccccttccggccctcgaagggaagagggaagactaaagacaacgcacctattgcgtctagcaattctgttccccgaggaaacgtgcgttttagaacaaaagtaccagcccgctctcgctaggactaagtgagcttctcccttcttgtttgtagaggaaatccgaaaaactgcctggtttgccacctcaccctacctcccccacgagcgaaggagtgcgtgcggctttactcccagcccgactggtccactcccagaaaagcctcggtgggactccgacgtctagggagttgtagccgctaccagaaatatcgatgagcctttaccctgaggtttagaaaggcagctctttctggggcaaatacaaagagcgtgtttcttcctacaaattagtggcatcctcccgctgtatggattcagctggcaaagtaactcaagccttgtcctgactgcaagggtgggcggggtggacggctcggtgttctgcccgttgtgtcttacgctccaggtgctggtctacgcgggcctggacagtcaggggtaggagcgggagccgagaggaggcggaggagatggcgtcccagccgccacctccccccaaaccctgggagacccgccgaattccgggagccggaccgggaccaggaccgggccccactttccagtgagtgtgggattcttcaggctgtgagtttagtgggcccgagcggggacttggcaggaggcggttgtagcggttgttagtggaggtattcccttcccccctttaaccaatacccaaccttggggataggggccgaggtggagctggggcgcttaccagtggggactttagtgtctcacagctgtttctgacccggcagctctaatcagcaacgtttttttcgggagctcctgggcgtctctctgggtctctgtgcttgaaagaaaggggggcggcttcctacctaccgcttctgttttcactttgacagaatggcttctctatctttaaagcgtagactttggtctgtagcagttgagagcggcatttgtccagccacggcatcgacagggagcaaagtctctccttaaaggtgttaacctctcgagaagttgctgaaagccggaaaggttttacgcaacaggaactcaagccccgtacactttgcattcttttccagcataactcagccagtgtttcggatcgagattggagaagcaactttaaagcaggagttctagatctgaggcctatggatggactttgtgtgcaaaatagtgtatttttctgaggcctgtattttttttttgtttggtttttaatcagtatcagttggtttctaggactttaaaaaggctaaaacatgcagagttgggagtgtttcgtggcctcgtgtggcttttgtttggtagtgctggacatcttaattcagataggtgtgattcaaatgtcaaatcacctactattgtaggttttcctaagcgtaaaaaccccaacatattggaatgtatttctgctgtattctgaaatcttttatttaaacactaaaatgctttaacacagtaacgacttagtttaataaggatata

SEQ ID NO: 8478 - DNA, 6000 bp, Homo sapiens
attgtcctttctctactgtaccttcatcttcctcttctctgtgggatcctccttatttgcatttaaatatactgaagtaattccatcctaaaaataattaaaatacataaaccaaaataaacccactgctgacataacattcccctccagctatttctctgacttttcacagttaaacctttcaagaattgtctgcaccttgtgcctttcatttcttcacctgttgctcatgcctccatccactccagtctattgcccatccccttcattccaccagccgctgctctgtaaaagtcccaacgacatcaaggtcactaactccagtggatgttattcaactttcacttcacttgggtcacttagccttttttttttttttttttttttttttttttgagatggagtcttgttctgttgcccaggctggagtgcagtggcctgatctcagttcactgcaagccccgcctcccgggttcatgccattcttctgcctcagcctcccgagtagctgggactacaggcacccaccgccacaccggctaattttttgtatttttagtagagatggggtttcaccgtgttagccaggatggtcttgatctcctgacctcgtgatctacccacctcagcttcccaaagtgctgggattacaggtgtgaaccactgctcctggccagccatttttaaaaaaagacatgggggtctcgctatgttgcccaggctggcctcaaattgggctcaagctatcctcccacctcagtctcctgagtagctgacactacaggtgtgtgccactagacacatcttttgtcacccattttgagtgctgttgactactgcctcctgcttagagtgcttttgtccctggactctgtgacccccacctccccaaactcctagttttttctttttttttttttttttgagacagagtctcactctgtcgcccaggctggagtgcatggtgtgaactcggctcactttaacctccacctcctgggttcaagcgattctcttgtctcaacctcccaagtagctgggattacaggcgcctgccaccacgcccagctaatttttagtaaatatggggtttcaccatgttgtccaggctggtctcaaactcctgacctcaggtgatccacctgcctcggcctcccaaagtgctgggattacaggcgtgagccactgcacctggccaagctcctggttttcctcctgcctctctggctgctcttccacctcctctgccagaggtttgcctctgtctggcccttagataagagttcctcaaggctcagtggtaggtcctcttctgatctaattgtacactctcataggagcccacaagcctctggtgacttcattaccactgccacaccagctattccagccccagcctctcctcagagccccagaccctgcagccaaccacctgttcaacatctccacccggacatctcacaggcacctcaaacctactttgaccaaatttgaaccttgagagggttctccaactcagaaaatggcaccaccatccatctggttaaagaagcagagatctgggagttttccttgattcatcccccctaagcaattaccaagtctcgttggtgtctacctctctacatttgctctactgcttaaacaaatggcccctctcacattatagcaacagcctcctaactgtccctccattccattcttcccctttccctattccttcttcacactgcagtcagagtgatctacttcaaaatgcaaaattgagtgtatgactcttgtttcaaatgtctcaggataaagtccaaactctgtaatgtggtgtactggccctgcgtgatctaacccctgcctgcctctctaacttcctcctcaaccacttcttcctttatagtctgaaccagccaggaactcctcatggactccccagatgatctcaccaccttgcactccctgtggcccatatcacaattgtaattaattaatagtgcatttaattgttaagcccctctctccagctagactgtgagctccaagcagggagtgtgtttgccatgttcaccactccagcgcctagtcctgtgctgcatctagaggatggccagtacatttttgttgaataagtgaataacacatctctgcctactgatgatggacctgggtcccaacctaacagtagggactatagccaagcgatgtggaatctagcattgagttactccccaaaagacacaaggtaactattgtagatatactcccaactgtgttaaagccaccatggagaaaatgcccttatttatttgagacggagtcttgctctgtcgcccaggctggagtgcagtggcacgatctcggctcagtgcaacctccacctcccgagttcaagcaattctcctgcctcagcctgccaagtagctgggactacaggtgtccaccaccacacctggctaatttttttgtattttttgtagagacggggttttaccatgttggccagggtggtcttgaactcctgacctcaagtgatccgcccaccttggcctcccaaggtactgggattacaggcatgagccaccgtgcctggcctaagaatacccttatttttaaatttcatggcctgggcagccttgggcagcgagggacacaagcttaatttcctagttggttgccagctgacattgtagcagctcctttactataaactccttggctggccgttcttgcaagcatgtctgtggctacagggagtgcatttaaagggaagacacatatgcatggaaacaatataccaatctgatggcacagaaaatcttccttagatgtccgctttgtctcaacactgcatttaaatatcagacagcagcctagagatatctttatttaaacccaggaacatggactcaatattattttgatacagaatgaagacatagacttcatttattaatttatactccctagagttctttttttttttttgagacagagtctcactctgtcacccaggctggagtacagtggcacgatttcggcttactgcaacctccgcctccctgagttcggcgattgtcctgcctcagcctcccaagtggctgggattacaggtacatgtcaccattaatttttgtatttttagtagaaacagggtttcaccatgttggccagacaggtctcgaactcctgaccttgtgatccacccgcctcggcctcccaaagtgctgggattacaggcgtgagccaccgcgcccggcctctacttcctagagttcttagagaatttctagcttctgtttctttaaacatgttttattagctttctaaattatgaaagtaaatacaactggaaaaatacaaaatccaaagtcaagggagtaaaaaaatgtaactcccttgtttcccctccccgcgtaaccgtggttaacagtcggtgtgcacccttacagatgttttttctatgaaaatacaaacattcgacttgtttcttggactttacctcgcagtccgaggagaatcatgtgaacagcatgaaagcagcatggtccgaagactgcaaaccataacatttccatatctactgactctgaattcctgtttctagaggacccgcacccacgtggctctgtgcatccgcagcaacttggtctttcttcctttgctgagtttggttaagggaaagggccgattattgagtgggctcagttcacaggtgcctgaaattcctacttagcaatgttcctttccagctgattccgcctccgagagccttaggaaaaaatgctaacagttaggagcgaagcgtccttaattgctcagtccaattatctagatgggtccaggttcggtttcgattcagagataaggaccagggggcggggacgcttccaggtgagcccctggttaggcttgcctccccgcggagcgcacgcgggtctcgctggctggactgggcctttcaagaccaggtaacttctccatccggtatcgccaggcttacctgggggcctcagaattgtgtcagctgcgtctctgagtcaccttggaacccctcgaaggagcgcggggctaggagggcgcatcggtgggcccggggaccccgctgctaggtgtggttggcgccaaggccgcctctggccggcggagccctgcagtgtccggagggtgcggtcagagtccggccctttaggccttgcctcggtatccgccttgccccttgggccgcggcacgggttcgggccgagcgcccggcatcttgcgtttctggcttcctgagacgggcgtgggacctcgaggaaaccactctgcatgaccccacgaagagaactaaggaccaccccccacccttcctgtcctggacggcttcataagccagaggatccagtggcagtaccaagcagggcaccactctgggtcgtgagcacctaagaggtggagcaaaggtcagaccccagggtggcccaggcctccctcccccgcctccccggcggggccattcctcacccgccccagcactggagggggcggccggggtcggtctagttccggttacaaactggacagaaaaggccactggagtctcgctaggcgatgcgcctagtcccctagcctcagacgaaccgcaagaggggccacccacaactggaggggcggaggctggagctgagtttcattagtgtttttggagctgccaggcatttccaggggggtcgccttcctagaggccccctttccccagcttaaccctcggctttgcaggagggtgcgtgggggctggagggtccctggaagccgcagggagcgcgggcccgggtgggtcctggtaccgggtggggagagcggaaccctcccaaaacttggggcgcggggcggggccgtcgggcggtgacgtgaggggcggggccgggccccattggcgggcgggcaggggaggggcggggccgggcgcccgcggcggctgctgcgcctggaaccggagcctggagtgaggcgcagcggcagcggcagcagcggcaacaagtgccggaggctagcagagccaagccggagcagtccctgccgccgacaccgccgggccgcccgtccggggcgccgcgcatggagcgtgagctgcggcggtcgccgggctgagccgcgcggagcggccgggacgtggatgtggccgcgatctcccgcccttgcccccgccccgccgagctggagctgctcccggacaaggtagggcccgggcgccgagcacccccgccggctccctccccgctgccctctcaccgccaggcccctctaccagtccccttccgcctccctgcttcccggccccaccttccggacaccctgctacccccgcccggttcctcgccggttccggcttcgtacccgcgccccggtggaggaagccgtccctaggtggctcctgccgcatttaagcctcccttaccttcccgccgtcccagccacccaacctcagcccagagggagaggagagggacaccgcccgctgcggggctttggaacctcccaacccattccgtgcccacctcgccctggagcccggggaccttccccctcctcgctgcaccccaacttccgggggatccggcgccggggcgatgcgggctttggcaaggggcatctggggccgggcctcctcatccggggcgcgcgggcatttcggggaggggggcgcgcgtgattcctcgctcgcacccccgcaccccaccctcgcactgcgccggcctcccgtgccgcatggggagatcaggtgttttgtgagccaaagagccgccggcagccgctccccaccccccacccccaacctctgccacttctgtctccggctcccccaaaactggtttctgccaaacttagggaaaacctttcgctttgaccttttaaaaaaaatattccacactgtttgcgttgaatgattaaccaggctgctagcccgagtcgtgggggtggggtggggcggggtggggtgggtgctgccaggccagggagcgcctg

SEQ ID NO: 8479 - DNA, 6000 bp, Homo sapiens
tcgtatatggtgtgagatgagggtttaattgcattcttctgcatatggatatccagttttcccagcaccatttattgagagactgtccaaagcaaatttctagtagagttgtctaaagaaacaccagagctagggcaagtagtgacttatgtgtgctgcgctggcccacaaaacacgagtatttaagcagtaatgttactgtggattgaagatggctgcaaattcttgattattcccaccatggagtgatgggatctaattctcctcctttgaatttgggctggccttaatgatttgcttgactgacagaatgagaaagaagtaatgttctgggacttctgaggttaggtcagaagaagtcttgcagcttctacctacatttcttaagacactcactttgggggaaatcaatcactacataagagatttgacttcaccaagattgccatactgtgaggaaacccaagctagccacactgagagagcaacagatgcccagctagccccagcagatccaaacccactagccaaggtgccagtcgtgtgaatgaaagaggcatcttggacattccagactcaatagatgcaatgtgggaaagaaacgaggatcctaatagatagccagaacctaggcctcaggcaaaggaccccaagtgagctgtcctagccatctctagccattaagccaccccagcttggggtttcagtcattgtgaaacagaaatgagacctcctgttatgccctgtctgaatttctggcctataaaatcatgagcataaaaaaattggtggttgttttatgccactcctttttgagatggttgttgttttatgccagcgtggtttaggctggtttgttatgcagcaacagataactggaacagatgctgaagtgagcatttgtattactcagttattgctacaataacgcagtataacacatgactccggaactcagtgggtttcaataagcatttatttttctcacgcatgggtctgtgggttgactggggtgttcttctttaggctgtgaggcagctgggtttgatcagggctgcaggctaaattcaggcacactcctgtctttgttctggtgccaggctgaaagggcagcatctacccaaggcatgctgggtcacacgtatgcaggagtccacatgcgattgtgtgaaaacattttgatgcctccgcttgcatcacatccacttagtccactagccaaggagctaaatggcaaagctcaaaggcaatggggaaggtaaactcctatctaagtggaagaaacaagggaataaattttggctgaacaatactttagcctatcacgggatcagatgacagtagcggtaatgctgtcaggctggatcacttgtaaggcgttgctataattcagtacttacgcatccagaaatcagggaaaacacatataagtactgtgggggaaggtgtctaacacaggaatcaactttttttttgcacaaaatacctacaaacaggaggcatgtaaaattatcaaaagaccaaaaaatgcaaaaggagaggaagaaagagggaaaaaggtggcagaaagtgaaccctttcatagagagatatagtaataccaccaaatgtcacggaggccagaagaggacacctatttcttggtttgcctcacaagtaggcagaatggctacagggcagccctctggagataaaaggccccaagagaccctttcgctaattcaatgacagatatatgtggcatagtataaggcacccccaaacagtgctctcacactcagcaccacacgatgtctagtagttcagggagttccccactcccaattgagggttgactgactgttattgcagctttggagtgcacaggtacagcataaaaagctgcaagcagcaagcagagttggtgcaaagaggattcagaaaggctatgggaggaatgtggtatctgaactgggactggatggagaggcaaaacaatgtggaaggagcacacagcgccatttttgcaggaggcatagagggcacatggctagagagcaggctgaggccagatcatggtaggtctcgaatgccaggatgaggaacacattcttaattcactgggagccactgaaagcttttgaacaagaagtgatatgaaggagttgtcctccaatatcatttttctgtgtttccttagtaacagaaactccaattttttaactgggtggatgcctgtgtaaaacaaaaattacattccctaacgtttcttgcagaaaagaatggtcatttgactaaattcttatcgatgaaatataagagaaataatgtgtatgacttttaggaagtgtttttaaagagagatgccatgccctcattgctctttcttttctgctgggtgaaagctgaactttatcctaacatgtatattactcattaggaagattagcctggggcaaggcaaaatacaggatggttggaacaagaggagcattggaggtgggaagactaattgggagaacatttcaatagcccagataagaagtgaggaaataagaactgagccagtgtggtagcagtgggaatagatgggatgggcagatgtgataaatattgtgaaaggaatctctgtgggacttggcaattcattagatgagagaaggcaccacagagggaagaatcaaagttcgctttgaagtttcacacagaggtgactgggtcatcaattatgttttaaccgaagggatgagcaggtttgaggaaggcaaccatgagtttggttttgaacattttagttgggacgcctgcaggatattcaggtgaagatgtaaaacaggcagccgaagactcatttctggagcatgatttgagagtcttttgcataaacgtggtagtcaaaacaaagggaagggctgattggcaaaacacagtgtgtgtctgtaggaattactctttcttcagtgcacatagagaaatgaactgcattctggaaagccagatataaatatgtgcagctcttcatctgacactacctcccccgcccaccccccccccccccacacacaatccttacaagttctagccaatagctggctggctccaagcaataaaatactcactgtctcaaaatttggacagctccttaaagttccttatgaaggcattttgatttgcacaaatatgtcatgacatgttttaagatgactcctttatagcaagaaatctatagtaaattgccttcctccttaattgaggttagccacaattaagtcttcccttgcctggcacagtgggtggtgccagctaccaaggaggatcccataagcccaggaactgggagaccagcctgggcaacatagcgagaccttgtcccagaaagagaggaaagaaaggaaagaaagggaaagaaggaaagaaggaaggaagggagggagggagggagggggggaggaaggaaggaaggaaggaaggaaggaaggaaggaaggaaggaaggaaaaagaaaaaacaaaagaccacccacggaagtctttaaagaacaattcacaagcagaataaaaaaatataaaaatataataactgtgatacagtaaaaagactcagcagaagtttcccttgtaactcgcgtggccaaagcagatatcaaataaaagatgaaataaacaggaaatccatagaacgtgaacaataaggaaccgttcaggatggccaaaccgccgtctgcgctgttttctcgccagggctcaggcctgggaacggaagaggttaaaatccagtggcttgtgtttcagctttggttacgtggcagaaaccaactggaagtggtggcgtgagagctctgtttcttctagaagagctttgcgtcttaaacgcccataccgcagacagctgcctggcgggcgacccagccccatcctgatggccccaggacacaagcccaggagcgccccggtgcgcgcggttccgcggcccaggggcgccgggtttggtggcacagcgagccccctttctctagcggtatggctgcgttagagccctaatgagcgcgtgcgaaggctccccttattcatccatcctccggtccgtcctttgtctcaaggccggggccttgctgggcaccatggcgtgctttaccgcacaagcccctgaggacccctggaagaagggatcttccgcaggaggggacgcgacggcaggaccgccccgggccccctcaccgcgcccggccccctggcgggagaggccggcgagctctggagaggagcgcgggccgcgcggggcgaaagcgccacccgggagagagggatcctcccctctcctcctctcttctcccctcccctccctcccctcccacagtcctcaggaggaggaacgccgctgcgttctaagttctcccgggccctctggccccgaggactcagatcccggccgcgggagagggcccggcaggtgccaaggagcccgggcggtccttcagcccgcacttccccgcggtcgcccggagccggcctccgttagccgggcgggtaggcggctattggcgccaggattggccggcgccgcccgcgcccccgcggcctcgggtggagcctcccgcccggccgccccctgcggcacccgcgacacgggtggggaccagaggctcccggcggcggctcccggcggcggctcccgggctgtgattggccagcgccacagggggcgggacggcgggcgtgaagtgagcgggctggggccgctggcgcgccctcctacttccccgtctgcgtccgcgttcgcggctcccgtttgcatcatctccagccggcggctgctccagggaggctgggcgcgatcctctccgcccgcggctccaacccgcactctgcgcctctcctcgcctttctcgcacctgctcctgcgccaggcccggagacccccggggcggcttcccagaacctgcggagcacaactggccgaccgacccattcattgggaaccccgtcttttgccagagcccacgtcccctgccacctctagctcggagcggcgtgtagcgccatggagaagagcaacgagaccaacggctaccttgacagcgctcaggcggggcctgcggccgggcccggagctccggggaccgcggcgggacgcgcacggcgttgcgcgggcttcctgcggcgccaagcgctggtgctgctcaccgtgtccggggtgctggcgggcgcgggcctgggcgcggcgttgcgcgggctcagcctgagccgcacgcaggtcacctacctggccttccccggcgagatgctgctccgcatgctgcgcatgatcatcctgccgctggtggtctgcagcctggtgtcgggcgccgcctcgctcgatgccagctgcctcgggcgtctgggcggcatcgctgtcgcctactttggcctcaccacactgagtgcctcggcgctcgccgtggccttggcgttcatcatcaagccaggatccggtgcgcagacccttcagtccagcgacctggggctggaggactcggggcctcctcctgtccccaaagagacggtggactctttcctcgacctggccaggtaacactctccacctctcccagggcccagtgggagacgccagttctcggatgccctccagttcatacacccatatgcttatacactcctaagagttaattcttagctggctgctggtggcgtttaacgttttaaaaatatcaaaatgacgtctggagtttttgcgtgctgaccacacctttgcaaacagctggggcgcaccgcacaatcgaaagagcagggccgcatctttgagcaagaaccagtccccaccgttaggtgggcgtttgttagggaagagccagccgccccgcctgttctttactccttatactctcgcgctgctctccccggtaaaaatgttccgaccacgccccagtggcttcgcctcattttctcccacatggtgcctaaaagcttctgggagcattggttaagttttgcctcttgggtcatccggcttgcaatctatggcc

SEQ ID NO: 8480 - DNA, 6000 bp, Homo sapiens
atgaaacgaactttttgttcagcaagtctttgggtccttttgagcatctgaaatggacgttttaggttgttataaactatggattactcttgactggatccttggtaagaatgtgctcttcagaggcttggctgtgacttaagatgcacagggatgttgtgtggccttagctgagctgggatgcaaaccagattaaacaggatctgcctctgggctgacaatgatataggaaataggctgattttttgcagggctctgaattggtcagagtttgattgggcctgtgttgaatgggtttcatcactgcattggagtaggtgttagcagggctttgggatgggttttggagtgtccgtaaatgagtcaagggacttattgaactgaatttatttttaaggttgacttggttgggctttggatagggtatcaatgggatgctgagttcaaagaggttttgactgtttctaggctgaagttgtggctggcttgacctataagataccatcaggacatcttgctctagcctatggttctgcccctgggcttaattttattactgtatctttgctttccctatcaccaaaagtcaatactcagctgattcagattcttaagacactttgttgttccagatgattaattgcttctgggaacactcacttcactttttgcctatggtggtcccagagactacaggatcctccaagatcctggaaaacactggacctacctgactgacataaaactttatggagagtatcagatttttccacattgtggcaaatatttcttctctagggaaaaaaaattgttttttactcaaatttttttggggtagtctgggttacctggaaccttttctaaaatgttaagaatgcagacaaatggcacttagtgcccagtgagttcttgacagattattaggacagtaaactttgtgtttgacaaccggggaaaagggctcgctcacatgtgtttgaaagtagagggcaagtaagagagagcgagttactaagaggctgatattgtagataggcagggcatatttaataattactgtctcaaggaaggaagcctagtaaattcaggtagaacagtgatcagagtgcaggactaaagccttgagacaatcagtctagtcagacaaactctccaatcttttggaaggcagggaccttgaaattcctggtacctttgaatatcttgggattcttccttgtggcaaataaaacatttgaacatttacaagttaccccttatccccttatcttcttgaaagagagttttctgcttcctggtaacccagcacagtctaacattgttcgcattactttactggaatgctcctttgtgacacagtgacacttgtgccaaatcactggagttttcttagggcttatcctcctgacttccacagcatatggctctgttgactacttcttcctgcaagaaactctttcctgcctaggcttccaggttacccttcaaatgctcccacgtgcatggttaattttctcctgtacttctccaagtccagaaatatccatccacaggctgaacatcaccatgtatatcgttcttccactgccttgaattaaagaagcagaagagtcccttccaaacctcatgtatctatctttataggccttgaaaaggctgatcaacctcttccagaacactggaggccttggaaggcattaggaaccaggacactcccaatcaagtcagaacactgagaattacctcaagaggatggtaacatttgtgtaggaagatcttgacatttatatgtctctgagttgtaaaatcattctggaaaatgctagcaggaacccaccaagactctccccaagccgccttctagcctgcagtgactgacccacctctcccatttctctacaagcactaattatgaggccactacagcctaacaaacaaaggcaaaagttgttgccaatttttgacacctgacaacatcccccgctgagcgaacatgctgggatcacagaagaggcttcatttaccactgttatagactatggacatctttgtcgtatttaaactctccctgcgaataaccatatctctgcagctcaacttcaagctcacttctcaagaatgtttggagaacacctccctacagtgagtgaggctggcacaaagccctctaggtagaagaggcagcctggaatgtatttcctcaggctggagggagagcagggtagaggcattttaagatctagagatggacttctttctagaatcctggaagagaggcagaggcactgggacactcaaatatctgaattcctctcactgcctgtctgccctggaaaataccatctttgtccagaggagcctcttgatctttctccccttccccataaccttgtttcccacagaatatcctctctcctcccacccctggaagaactatgccctcatctatcttggataatggtgtctgtaactttgaagagctctatcaggacaccccctgcttccttccggggtaatttcctaaactattttgcctgtaaagctctcaacacattcctctgtcacctaaactcttaacaacttgagacggccctgggggcatgacggtgagagaagatattcttaatgcttccctgattcatctcacccctccacccgctttccacattcaagctctttcctattccttgccaatcccataaacactctctccatcacattgtcatatcccttttcttctcttaccagctcccaccagtgtttctgctttcccttacccatctgatttctatagatttcctcactgtctttcaagtcatcgagctgcagtggggtcagcatgggttttcaatcctttgaggagaaagaagacatggaagaggaagacttggatggttagggtattttaatctccctccaattatttttttcctgagagcaataattcccaaagtatgggtttaatacattttatctatgaaacaacagtttcatggtcaagtaagtctgggaaacacagttcagcaatttttttcctacagaaattctcaaggctttaatatgatactaggcatatattagttatcttttattatatttaaaattgcccccaaacttagagacttaaaacactaataaaaattcgcttatttctgtggatcaggaatcagggaatggcttagctgggtagttcttgtttgggatctctcatgaggttgcagtcaagatgtcagacagggctgcagtcagctgaaggcttcacaggatgtcaggaacctatgtccaagatgggtcactcacaatgttggcaaagtggtgttggctgccagcaggggtctcagttccttaccacacggacccctccttggggctgcttgtgtgttctcacgacatggcagtgggctctcctacagtgagtgatccaagagagaagggaaaaaccacaacatctctcatggcctatcctcagaagccacacaccatcttcttaattactcacaggtcagtctcacccaaggtggaaggggtgtgaattccaggaggtgagaaacactgggttcattttggaggcaggtcagtgctacgcatgacaaatcttcaaggctgatttgacaacatgattattggttagtggagcattccaagacactaagattccatggtacacatgttgggggaaaccaccatggactgtcacattggggtataagggtctgggaggcacacaagtggaggggaatatgtgtgtctggaggaagaatcctgggaaaacagtacatgcatatgcactgagggctcccagagcggaagacaataggaagctagaactggggtaccactcggaactggggctcagaggctgattctccaatttagagaggctagcacggaacttccctgccaattccaaactgcttggagcgtctctactcttgtaagctgtttacttcctccatcctaaatcaaagatagagagaaaatgtcaaagttcacaggctgaaaagaagaactattatcatagaatccctaaaagatggagatggtggccatctagaaggctcagctgttccatgccgggagcagccctaagtaccacactctgtggggttgtttgtgatggtttcagaccggaccccaacagtctcttttatggtccagacagactaagaccatgtaaggtcactctgatgactcataccacaaaggtcccgtttttcccctacttcatctgcacaatggtttgtttgcaaaggtcctagcctggggagccggagtcaccgtggttggaggaaacaaattctcatccaatgtttagtgaccttatcaaaagatgcaggatagggaaggaaaagaaggaatagaaggactacagagaatggagaggcggtcacggaaaaagaaagggaaagtgcgtgggaagaaggaaggagtaagaaaacacgcacagctcacatgagaatggtaaggacaaggaaatttatacgcgaagcctggaagcgcccccgcccccgacgcactcccgcgggtcccacgcgtgctttcgccgcctttgtccacaaggtggcagcctttgaactttcttccccgtaagaacgcgaaaggggggcagagaggaaggagagaaggcaaagcactgcccccaccaagaacaatttgaaacccccccccccccccatcatatttaaaatctgggacaaagaaccgtcgggacggaactccttccattgcaaaagctcggcgcggcctcgggagctgcccggcggccccggaccgaggcagccctcccctttaaaagaagcggaggacaggattgggatccttgaaacccgaaacccagaaacagcatcggagcggaaaccagaggggaaaccttgaactcctccagacaattgcttccggggagttgcgagggagcgagggggaataaaggacccgcgaggaagggcccgcggatggcgcgtccctgagggtcgtggcgagttcgcggagcgtgggaaggagcggaccctgctctccccgggctgcgggccatggccacggcggagcggagagccctcggcatcggcttccagtggctctctttggccactctggtgctcatctgcgccgggcaagggggacgcagggaggatgggggtccagcctgctacggcggatttgacctgtacttcattttggacaagtaagtgccgcgagttgtcccccccaccccaggctaagcgggcgaaaacgctttcgccccgggccgggctcgttggcagggtcgcctggggacaggagcgcatctccagggccacagagggaccgcgcggcaggcggcggcggagtgctgcgcctttgttggggcgcgctcctcccagcctcggctccagagcccgcagccgaggcgacgccgcttgctcggaaggggacagacttcttttctgtcttgctttctgtgtcccaggagcaggcaaggggcttggaggatgctattgtcttgctgagtttctgtgactccctcccgtgttggtgggaaaggcttgcttaccaaaggcagaacttgcaggcacaggcactcctaaagttagaggcttgggcattttaaagccaatcgtcgcattttgtttttgtttttgtttttttgttttgttttgaaacgctgtcccacggaaggcattatctttgctcctaatcatgtaatgcatacttctcaccgggcactgagtgagaatgaaaggcagggtttcttaaccttggcacttctgagattgaaacctggtaattctttgtggtgggggctgtcctgcgcgttgtaggatgtttagcagcatccttggcctctgcccactggatgccagtaacatcccccgccccccactccttccttattagtggtgacaactaaaaatgcctccagacattgccaaatgtccctccccttcgacttgagtaccccagatgtagtgaattcaagctcttggccatttgactggtgggctaccagggaggtgcaggagc

SEQ ID NO: 8481 - DNA, 6000 bp, Homo sapiens
gtgtgtagagagagagtaaaatggagtagaaacagtaaataaatatctgttacgagatttgactcatgctattatggaagccaagaagtcctacaatatgccatcttcatattggagaatcagaaaagaccacacgttgggaatggaggtggggggggcccaccaggagctcagctgtgatgtccgagagcaggagatgaatgtccagctcaagaagaaagagtggctcttctaacaatcgctgtgtgtggaggctttccttcgtgctgtctagagactcctcaccctctggactaaatccaaaaggaggactgtgcacacagactgacctgttcacattagtcccagagctgcgctcttgcagctcagcagataggccgctcttcactccctgctcaagaggagtgagggctttcagaagcccctgcaccttcatgctgagctcactcctttccattgtatcagcagccatgcctgaacaaaaaatagtttctatttattgagtgtttactgtttattatggtagattcttgggaaattgaaactctctgacactaccattagtttttcttcttaggggaagcagatgaaatgaccaggctgttaccagggtctatggtccttagcaagctttgcaaagatctgtggtttttacagaagacagagaacatagaaataatgtagtgtgttcacattacctctttggcgaaaaacctgttgttgttgtttttctattttctgttggaaaatagtatcaaacttgtcccttagtttctcagtgaaattggagagccacctccctccctttcgtttctgtcctgaaacagtaaagtagtaaaagtggcctgaaaaccacccctctttaacagtggttggttgtgttgacaaagccttggtgtactcgtttcctgtggctgctctaaccaattgtcacaaccatggtggcttaaaaacaacaaatttattctcacagttttggaggccagaaattcaagatcaaagtgtcatcagggccacaagaacttgttcttttatagcaagaaacagaactgtgcttcatgctcaggagttggatgttgcagtgagctattttgccaccgcactccagcctgggtgacagagggagactgtctctaaaaaaattaaaaataaaaagaattgcatttcaagttaacctaagtaaaatgtgcagcgactcactataaagacactgggcatgttggtctggatccctggctgctagctacagcagccaagcctggatatctgaagcaagagaggatttcagaagagctttgggggctaacagaatggagggaggttggagaacttggctttggttatggacaggactcgcacagcaggcgccctacctggtcatttgctgtcacacggcagctgccatgtctgacttcctgaagctcaagaacttgtttcaagtcttgggagagagcatccaactgtctgagcctaggccacactgcccagtgacacagagtgggaggccctatctctaaagcttccagaaaaaaggcaggcacttctgcccaccaagaggggtgggaaaaggatgttttaggaagagggagattaaaagctggaagccaaaaatggcaaatatccaccacaaggactatctcagcactcacaggcagggagactcaaggaatgagagccaggaacaacaaccagaagggtctctttctggatcttgttttccccacctcaccccctacacgtgatctctttttctctgactgcgaaactttctccacttcatgtgcggggccccttctgagcctcccattttattcatctcagctccagccacacagaagctagcttctctcagtcccaattccacgtttttgggagagagaatgtgattgattcaggttgggtagtctcagagaaagtgattcttttaaatagagaagataccccaaacatgtcctacaatttgggggcagacatgctcactagaggtttatttctgcacagactgggctgtgcagaaaaagtttgaagacagccttctgtatgaataaagtagtgaagttgtgaggaaggtgtttaacctatacagaaaactggctcttttcttttttttttttttttttcctgagatggagtcttgctctgtcgcccaggctggagtgcagtggcatgatcttggctcactgcaagctccacctcccaggttcacaccattctcctggctcagcctcccgagtagctgggactacaggcgcccgccaccatggggtttcaccatgttagccaggatggtctcgatctcctgaccttgtgatccacccgtctcggcctcccaaagtgctgggattacaggcgtgagccactgcacccagccaaactggctcttttcaaatcactgtagccacaccatatttgcaagcagctagctgcttcttaggtccaattttagctctgccacagagcaggttcatgttactttatacatctgaatagagccaaactgtacttctttaaaaatagaccataatttgggctttccctacatcaacagggcctcctgcccttcttcccaaagcaattaaattttactccctccttgctatctttctgtaaaatttgaatctgaaaaatgcttgccacagacaaggtaccaataaatgttggtaaatgaatgaatgactgagtcaatcaatcagttgctacatccgagccaaaactgttttctccagcaacacataatggccaagttctgtaatgggaaacttgattgcttcatctgctcttgcagaatttcctttcttcctcctagctttgccttactttgcgccatcccccttttcacaaccttggtccaagtcaccatcaactctcactctgaccctctgctgtagcttttaactcttcacttccactctgatcccttgcactgtattctccaaaggcagcccaagggagcttttgagaagtaaatcagatcctgccactcctctggacttagcaggcctcaggcagcttcccccaggccctgcatggtgccctccagcctgcctgccccattccacaaccccttaatctacactcctctcctcccatggccttgacagagcgcttccttctttctctctggaatactctcttccttgcccccacctcagtcctgcccagtgaactcctagctgaccttcagatctcatctcaaatagctcttactgtcctgggcacgcgatgaggactccctgctctctgttctcacactcccacattttctgtcttttatggcacttacatatttgtaatggtatgtgactgacgtgattattccataagtgtcagtttccctcactgaagtggaagctctttgaggttagggactctacttgtttgctagggctgtcatagcaaaatactgcagactggggggcttaaataacaaaaatttatttctcacacttctggaggctggaagtccaagatcaaggtgtagtcagcaggcttggtttcttctgaggcctctcttcttggcttgcagatggccgccttttccctgtgcccttcacatggccttttctctgcgtgcatgcatccctggtttgtctgtatctaaatttcctctttttataagggcactggtcagattggatgaccctaatgacctcactttaacttgttcacctctttaaaggtgctatctctaagtagaatcacattccaaggtactggaagttgcctttcacatagaaatttcgagaggacctaattcagcccataacacagactgtgtcacttgtgcccaccactgtgtccccacccaggacagtgcctgacttattttaggacttgacacactcccattaaatgaatgattgcatttcagctccccccttcctcttcctcttcctctccccaccccccaccatacgttgtgctaaaggcaaagaaaagaaggcatagaccactacagaaggaccctaagtgaccacaggaaatgtttgctaccctaatcttgaaattacagacctttttttggggagtgttgctctcttctagtatctccctatggggaaaaaaatcagccacctgtcagcggccagcccatcctgccctgggtgtgtctactgcccccaggggctgctgtgggagttttgctgacagctgcacacccatccaactggccctctttagagggtgagtcaacaggctgccgggagtgtggatctatctgcaggaaggcagtttagcaataggtactagaacctaaaaaaaagtcatatcctgtgaccttacaatctaatctgaagaactgggtggggggagggggagggctaagatgagtttatatcttttttattaaaaagaaactccctttctcactattatagtagaatctggggagagcctaaatgtgaaacaagagaaagtttgtgaatctagtacattcatatgacagacaattatatagctattgaaaatagtgtttatgaataattgtttaatgatgtaagatgttacatgaaaacgtgggacacagactgcattctacactcagatatataataaatactgcaatttacatgtgtgtatacattcagaggagaaagcctgggctgccaaatacccaaatgttaatatactattttttcagaaccagagatttctttctttatgctttttgttttaaaatggcatgtgttgcttttaaagccagaaaaagggggcaaagtttttaaggcagctgccttgcttgtcaatgaaattctcaactccaggcttctcttagggaaagaggcctccccaggatcccccgtcctaccccgggcggtcgggttgagttctggagagactgctccaatccccgaggcggaaggaggcaaccgatttggcgcagcactcagccagggggtagaagctcaggggaggagccgagcctttctcctgtccaagagcgagatctgggctacgccgggcgcccggagccctagtccagcccccggccatcgcggccgccgcccagccaggtgcaaaatgccgtgtcattgggagactccgcagccggagcattagattacagctcgacggagctcgggaagggcggcgggggtggaagatgagcagaagcccctgttctcggaacgccggctgacaagcggggtgagcgcagccggggcggggacccagcctagcccactggagcagccgggggtggcccgttcccctttaagagcaactgctctaagccaggagccagagattcgagccggcctcgcccagccagccctctccagcgaggggacccacaagcggcgcctcggccctcccgacctttccgagccctctttgcgccctgggcgcacggggccctacacgcgccaagcatgctgagggtcttcatcctctatgccgagaacgtccacacacccgacaccgacatcagcgatgcctactgctccgcggtgtttgcaggtaggaggggccgaccaccctcgcccggggtcggggtggggtagaggaggggacgccgcggctctcaaccctggagagcacctagagctgagagacaggagactttctggccccgccagactgacgttgagtgttgcaacgacacaggtctgcagagggcgactcagagggaaactgaggctggaaggagagaggtgtctgaatggcgcttctcctggaagcttcagcccaggttggtactgaggtaggccaggaaggtgggaccagcatctctcctctcaccttttcgggatctctgaaaagaggtctttctgcgttgccggcggcgaagcgctgtactgcagggctctcctccttctcccctgaaggtctggtcccaggcctatttataacccagctctcttcccgccccgatctgcgcctggctgctttcctggccctttgctctctctcagaggctggcctggcaggctggcagccactggaggcgaaggcaccctacccttgctttgcgcacaggatgggggaaatttagcagctggg

SEQ ID NO: 8482 - DNA, 6000 bp, Homo sapiens
ttaaacaatatatacacattaaaaatatttccaagcatgcgtaagaactcattttccaaagtggtcatttttcttggagatgagagagaccagtcttcaaacaaactgtagggggagctccaaaccacagattcaccttcatgttactggttttacagtagccttcttaagaacaacttcactgggtaattccaactccagctgaaaaggaacatatatgcatgcattcataatgcacaaacttaaaagatcccagtgcatttgctacatttccctttatttgaatcagctcattctatatctttttcttcccaagtacttttcaaacctatttgtcattttatattcccaatggactcatagcaaaaattttaacaatgtgaacaatttgtttttagtacacactccatttctgctttcatagcccctccattcccaagcaatgttcaagataggctgttttagtgtctcaatgcatggagctcacctagcctccccttgagaatattgctcatcttttaaagaattttttccttctaatggctctaaaccttcatccacggaagacttaaaacaactggaactcagtttttcttttttcttttcttttcttttcttttttttttgagatggagtctcactttgtcgcccaggctggaatgcaatggcacgatctcagctcactgcaacctctgcctcctgggttcaagtgattctcctgcctcagcctcctgagcagctgggactagaggtacccactaccacgcccagctaattttgtatttttagtagagacaggttttcactatgttagccagggtggtcttgatctcctgaccttgtgatctgcccacctcagcctcccaaagtgctgggattataggcatgagccaccatgccccgcccagtttttctttttcactgtggtagacccatgccagacacagacccatgagcttgaaagatattcaataaacacttgctcaattaataaaggcatctagcctttaggctttctgcttctagctctaagtgccttgcagagaagagtgggtcccaaaagcataacggtcattgtttttcattgttcatctcagtaatcagcataattggctaattacattcctgtaaatcattttggggacagtgagacaatatttatctcaacaacatttgaacattcaacaatgttcattgagtgtcacatctggtttcgcaagccattctaggcagtggggatagagctgtgagcaaggcagaaaaggatcttaactttctggaaattatattctagtggggaatgaaagacaataagcaacccaaatcatatcagacagtggtaaggattatcaagacaattaaaataagaccaactaatgaaggatgactgggtggctccttagaatgggtggtcagagaagttctccttgaggaggtaacatgtaaactgagaaatgaatgatgaggcagagccagccaagtgaagatgagggtaaaagcatcccaggaaaaggagtcagctatgcaaaggtcttgagtggaaaagcagatgtttggatggtgtcggtggagagtattaagcaaggagattgggagatgaagtcagaaaggcaacaggggccgagtcactctgtaatccccagtaaggagtgtggatgtttattccaagtgccatgggaattcactgaagagttttaagccgaggagtgatggaatctgatttttgctttaaaaagatcattagtggccaggcgtgatggctcacacctgtaatcccagcactttgggaggctgaggtgggtggatcacttgaggtcaggagttcaagaccagcgtggccaacatggcaaaaccctgtctctactaaaaaatacaaaaattagccaagtttggtggcgagcacctataatcccagctactcaggaggttgaggcagggagaattgcttgaacctgggaggtggaggttgcagccgagattgtgccactgcactccagcctgggtgacagagcaagacttcatctcaaaaaaaaaaaaaattagctgctgttgtaagaatgcattgtagtaggtaagaatgaacgcccttcctgtactaatgcaattgtccctctaggtatgtcacttaacacaagagtaccaaccttgcaagtgaaatacacctagagtcttccttgtttttaccctccctgacccccgaactccgctgggtctgtatttttccttttcttctttttgctttttagcaataggagtctcactatgttgcccaggctggaatgcagtggctattcacaggtgagatcatagcacaccacagccttaaactcctgggctcaagtgatcctcctgggttttttgtttgttttgttttgttttgtttttttagaggtctcactctgttgcccaggctggagagcagtggtgtaatcatagctcactatatcctcgaactcctgggctcaagcgatcctcctgtctcagccttccaaagtgctgggattacaggcgtgagccagcgcacctggtccaggcctgtgttttctaaaccccgatgttacatttcagattaagaacttcaccttctaggcatcttttgctgctgcccaaaaatgagcaagtaggaatgagcatgcaggagtgcaggagacctgacgttggcatatgcaagcggccagatggaggctgctatattcaggaaaagtgttcatggctgggagtgagcaccggaaggaaagagcatctcaattcctaacctggtctagtctgccaggtgaactgctgaagcctatttgctgaaggaataccttccacgcttagcctccaatctttagggcaggggtaggtaggatattctcatcagttatgccaagaatcttttatagctttgatttcctgattgtgtatacaaaattgtttagtttttaaacttttccagttaaacaagaaatgaggaatgtaaaatttttaccttggccaagattttcttatttcaggtccctagaaagctgagtattgaactttgccccagatatcaaaaactctggtcaacatttacaaattctctccctaaaaagactagatcctgcttcctatattcacttagctattaccttaagaactgctagcaactgggcatattaactttctaatatcaggaacagcctctatgtggcgctagctatgtttacgactatgcacaccccttatatgtgtgtctcagttatagcttcttaaagtcttctcatcataatcttaaaatctaggatgtttgtaaattttctttacttgttaagctaaacattataaaaaaaagaactactttagagattgtgctgaatgggagcagatgcccctccctaccccaccagctgtacttctacctgtgcttccaccattagagtatccacctgctgggtttgtttgctgatgtatccctaacacctagaacagaacctggcacatagtagacactcagtaaacatttactgagtgagaggttgaatggatcagattttgacctgtgttgcctcctgccaggaccccatctgcactataatgcccacccaatgaccagcatctccagtgcatcaatttctttaggcccaacccatcatgtttacattctgaagagagtcagtagagagagttttgaagacacagtagagtgccctatacaattatcttcccagatttatctgcagtagatccatgagagttgatagtagacccatgcacattaatgcttgctgggggcagaaggggaggtgatatgatgcaagcaagtactttcaaccctaagtctgaaaagttgatgactacacaaaatcacttcaggtaactccaacagaaatatacacaacggaggttgggagaaatgagagatctggaggctggctaggtggaggaggcaacacctgaattagggatttaagctagaccttgaagaataggtcatgccatcacactaacaaactcacagggaggctcccaaattttgggaaagtgtcccccagagacttagacttttaaaccaaagcctaatgtttcacaaagtcttctgagacagaatgattagcaagcttgtaggacctttttgtaaagaggatgtatatggattcgtacagacacacatctacatgcagaacgtgccattctgtatttgatgcataaaaccaccttgtcccggtctcagggcaggaacagtgtcatacagatttttgtgtctccactgcttttgcatagcggctcttagagattaaacgctttttttccaaatattttataggttttttgacattaaaacgttagtctcatctgggtgcggtggcacacgccagtaatcccagtactttgggaggcagaggcaagaagatcgcttgagccctgaagttggagaccacagtgagctatgatcacaccactgcactcctgtgacagcctgggtgacaccgcaagaccctgtcttaaaaaaaaaaaaagttagacttatgttcttttctaagcaataaaattagtcttagatattgcctaatatctaagactaccaatttttgtgtagaatgtaatacaagctaaaaaatacattcgaaagactttctgtcccccaatttataaatcctggttagtttagctaagtctgcagttgtgctgggatcagcaatccctccttaaatgcaggagtattgtgagtgtgatgagggactaccccaaatcaaaataattttaaaagcaaaccttagcttgctaattggttccactttcttccttgttccttttcctttaccaagatggccgctgtgtcgttcgctcctcattggtcggattttccgcaggtgccgattctagccccacctactagctctccgttccaagtcctaaatcactgggaatgtaatagacagacgaacgggagtgggcggagcgggcgccggatgtgacgtttccggaacctccgggtgtcatccgcggggaaaggtggggaagggtcccgggaacgtggtggggcagggcctccgagcgtggttggactttgaaggggatcggccgccgtgagtgtggggcctgcagcctactctccccgagtcccctgcccggcctgcctcgctcgaggcacccgacggcttctgtctccgcgggctggcgcctgaccagccaggcccagcggttccccgcctactgcatttgaaagatcccgaaaaccctggatgattgtgcctggggttggcaagttcgtcttgagtgccttcaagaagggttcctcaagcagttgtcgatagagccctccctactgtatacgccccctccgctcattcctgctacttcctttctcctcctcgtatttccccctcggtcctttacgccgcctttccccctcatttgcagatgctgcatcccctttttggaattgctcaaccaggtggtaaccggcgccgcttcctggccttgggaggtggttcctttcttaacccacaagaacctctcccaagaggtactgagatgcaacaagcatcctctgtttcagttaactttcatgggccgtggactaggtttactaattacttggggaggttttagatatgcttgcggctttctgagtccctaaggaggcctcgtgagagatggactatctctgcatccctagtagtcctcacggcttttgtgctattagtgagggtgttttagaggggaaggtttgtggaggaattgtgacccgaatattgaagagacctaaagatggaattggctgagagaagactacccctgagggaagagttgtagtagaaaagaaaaactggatagataaatgaaactgaaatgtgaggatgcctgggcggattggaatcctgactgaagcaaaagatctctgttggggagggccagttgccacagggccttgaattccaagatttattctactgtagtttgtgtattctagagcatactgattagggtttgctgtaatgcaatgtgtgtcaaatgcccagttttattttggag

SEQ ID NO: 8483 - DNA, 6000 bp, Homo sapiens; identical to SEQ ID NO: 887

SEQ ID NO: 8484 - DNA, 6000 bp, Homo sapiens
gtccttgtaaaaatattttgatcatatcattctttgtcttaaaaatggcttatgtttccttttcggttagagggtccattataactgaccccacctaccttactaggctcaaccccagcattacctgtcttactcccctttgtgttgctataccagaataccacagaacaactaacttgtaaataaaggaaatgtattcttaaattctggagggtaggaattccaaggttgagaatcccacatctagtgagggcattttttctgtgtcatcccatggcagaaggcagaagggcaaggggtacaaaagagcaagacagcaatagggagctgaactcacttttacaacaaacccactctctcaataactaactcatttccaagataatgacattaattcatttatgggggcagagcccttatggcctaatcacctcttgttaggccccacctctgaacactattccattgggtactaagtttccagcaaatgaactttgggggacgcattcaaacttgagcactagcctcactccaaaccataccacccattgctcctacctactattaatttctttccgtaccctctatagcatttattaaaaatatgcaaagaactgtaccagaaatggggactatgacataagaattgttttctgagggtgataaactataatggtcatgagaaagcaccttgcagactttaaactacaaggagtgtaactgaccaagggcatcagctgctgccttagaaatctactgccacgactgggctccgtggttcacgcctgtaatcccagcactttgggaggccgaggcgggtggatcacctgaggtcaggagttcgagaccagcctgaccaacatggagaaaccccatctctactaaaaatccaaaattagccgggcatggtggtgcatgcctgtaatcccagctactcggaaggctgaggcaggagaaacacttgaacccgggaggcagaggttgcggtgagccaagattgcaccactgcattccagcctgggcaacaagagcaaaaactctgtctcaaaaaaaaaaaaagaaagaaaaaagaaatctgccacatttgcatggaggccatcttcccagccactgactgaatgtggtggagatactaaggcagacccattcctgggaaacactgcacttctcacacagcactcctcacacagcactcctctaatgggcaacattggcttgatgattccccaacagtcttgctgaactatactccagtatggagtatagtatgtggaagaggagtgtcaaagatgaagcaggagagataggcaaagggccagaacatatacgatctgtggactatattaaagatttcggatcttatctcatagcaaaggcggggtgggctggaatggggagataaactgaagtgtttaagcagaagagtgacatgatctgatttgtgtactggagagaacattctccctgcctccctgccttaaaaggaatggattgggggctgaaattggggtggtggcagcagggcatagggacaagacaagagtaggaaggagcccaggcaagagaagatagttgtttgaattagggtattggcagaggggatgcggagatgtgggaggaagtatttaggagttaaaattaacaggcctttatgattgatttgattaagaggaatccaaaatgacagggcctagaacatagtaggcattcaatgaatacttattgaataaacaaatgcaaagtctctggcttagacagctggaaagacagtagtgctatggggaacattggttttagcatccacacaattaccaggatgctatgagggtggggacgatagttcagttttggacatattgaaatcaaggtgcctgtggttacactgtgtggaaatgtccactaggcacttggatgtgtgtgtcagaagctgaagagaaagatatggcctagaaatgtagatttagaaaatcattattaactaaattagtatgaatgagactacatagaacagtgattttttttttcaaagtggggatctcaactcattaatgaatagtaaaatcaatttagtgggctgcaaccagcatttaaaaaaatggaatagaataaaatgcaacatgatagggaaaaaaatgagaatttagctcctgaagtaaagataaatataatgtaagtatgactttgttaaaaatttaactcactaatatgtacattgggtacatgaatgcatgtacttaagtgcaattaggttgcacaataagaacctcttattgtatgttttgtgaaaaaaattgaaaaaatattaaaaaaatcaaaagacaaccaataagtcatgttcagagaagggactaaggcctagactagactgctgagaagcagcttaggaaaggcatatagtgggctagaggaagaaactcagacggggggcaggggttccattgtgttgaggttggttttagaaagaagatttcagagagaagattagaagtactgatcccaaatgcctgattttccctctaggctaagcaatttgaattcaaggacaatggctttttttttttggcaggctagagtgcaatggtgtgatcgtagctccctgcagccttgaactcctgggctcaagtgatcctcctgcttcagtctcccaagtagctgagactacaggtgtgtgccaccaggccttgctattattattattttgcagagacagggtcttgctatgttgacgtggctggtctcgaactcgtcttcaagtgatcctcctgcctcagcctcccaaagtgctaggattacaggcatgagccaccatgcccagccaacggaccatgtcttaatcttatctctagtacttagtaaaatgcctggcacatattaggcccttaataactgttgaaagaacaaactagaactagtacttgcactttagaaagattatcctgatggcagtctggaaggggagggactggaggctaggtttttgttttttaaatgaaattatcacacagtccaggtgaatgatgatgatgtcctgaactatgatgataatggaaagaaaaggatggatttaagttactttttagtcagatttataaggacatagtgatttcttacatatgggcatggtagctagtctccaagaaaggaggctgaaatccttgtattcccagtgaaatccctgtaccacctggtgaagtccccttccacagtgcatcagggctgccctgtgtgacaagtagaatatggccgagagattgtgtgttacttctgaggctaggtcacaaatatatcatttgctcttttgccttgttcttttggatcacttgctctgaggaagtcaccccattttgtgaagacattcaagcagccccatggagaaattcatgtggagaacaaccttcacttactgccaacagccactaccaatttggcaggcatggaagtccgccatcttggaagtggatcctccagccccaggcaagccttcagtggactgctgccccgtttgatatctggactgtaatcttgtgagagactggaagccagaccacctagctaaactactcctaaatttctgacgcagagagattgtgagagataataaaagtttattccaaatgtctgattttccctccaggctaagcaattcgaattcagggaccatgtcttttgtttgtttgttttaagccaccaaattctgaggttaatttgttacatttgttttgcagcctaaataactaatacaatgggggtgaaagaggagaaagcaaagactacctactaagtgcagactaagtgcttgaagaaggagctaggggccgggcgcggtggctcacgcctgtaatcccagcactttgggaggccgagacgggcggatcacgaggtcaggagatcgagaccatcctggctgacacggtgaaaccccgtctctactaaaaatacaaaaattagccgggcatggtggcgcgcgcctgtagtcccagctacttgggaggctgaggcaggagaatggcgtgaacccgggaggcggagcttgcagtgagtcgagatcgcgccactgcgctccagcctgggcgacagagcgaaactccgtctcaaaaaaaaaaaaaaaaaaaaaaaaagaaggagctagggttgggatggaggagatagtgagttatcctcaggacctatgcttgccttgtttataggatatccaagtggatatgcccataggcagtctttgttcctcgccctcaaaggcctaccaaccctagaagaatcagttcaaatgtcacctcttctgtgaggccttcctgatttcctctggcaaaacctggcccttctgcacacttattgcacgttattatagcaaacgtgcattgcttcgtattgcaattatctatttgcagttatttgcttacatttggaagccccattacagtgtgaactccctagggcaagggccgtgatttttagtattttctgtataatcgtgtgtgtgtgtgtgtgtgtgtgtgtgcgtgtgtgtgtgcgcgcgcgcgttacactgtgcctgcccagcacataggcagccgtccttaaatgcttgcaaagtattaattttgagaaacttggtgcgtgtatccacgtcctcttattagtaagttttccttattagtacagctatgggcgtttgagtttttggagtggccggagcaaactcgccactcgaggtccctgagtggcagccccagcgcacttccgaggcagaactcccaccttcacctgggtctagctccgcctctgcctgggttaggcctctcctcccctcagccccgccttcactcaatcccgattggctggaggaagaaggaggcccgaccattggcccctttctgagggggcggagccgggcggtgtttcatccctcagcctcaggctgagccggaccgagccgagaggacccgagtggggccgaggccagtagccccggggccctgagcagaggccgtagcttgcgccgcacccgcggccaggcggagccaaagatgccggcctctgctgcgcggccccgcccgggtcccgggcagcctacagcctcgcccttcccgctactgctgctggcggtgctgagcggcccggtatccggccgcgtcccccgctcggtgcccagaacctcgcttccaatctctggtaaggcgcggacgcccacgccctcagcccttcgcgcccacacccacacccacacccacctgctcctcagaccgctcggccggacccgggcctctcagcctggtgtatggcgtttcacgccgcccacgccccgccgggaccggggcgagatcttcgcacttcaccgcatcctctctgcatccctcccgcgcccctcagcccctcatccccagcccgggcctcgcgcctcggctcccacgacacgcccaggctgcaccagcgggccctattcccggagccgcaggagcgtccagtcctcaccgtgcagactcggacactgaggcccagagctcgggtgggggctgcccgaggtcgttcatttcgaagttccgtctcccttagtcccctgtttccccgcacatacacctgggtccatcattccagcttgacgcccactctgctttcagacccatcagtctttcattctactccagctttccattccgatctccaggtcagcatttccatcttctccaattcatttccctatcagttctatacatcatccgagcctcttggcccttctgacagcccttcccgctcccctgacatctctgacagcagctcccattctcccattattggatccacgttaactctcttaacttcctcagtgttcctcgctgcctctgcccattccctacattgaatattggtaaaccattcaatgtgttgatgtaaagttctgcttaaatgatttttcaagtcttcagaaggaaaaatagaggagggggatatgatcctttgaaaagatgtggaagaagctaggagacgtcacaaggttaaaagtgatcattggggcgattcaca

SEQ ID NO: 8485 - DNA, 6000 bp, Homo sapiens; identical to SEQ ID NO: 2082

SEQ ID NO: 8486 - DNA, 6000 bp, Homo sapiens
gctggggacattggttccttgccatatggacctttccatagggcagctcataacaggtacctggcttccctcagagtgaagcaaaggaagtaagaactatcatagtcagtgcatttgtgtttttattttatttttttaaatttatttattttttcgagatggagtcttgctctgtcgcccaggctggcatgctagtggcgcgatctcggctcactgccacctccgcctcctaggttcaagtgattctcctgcctcagcctcctaagtagctgggattacaggtacgccaccatgccctgctaatttttgtatttttagtagagacggggtttcaccatgttggtcaggctggtctcaaactcctgaccttgtgatctgcctgcctcggcctcccaaagtgctgggattacaggtgtgagccaccacgctcagctgtgtttttaaaatagtgtattgattttcattgtaaaaccaaaatgtacctattacagaaaatgtagctagaaaaattgcaaaagcagggaacacgcttaatctcaccactccatctatgctttgtgatacttaatcataaattctatgtctaggtgaatgtccagaagagtatgccctaggctttattctaggatttttgtagtttgaggtcgtacatgtaagtctttaactcatttggagttaatttttgtatgtggtgagaggtagtggtctagtttcattctttggcatatggtcagccagttttcccagcaccgtttatcgaataggatgtcatctccccactgctaatttttgtagactgttgaagattagttggttgtaggtatgcggctttatttgtaggttctctattgtgttccattggtctgtttgtttctttttgtaccagtaccatgctgttttggatactgtagccttgtagtatagtgtgaagtcagatcatgtcattcctcctgctttactctttttgcttaggattgctttggctatttggactctttttggttccacatgaattttagaattgtttttttttctagttctgtgaaaaatgatagtaatttaataggaatgtcgttgaatatgtaaattgctttgagcaatatggacattttagtgacattgattcttccaatccatgagcatgggatgtttttccatttgtttgtgtcatctataatttatttcagcagtgttttgtagttcttgttgtagagatttcatctccttgattaggtgtattcctaggtattttatgtttttggtggctattgtaaatgggactgcattcttgatttggttctcagcttgaacactgttggtgaatagacatactactgatttttgcatattaattttgtatcctgaaactttactgaagttgtttatcaggtctaggcgtcttttggtagcatctttacggttttctaggaataggagattctttttttggatgtgttaatacatgaatcagattatagtttcctcttgctggcatctttaaaataagttttacaaaaagcttttttttttaattaggtgaaggatatgttaattagctaaactgtgataatcatttcacattgcatacatatatcaaatcatcatgttgtacaccttaaatatatacaaatttttatctttcaatcatgtctcagtaaagttggaaaaaaagaattttattatgatctatacatttatctgcaaactttatgcattatcacaatttaatccttataccaacccaatgaggtaggcatacctctatcctattacccatgaagaagaaaaggcagagatgggaacctctctcaaagactccagttagtacatttcagaaattttttttactgactctacctcacaaatagatggagagacagaaaaaaaaataccactttctatctctattgcctctacctcaattgttcccaaattggaacaactatcagaatcaccggaggatttgctaaagcacagatcactgggttctgtgcccagagttttaaattcagtaagtctgggggcgggacctgagaatttgtaattttaacacgttccctggttgtgctgatgttgctagtcaagggctcacactttaagaaccattttttttttttctgttccaggttagcaccatctctcttttggaatatttcaataatttcctgcttcccagccattttctaaagtacaatcagaatgatctatctaattttacttagaaatatttattgggtgccagatactctactaaatatagaggatgtaataacaagcaaaaccgacaaggatcctgatgtcacaataacctgaagcagccagtttgcctggaatactttcttcccttggctgaacattatgtaatgatgttcatgatctcctttccaagggtgtaaaacacagaagtaaataattaaagttctattcctgtgatcagctcataaaatggttgagccagctctgtgctctttgattttgctctatgaagttgtttaataacaacttaagttggaataatttaaactccagcttgttctccaaattaagataaggtcaaaacggcctgatatatgttggatgagcaagaatacgggagaaaattagataagattctttaggttcattcttccaattttgtaaaactctacacaactattccttcatctgtggaagaggagagggcagcaggagtggcttggcaatgtctagtaaatcctgctgtcctcctgtgaaggtctgtcttttatttctctgcccctacctttaggaccaatcccagcaagagtgaaggccacgtgttctgggcatggttaatacagaaaaatcttcaccactgccagtcatgattatctttgcctctcctcccttttactcttaagggcttgaagtctactttttcgggtaggtagaagagccaaaatattgctcatctgaaattttggttgtgagattccttgtcatttatagaataaattcttgttctaatcaaagaagctagagttaaaatagaaggccctgtctttcttcacagcatcttgaattctgtgctcaaaacatggccctgttcctcaggctgatgtaacagctcatgttcttcaggatggcaagtcagagtatagaggccaagctgcagaggttggttgcttttatgagcatttgacttctgtcaaaagtaaacagtaaggctttaaactggggaaaggaaagaacagggtatgcatttctgagccatctttttttggttgctgcgtgaaggactggaggtaaccagaggcaagaagactaatgagaaggctgttgcagggatctccagggatcctgaagagagaaaatatgttgacctagattggaaatatggatgggaggatgagaaagtatatggattcctgagatatttgacggtgtcaggcatagtttttggaacttcatccaggaggagacagggaggaatcaagaatggcactgagatttttggcttaggcaagagagtggatgctgaagccattccttgagatagccaatactgggaaggaagtctggagctgaaaaagatgaactcagtatggataggctgaatttgaggtagctttgggacattaatgcaactggaatgactattatgtagttaaattatcacattactctaagtgttcaatccttatataaccactgctgaaataacaaattccaaatttctttttttgtgtgtgtttctttttctgtttttttgagacggagtttcgctcttgttgcaatggcgcgatctcggctcactgcaacctctgtctcccaggttcaagcgattctcctgccttagcctcccaagtagctgggattacaggagcctgccaccacacctggatcattttttttatttttggtagaaacggggtttcactatgttggccaggctagtctcaaactcctgacctcaggcgatctgcccgcctcggcctcccaaaatgctggggttaaaggcgtgagccactgcgcccggctgtgtgtttgtttcttagagatacggtctcactatattgcccaggctggtttccaactcatgagctcaagggaccctcctgtctcggcctcccacagtgctgggattacaggcatgcctggccacgcccagtcattttccaaatttcttaacaagacttacaatttaccttttccagctttacttctcccacctatccatacccacagttgcccagcccaaattcatttgggttcctcaaagggttaatgctttgtgtagtctcaaggactatgggccagcagttctgtcaggaactattctattctcttttctgtgcattcagcaaagaattagaaaaattagctgggcgtgatggtgcgagactgtagtcttggctactcgggaggctgaggtgagaggatctcctgacatcaggagttggaggctgcagagccatgatcgcgccactgcactccagcctgggtaacagaggaagaccttgtctcaacaaaacaaaagatgttagtgagggcccaggtaggtgctaggtgctgggataacatggtgagcaaaaagaagactttatcccttcccttgcctcattatagtataatggcagatttaaatactaatctaataattacacaagaaagaattgcaaatgagatcagagctgccaatcgaaggcacccagtgggaaagacggcctacaatgggattttcgcatagcgaaagcttgtctgagaagatagagtggattcatagggggaggaaaaagctttctaggctgggagaacacccctgtggaggggtgtaacttggcgcattacgaggaactagagaaacgtgcacttttcctaagacatcaggaaaggagcgaggagagacttatccattttgtcccatagcagccgccatatggtggcagacagcaacaacctcgtcgcactgattactgggagctgtagtcttgacgtgagctagctggcatggcggcctgcattgcagcggggcactgggctgcaatgggcctaggccggagtttccaagccgccaggactctgctccccccgccggcctctatcgcctgcagtaagtggagccggacttgcgagctggggcgcgttaggggcccagggtcaggatgggggaggcgaacctggagatcagaggcaaccccagcgttggtcccccgtgggacgccgggttgggggagattgcggggctctgcgggatctcagggttggcacgagagttctgacctccgtcgtccgctcccgcaggggtccacgcggggcctgtccggcagcagagcactgggccttccgagcccggtgcgttccaaccgccgccgaaaccggtcatcgtggacaagcaccgccccgtggaaccggaacgcaggtgaggcactgccctggcgctaggccggcaactggggtcggtgcgcgcgtgagcgcgttcgcgttcgaggtcccggctctaaggtgggggctgcacctccccctgcacgagcaggtgtgtaggattcaagagccagcgcaccacactgttctttctttctcacttctccccaagccagcattgaacttctttgcagttttattgagtcagaacttcaagtaggggttccccatattttaaactcttttctctgtggtatttgtcctgtaccagagtttttctctgaggtatatcctgtttatacctgtttacgtccaagagctcttcttttctctcaaaagacccttaaccctggataggaatcgattggccaacttaaaaaatttgctatggtttaggttggaagttttggcagacaaagcacagtaaaactggccactaaattgtgtctgaaacttactcatcaaaatagtgtgaataaaaacttatatgaatggtggtaatcttggaggtacatgtaaatttaaaggacttaaggtctgaaaagagagctatgtagcaacctttttaaaaagccagttttcagaggaaaaacctgatatgattataggctttttgaa

SEQ ID NO: 8487 - DNA, 6000 bp, Homo sapiens
aggcatgaaccactgcacccagcctattcttaatcctattttgcaaatgaagtgacttgcccaaaactgcacagccaggggtagtagtgtagaagagcaggaggtcagatgtcaccctagtctttttatcacacagggaattgctaggaagctggggctttatcctggaggcagggtggagcatatttaaatatctgttttgggaagatagcaatcagccacagaggagtagatgagaaaagaaaggtgagtttagaggggattggaattgttcagggaagagatcatgctggcattaactaggaggaaggggctggcattaactaggaggaaggggctggcatggaaaggaggaggtgtatatgagaggcacaaccaagaataaaccaagatttggcccattgcttcttgggctacaactcctataaccaagcagttcagcagtttttccttacaaagtcacttcactgaatatatatatatatattatgtttgaggctggggcggtggcttacacctgtaatcccagtgatttgggaggccgaggtgggcagatcacttgaggtcaggagttcgagaccagcctgcccaacatagtgaaacctcgtctctactaaaaatacaaaaattagctgagcatggtggcgcatgtgcctgtattcccagctacttgggaggctgaggcaggagaatcacttgaacccaggaggcagaggttgcagtgagccgagattgcgccactacactccagcctgggcaacaagagcaaaactccttctcaaaaaacagaaaaagaaaaaagaaaaagacagggtctcactatgttgctcaggctagtctcgaaatcccaggctcaagcaatcctctcacctcagcctcccaaagtgctgggattacaggtgtgagccactgcacctggtctactgaattttttgagtgctaagcacagatgatgaggtaactgaggcttagagttgttatgcaagtttgtcccaggtcatgtaaatattaaggtatggatcagccaccatgcccagtgataagccacattacaatatgtattttaacatttttcactaatcacataatttacatttttctactggccaaattttaaaagtaagagaaacagggctggatgcagtagctcatgcctgtaatgctaacactttaggaggctgaggcaggaggatcacttgaaaccaggaatttgaggttacaatgaactatgattgtgacactgtactccagcctgggtgacagtgagaccctgtctcaaaaaaaataaataaataaataaaaatgaattttaaaaaataaagaaacaggtgaaattattattattattattttttttttttggagacagtctcactctgttactcaggctggagtgcagtggcgccatcacggctcactgcaacctctgcttcccaggttcaagtgattctcttgcctcagcctcccgagtagctgggattacaggcaagcgccaccacgtccagctaatttttgtatttttagtagagacggagtttcaccatgttggccaggctggtctcaatctcctgacctcatgatcggcctgcctcagcctctcaaagtgctgggattataggtgtgagccaccatccccggctgaaattaattttatttattttattaatcttttatttaactcaatatatccaaacattatttcgccacataatcaatatataaaattattattattatcattattagtgacagggtctatctctgtctcccaggctggagtgcagtggcactatcatagctcactgatgtctcacacccctgggctcaagtgatccttctgtgctagctctccaagcagctaggactatggacatgcaccactatgcctggctaattttattttattatttatttattattggtttttttttttgagatagagtctcactcttgttgcccaggctggagtgcaatggtgtgatatcggctcactgcagcctccacctcccgggttcaagcaattctcctgcctcagcctcccgagtagctaggattacaggcatgcgccaccatgcctggctaattttgtatttttagtaaagatgggttttctccatgttggtcaagagctggtctcgaactcccgacctcaggtgatctgcccatctcggcctctcaaagtgctgggattacaggcgtgagccacggtgcccagccaattttatttttttaattttactttatttttattttattattattattattattattattacttgagacagagtctcactctgtcgcccaggctgaattgcaacggtgtgatctcggcttactgcaacctccgcctccaaggttcaagcgactctcctgcctcagccttccgagtagttgggaatacaggtgcccaccaccatgcccagctagtttttgtatttttagtagagatggggtttcgacatgttgatcaggctggtgtcaaacttctgacctcaggtgatccactgcctcggcctcccaaagggctgggattacaggcatgagccactgtgtccaacagttttatttttttatagagacagtgtcttgatatgttgttgcccaggcttatatataatatttgctgagcatggtgggttatgcctataatcccagcactttgggaggctgaggtgggagaatcacttgaggtttggagtttgagaccagtttggacaacacagcaagacactgtctccaaaaaaaaaaaaaaattaactggacatggtggcccttgcctgtagtcccagctaactggggaggatgaggtgagaagattgcttgagcccaggagttcaaggctgcagtgagcttgaacacactgcactgtactctagcctggatgacagagtgggaccctgcctctaaaaaaaaaaaaaaaaagctacaggggtccgaagtttgtttaaagcttttaaaaaggcatttgtggccgggcgcggtggctcacgcctgtaatcccagcactttgggaggccaaggcgggcggatcacctgagaggtcaggagttcgagaccaccctgactaacatggtaagaccctgtctctactaaaaatacaaaaaaattagccgtgcctggtggcatgcacctgtagtcccagctactagggaggctgaagcaggaaaatcgcttgaacctgggaggcagaggctgcagtgagccgagatagcgccattgcactccaacctgggcaacaagagagaaacatctcaaaaaaaaaaaaaattatttgtgtctggatgtggtggctcacacctatgatcccaacactttgggaagctgaggagggaggattacttgagaacaggagtttgagaccagcctgggcaacatggtaagacccccatctctacaaaaagttttaaaataaattagccagacatggcggttcgcacctgtagtttcagttactggggaggctgaggcaggacgatcgctgtagcccaggagttcaaggctgcagggtgctacgatcatgccactggactctagcctgggtgacagagggagactatctcaagaaaacaaaacaaaataaacaaacaaaaaaagtgtttgttggagaagctgacatttcctccttggaactgatttcttctggaatgggtcaagaatgttcgttcccttctgaatgtccctgttattgttcttctgtcttgataaacactgtcaaggaagatcagattttctctggcctggagccaggttagtggaaaaatcctttgccttgggccccctgctctggttcactggggcagtcctctgatcactgactgggatcaattacctctgcggtagcccctaaagggaaatgcagaattgctgaactctggaagggaaggagaggtttggtgagccatcattatagacactgtgctagtggcattgcactgcacatgctatctttttgcttctttttttttttttttttttgaggcagagtcttgctcttgtcacccaggctggagtgcaatggcatgatctcagctcactgcaatctctgtctcccgggttcaagcaattctcctgcctcagcctcctgagtagctgggattataggcaactgccaccacgcctgtttattattttgtatttttagtagagacagggtttcgccatgttggccaggctggtctttaactcctgaccttgtgatctgcccgcctcggcctcccaaagtgctgggattacaggcgtgagccaccacgcccggcctctttttgcttcttaccagcaccatctgagctaagcatcagcacctgcaaactccacagaggtgaaaagtttccctgaggggcctgtaactagtaacccagaactttctgaatcagagcccaggatcacagtattccagacttcagggattttagtgctttctgccacccagggacctgggaacaagtgttatccagcaatacattttcataactgcattttgtttccctgtgagctaggcctggcatggttgatctcagtctctagaaactggagtcagatattcaagacattacaaggagatggctggtggggcatcatggctcctaggactttgggaggttgaggtgggaggatcgcctgagcccaggagtttgagaccagcctgggcaacatggtgagaactcgtctctatttaaaaaaaaaaaaaaaaaaaaaaaggctgccctttctagatcaggaggtccagcctctggaaacctcggagggctgcttgatctttcttttctaattcctgacaagttagaagacctttggcttctgagaaccctattactttaagtttaagctcttgtttgggaagccactgggaggacagtgaagaatgcccgcctacctggggaaacctgagttaggtgtggctggagcgactcgagatgcgaggtgggcgggggcaggctgaaagttggagcaagcaggaagtgaactgagggccaccctgggaggaagccgactaggcgaattcacttactgaccggcctgggctgctctgagacatggtgagccaactgggaactaggaaagggctggtttaaagaggagccagagggggcttgggactgggggttggctgtgtcgggggaggagagttggtggcaaagttagagggctgggccagtgctgctatggcctctcttctttgacaacttggctgcaaatagctctgagctgtcctggcaggtgtttctactccttctccctccctcccctgacctctgtgctggtggggagctgggcttccgtgccagcgccgatgggggctccgaattccaggcaaagagttgttgtgccttcctcctccagggagcccgaggcgggtgttgtgacaccacaccaggcagcgcctgggcagttcccagttcagattccagcccagcggcagaagctctcctctccggcctttcactttatccccacacagaaacacaaaggatttgtgtgtccactgagtcctttgggtgtcctttctccattaacatggagaagagaactaaaggtttataagagaaccagaagttggttctctgtgataatgtagttctgacccatgccactggcctatttttggaggtcaagcggggaggagctaaatactatttttctctccttgttcaaaaaccttgtcatgaagcctccgagatgagacatcagccagggaggactagtcctccatttcccccaacacccaggcgggtatttttatttaatatctgcataagcaggcggttgcttggtgcctgcacgtgtcgcccagtggtggggaaagcagaagtgtgtggctcaacggctccaggcgccttctgggatacttggttgcctgttgttctgggtcacagcaatggcattgcggccagggccgtgctccggcagctggcttagagggacagatgggtggggctgggtgagggtgttctgctggccagcacagacactttcaaccagggtcccaagaaatcagga

SEQ ID NO: 8488 - DNA, 6000 bp, Homo sapiens
ttcccagggcagaaatattggctctgaggaaacccccgctgtggcctctagccttctctaggagctgttagacaaggggtgggaaattgctggcgtcttgctgagtaggctttaaaaagaagggggaaagagcagtgaaatgctttgatcccagggtcccctgctagatgaaggctaaaataatatctcccacacatcttgctagacctcattcttctctctctccagccaggggctgaggccagctgtttcagggaggaagtaactccaaagttgagcaaagtctggagcctcaagttctgtgttcagcggggaggctggctctggctttctgagtcctgtgtgaactcttggctcttgggtattgctcccttgtctccctggggctcattgcctgtttctgtagcttaattgtagcttaatttggggagcatggccccgggaattttttttttttttttagacagagcctcactctgttgcccaggttagagtgagtgcaatcttggctcactgcaaacttcacctcctgggttcaaacgattctcgtgcctcagcctcctgagtagctgggattacagtgtgcacccccacacctggctaattttttgtatttttagtagagacgaagttttgccttgttggccagggtggtcttgacctcctgacctcaggtgatccacctgccttggcctctcaaagtgctgggattacagacttgagccaccatgtctggacaagccccaggaaatttagtgtctataacttgaattgctgggcatggggaagagtgggtggaggaggaggagttcccttacttccaaccctctatcctgtcctggtccctcctccagcctcagcagtcccgatggggcaaggagtcctggagctgcgagatgtgcccacctggagcctgcacccctcagtcccagggtctgccctcccaagggcagattttgctgccagtgttgtacccttgggtgtaagcaggtgtcgaggacccctcagtgtgcaggggtaagaagagaaaggggacccctagtcatatctaggtggagacctcctaggatcctgagaattctaaatttcaacccggccttccagatttttaggaaggtacatttgtcaaggtaggcagatacagcatttttttttttttttttttttttttgagatggagtcttgctttgttacccaggctggagtgcaatggcgcaatctcggctcactgcaacctccgcctcccaggttcaagtgattctcctgccttagcctcctaagtagctgggattacaggcgtctgccaccacacccggctaattttcttgtatttttagtagagagggggtttcacaatgttggctaggctggtcgcgaactactgacctcaggtgatccaccaacctcggcctcccaaagtgctgggattacaggcgtgaaccaccgcacccggccagagcatcttttatttagcagtttgttacctcagcttacagtgtcagtattaagatgtatggcttgagctgaacgtggtggcatgtgcctgtagtcccagcactagggaggctgaggtgggaggattgcttgagccctggagatggaagctgcagtgagctgagattgtgccactgcactccagcctgggtgacacagccagacactgtctcaaaaaacaaacaaacaaggccaggcgtggtggcttacgcctgtaatcccagcactttgggaggccaaggcgagtggatcacctgaggtcaggagttcaagaccagcctggccaacatggtgaaacctcctctctactaaaaatacaaaagttagctgggcgtggtggtgggcacctgtaatcccagctactcagtaggctgaggcaggagaatcaattgaacccaggaggtggaggcagcagtgagccaagatcgagccactgcctgagtgacagagcgagactccatctcaaaaaaaaaaaaaaagtatggcctgtgggctgcacttgtactcttataatcttgttccagtgggaggagccactgggtcactcactctgccttttccccaacagtctgagcacttcaagacgacatcgcagaaggtggctcgaaaattctggtggaagaacgtgaagatgattgtccttatctgcgtgattgtttttatcatcatcctcttcattgtgctctttgccactggtgccttctcttaagtaacagggaacctctcccacctgcccttctcttcagggacaaccctccataaatgtgtgccaagagggtctcctttcctgtcttcctctacagagaatgctgctcggtcctcctacccctcttcccgaggccctgctgccatgttgtatgccccagaaggtaccttggtcccccggaaggagagaaaaaagagagatggactgtggctgcatttcttgggtccttagagtgggctggagagacctagagggcccagcatgtggctgggaaactgttggtggccagtgggtaataaagacctttcagtatccctatatgtgtgaggcactttctctcttcccattttgcctttggcttttctatttcttttcttcctgaggataccttctggctaaaattctctcatctgaggtccaagttgttggaagggcaaagagtatatgtttggagaagaaagttggagcccccaccctgtctttattcctcccagttccattcattgtcacaggtctcaagaacaagaattttctgggagtcttggcatatggaaagttcaaaaccttcatagcattttggggtggtatgcaagatttttaagtgttcccattgggtcctgccatggccctgtagtactcttcttctggaattgttagctgaggcatgaagctggttgaaatcctcctgcctcttccaccagagccatctctcttcaacgaccctgtagtctagagccgaggggtggaggaaatggactgctattcctttccttgtgcttctgcatgttttatttgtcttttctctgtccttgtcttctgggacttagcaaggcctctgggtctcagttgtcctgagggggcaagcatctctccttggcatcccatggctgggcacagtcagtcagtcagtgtcacaggacagggccaatggctcttcttcccctctgtgcacaataagcctttctgtcttcaggcccccctcctccctaccaggttccaccatcactgtcactttttccagtgcccagtccgccttggtttgcagggagggttcttgctatctctgttcctgtttcctccacaggctttccagaattggaaacaacctgttgtcaggaagaaggggaagggttgagagtcagggtttgggaccagattggcaagtcaggctctggaagaatcatgctctgaaatttggggagggaggaggaaaggtcagaaaagacccttgtgatatttttatttttattttttcagagataggatcccactttgttgcccagactggagtgcagtggtgtgatcatggctcactgcaacctccatctcctgggcttaagagatcttcctgcttcagcctcccctgtagctgggaccacaggtgtgtgctaccacacctggctaatttttgtattttttgtagagacatggtctcactgtgttgcccaggctggtctcaaactcctgggctcaagcaatcctaccaccttggcctcccaaagtgctgggattacaagtgtgagccactgtgcccaggcttggggtagtctttgctacaacatgttaatcctctctctcctggattcaaggtgtaaggaactgaagtgaagcttctgccttgggacccaggctgtccaaggtgggggtgagtgtctgtgaaaccctcttggtctgggacttctgtattcacagaggctcagccccagagagggaaactttcaattctgttggtcaagagaggcctcacttgagggaccaggcccagtggctcacacctgtaatcccaacactttggaaacctgaggcagaagaactgcttgaggccaggagttcgagaccagcctggtcaacatagtgagaccctgtctctctcaaaaaaaaaaaacaaacaaacaaaaaaaaaaaaacgagggaccttattttaagatgtccgaggcagcttggagtagtggagaacaggtagctggtggtttctctgtagcagtgagaggacaggatgggtagattcggctcaggaaggctctgaagtggtagtagatacaccagcctcccccatcctctgactgaggagcaagtgcatggcgggtgcatgacagcacagagctgcacttgccctcatggtgaggaaagacatacagaaaggctagagctagtactttgcccatgtggggctgctttctttttgaatagaggtgaaagtcacacaatgtacagtttgttattttaaagtgtacagatcagtgacatgtattcagaatgttgtgcaaccaccacttgtctttagtttcaaaactttttgggtgcctgtttttggttctgggtgagatgcactcaccagggtgataaagaccctgcctggcttgttcatggcgtctccaggacctagtatggtgcctgaccgtggcactcatagggtgtttgttgagtgaatgaatgatgccttttcagctgaactcgagctagaagactccagggctcactccactgtgcccattccacagatccggccccgaggtgtgcccgttcaccaggcagaggtgtcatccgaattcaggctcctggggcccgggagggtccgactctacggacccaggtcgctgtggcccatcgctttcgatttgacttggtttctgtcgccactcgcggaaggcgcgccccccgccctcgctcggcggcccgccccgccccgcccctgctcttcctccggggccgctggcactgcggccgctccgcaggcagagaagccgggagcgggcgaggcggcggcggcagcagcgatggtgagggcccaggcggggccggccagccctgcgacgggcagagggcgagtggcgagggtgggagagaggagtccaaagtccgcgggctggggcctcccctggggcccacgagggccagacctgaggcggtgaccactgctggagcaggacggggcggaccctccactccctgcgcgccgcatgggagagaaatgcgtgagccccgtcctggctgcaccgcgcagagcgagcgggactcgggctccccattctcctgaagcaaagcggttaagagcaccgactttggagtcggactccgggctgggatcccagctctgtgacccgggacaagtcacttaacctccctgagcctccttttccgcgtctgtgaagtggggtcagtaatacctgccttgttgggtccttgcgaggttaaaggagccacagtggcagagacccgcctggcactcagaacccactgctaagaagtggtaggaaatgtaacgacctcgtcagccctttccgcagctgtgaggagccaagcctggctcaggagttggaaacttgagcagatggggtggcagaggccattccagccccatggcagggtgttggagggcgaactcctcccctagagaaagagaaagggagatgtttactctgaaagttccactgaagttatcagtgtatggcacaggcctgactccctgctaacctctacctagtgacacattcctgagttgagtcatccccactcctgctgcagatcctggcctttgtcctcacttgccatctccaaggcaaagatgtcaggaacagctggtgccagtttctccctttccctagggctcctgggaaaatggactgggcaggaagtaggcttggtgctttaagattttgccttggagaaactgacagaggtgtgatggatgtggcctggctaggggtcaatgcctggatggccttatctccagggaacttggaggcaggaagaggaagtggggcaggaaggtagcactgagctctgaggccaggccagga

SEQ ID NO: 8489 - DNA, 6000 bp, Homo sapiens; identical to SEQ ID NO: 890

SEQ ID NO: 8490 - DNA, 6000 bp, Homo sapiens
ccctcacacacttccacacttgggcagcctctgtttgggttgcatcccatccttactgcctggagaggctcatgaagaaggtcccagggctcactgaagagcctcctccctttcccacccgacccacctcgcccttcctcaccaggctcactcatcacagcggcacagagttttagtttggggattcacccattcattcttcttctttttaaaaaatctatttatttatttatttatttgaagaccaggttatgagactggctaattttttttttttttttttttttgtatttttggtagagacaaggtttcaccatgttggccaagctggtcttgaactcctgggctcaagcgatccatccaccccggcccccatagtgctgggattacaggtgcctgccaccaacccagctaatgtttgtatttttagtagagatggggtttcactatgttggccaggctgggctggaactcctggcctcaagtgatccacccggcttggcctcccaaagtgctgggactataggcgtgagccactgcacccggccaggggttttggtttgtttattttcatggcccttatggggaacagatcttatctttaaatgtattcagatgtgcttttccaaagtttcgagactggagaatatgctgagaatatgctgggttctgtgttcagggctgaagaggatgtgacggtgagtaaaactcagtcctgtctatgtgggggagacagacaggtaaacgggtaatatgggggcaggtttcatattaagggatgccttgaaaggacccctcactcagcctaggggtcctagagaaggtgaccactgaaccaagcttaaaggatgagcagaaattgagtgaacgtggaggctggggataaagaagggaaatcatgagcagggccaggatggaggggagtgtggtagggtgagccgaggactgcaggatctagccaggggaacggagaagggctccaatgttggagggccctggagacaaattaaggagtccagtgtaggagccgctaggaggtttgaagcaggggagcctggggtccatctgcattcacgatggtcctttctgaagcaatacttaggaggggtgctggaaggctggatgtctggctgcatgccagaatgagggacaagaagtcaggcagggacccacattttgggagcgtggtggtcaaaatgctccaaaatattcccagaaaggcatcccagaggcctgttcccccatggccaccatgtgccacaagcttgggcccagccgctatgcttactccatataaggctgttgtagccagagggccctggtggactgggagaccctgcctccggttgggaccatcagtttcctcccactaggatgaagagtgtggcctgtggtgctggtgggactcatagtagaccacctgggagaacacatagactcagatcggcagggcagccctctctgccatgttggatgaggagaatctattctgcagaggaggccagcgtgcactggggagaggccccgtcccagagagagggtctgagacagacatgggggcacttgatggatttccttttccgggatctgagccctcctgaaggaccttggactccaaaagtgcccttgtatctctataataaatcctcatgtttcaaattcttcagctgacctaagtgggtttttcattgttgccatcaaaaatgttgactaagacagtggccgtgcgtagccttgatgatctggtaagtgggtctttgtccccttgaattggtttaaaactcattcccagtgtatggcatggatagcagaggcaagaaagaagaggaacctgtcttcttgcctgctgtttccttgagagtgtctgagcatcttgctggtctattcccagcatggctgtgtgaggcagccagaggggccctggggctttctggagggcagagtcccttcccttgctgaggtctccatctctccccgcctcttccgcaccttggggctgtggggtttggggaacatcgatcttctggagatgcgtgagtcagggtgagcacgtggccccaggaggtgtttccagggcaaccaggagaagcttctcctggtcaaccaaagaattccccacggaggtcagagggtgccaggggtcaacaggagcagagaaagtgcaggtatgcccagaaagatgtgagggaaaggaggggccaggaccccccttggcctcccatccccacttccagaagccctgcagctgggtggcctgccctgccccccaagccccttagtggctgccccaagggcacccatgcttgtgagcagcccccacctgcctgcttgctgggcttttccagggaattcaattagggcagtggcttccttgcctcctctgcccaactccagggctggatcctgaaccccacctgctctcccacacagggctggggatgggtggaggcaggggctgactggtggatccgatgataaattgtttattgggatcctgctggggggaaggggaactgtcctgtccactcctggcttggctgctgactcagaatagtcctttcttccatgcatctatttctccatctgttcaacaggcagattcagcatcttcatcccgccctgggctgaagaagaggcttggtatgtttttgtttttcctaggggaattattatcttcaaactacagtgttttcaccatacacacaaataaaaacaatagcagtagccaatgattggcttaattatgacaataattgagaagagagagggggtgggagtggagcacgtggggccaaagctgcttatttcccaagtctccaagggcttttactactaaccaggaagctgggacctgaattcccccaccactagtgcacccgagtcagaagacacaaaatcgcctaagcggcaggtgctcgggtgagggctgtgtccatcttgctgctgatggggtggttagaaagccatcccaggggaaggcattctttctaacagcctaaattggagggagaaggagaagggagaagcagtgaggccctggagagaccagcccttcctcaatgcagcctctgtggaaccaggagcccccaacatagatgctgggttcaggtgagtcgggaggaagggctgtgggagggcctaggcacagcctgcactgagcttcacaacacagtcataggcagtgtggctaggggcctctctgcacaccctggggttggacccctacaggaggagctggccctggaccctccctggggtccatggccagctcccaccagacctagggtgccaggacacccctagactattcttcactgcatccctgatcctcatctctgaatcaccctttgatgaagccccacttcctgtctcaccccactgtaactggactatgccttctaccattgtgttctctcatcccctggctctgagaaagtcacagaggcagcaatggggagggtaagagctctactgtgggcccagccctgattcacacgtaaggccctaattgcctgataaccctaccagggacagcaggacatccctgagcctctcacccaccctgcagaccatcctgaactactgccctgggctgagcttgggggtcctgggagccatggagccagcccttctctccaaggctcccagtcaggggcagggagctgccatggaatctcacaaactttgattacttatttaaatacgagtaacacgcgtttagtgcacagaaatgaggaagtacacgtgagcaaaggagaatgaaaaattgccggcaactccactgcaaaatgattgctgttttacaccttcactgtgtgtactgatctgtaatcttctttttttttttttgagacagattctcgctctgtcacccaggctggagtgcagtggcacgatctcagctcactgcaagctccgcctcccgggttcatgccattctcctgcctcagcctccccagtagctgggactacaggcgctcgccaccacgcccggctcatttttttttttgtatttttagtagagacggagtaatcttctgtttgaggaaatgatcaccattttacaccttcgctgcgtgtgctggtctgtaatctgctattggcggaaatgatcaccgttttacaccttcactgcgtgtgctagtctgtaatctgctatttgcacttatgagtgcatgtgaatatttttcagtcacaagagacatttccacggcatgttctttagcaactgcccagtgtgtgatgtaagaggctcattttgctggttcctcagtggtggctttcaggactgtttctgatatcctccagcccttcagtgaatttccccatgacctgctcagctacaggcgactttctgggcattgggcatacagctgttcacaaaacagagacctgtgcagacacgtttctggtcatatcctatcagttctttcaactgctgactggatgaggtatggccaggccaaagggcatacctctgggatttgccctcccaaaggcctgtgcgtgtcagggtgggcctctgttcaggattggcctggcagtgggcaccgggcatgacctgcagggacagagcaggttccagatgaagcagggagagcaagcctgggtcctggccctgtgtctctggttttatgaccattttgaccagggcttcaccaagcagctgttttcccagctcctagactgggctgctggggctgggcatggaacagaatatttgaaatggggccattctaggtgatcccaagctgctgaggtgcctttcggacccagctggtggcagccgttgcctgcaaggatctaggtggtggggagcccaggcttccacccgaggccaccaagggcggtcccagcctggccctgccccctaccctgtgcctccacccctgcccttcctatgctccaaggcaggcagggaggcgggaggccaggtagctcaggaacccaaacctgtcgggcaggttttgagagctgtggagagagggacagaggctggagaaggatgtatggcctgccctgggcttgtctgttccctcctgagcctgagccccttaccttcctgaccccatgaagcacacactggctctgctggctcccctgctgggcctgggcctggggctggccctgagtcagctggctgcaggggccacagactgcaagttccttggcccggcagagcacctgacattcaccccagcagccagggcccggtggctggcccctcgagttcgtgcgccaggactcctggactccctctatggcaccgtgcgccgcttcctctcggtggtgcagctcaatcctttcccttcaggtgagtgtgcccctcccccatgagggcctcagcatttgggtccccagcccggcttcctctgtcccactctaccatgggatgtgcccaacctacaagcaggcacttgccatcttcctggggtagaaggcggaggatctggggagggctccagaacctgctgtgtgactgtgggtaagcctcacttcctctctgagcctcaggtgctctgtctgtaaagtgaggaggttacattggaaatacattagacctgactcagacatcctcttagtctatcggtgcttgggttgggtggtccaggagtgtctgaaggaccctcccagtcctgtcccttgctgcttgaggggaagaactgccaggccagaccccttctctgcctttgcccaggctcaggactgacctgtagggtccaggaggagaggtctgcagcctcctctctgctcgccctcctgtagcagtgctgaggtcagggcaggatggcacagggctgcggtgatgcagccttctgcgagggtgccatggtggtggcaggagccctgcctcagagccactttgccctggcagtggggagaggagggacacaggggcagggcagtggctgtccccaaatcctcagcttggctctttcccatagagttggtaaaggccctactgaatgagctggcctccgtgaaggtgaatgaggtgag

SEQ ID NO: 8491 - DNA, 6000 bp, Homo sapiens
tgtgacatgaaaagtaaaaaataaaaataaataaataaaaatgtataaccttcacaaagtcatgttttctattttatagagtaaaaatatcaaaaaataacaagagactttgaaaagaacattcaaacaacaaaatagattttgtaaattaaaaataccattacataaataaaaacttcagtggaatattaggaaaataaaaaagtgcctttgagcactttgaaaactttgcagacgaccaaggctgcatgcaacctgaagttacagacaacacagaacttttcatattctacaataaatgtttccaattaaattctagatgtcatgctatagataaaactgtaaaatatccaggactttccgtccagaagttcacaattttataaacaaaaaaaaaattaaaggacatactcacctgaatattctataactggtctgaacagtgcttgcaggaaaattcatgcatttggctcaggagttgggtgtcccctgggctttctggataacagatgttattctctgagatttccacagtctagcaaattccaaatgcctctataaataataagccttgctttttggaggccaatgtattataggatccttaaatcccctcccttattaggtttctgcagtacagaggaccaatgaaaggatttacccttccaccattgtttacatcaactcaatttctaatctctgtaaatagccctctacaaacaccctctagttgtggttagtgctggtttatcttgtcatttatttatttatttatttatttatttatttatttatttagagagggagtcaccctctgtcatccaggctggagtgcaatggcatgatctcggctcaccacaacctctgcctcccaggttcaagggattctcctgtctcagcctcccgagttgttcagattacaggcatgtgccaccaggcccggctgattttgtatttttagtagaggcagagtttcaccatgttggccaggctggtctcagactcctgacctccagtgatctgcccgccttggcctcccaaagtgctggaatcacaggtgtgagccaccatgcctggcttttgtcattgattattaaacaacacccacgtggcaaattcatgtttgattttttggggccccaagtctactttcatttctgctcccacatctgatagtatttttatatgatatttgaatacatcattccattctttgataatttctgccctttcttcactgaaatctaggatctgctaccatctcacctggctcatcgacatgtaaatcccttcagtactgatcaatttctaccagtctttagatttgaagaccaaaatgctaatgaccatgatggatggttttggaaaaagacaagtagagcctcaatgtctggcacctatggctgatttaattttaaactcagggaaatgaaataggtactgtgcataaaaaatattcaggtgattttatttaaagcatttttactaaattcaaactaatcaaaaaaacctttatttaaatgacaacttatttcaataatttttaaattttcatttttaatcaatatataaaaattgcacatatgtatgacatacgatataatattttgatacatgtataaattgtgcattgatcaaattagggtttgacaacctcaggcttcataatttatgaaatagacctctgccatttaaaaactttatatctaaacttaccaactagtaattaactgaacatatcaaataagatattatttaaaagagcctaaattaataaaatgtttaaatacattttgagctttaaaatacaataaataaatatgacttattttagaaaaatttttttaaaaaatagacaaaggtggatatagacaaaaacatgtacagaaaaatatcaaaaggactaaaccccttggagattttaatggtaaaagcttgctgatattatttttaaaattatcaacttttaaaaaaacattttatggccatttgttaatgagcataagcttctactgaaaatgaaatatttgcttctataagaatatactctcagatattgtatgagaatatactgcagcattgtatgagaggcaaaaaactagaagcctttggaatattcatcatgggagaatggctgggcacattaacgtacattcacagtagggaatattctgcagccatcacgtaagttaagatctagatgtattgatctgaagggacatctacaaaatatatatattttttgagccggagtcttgctctgtcgcccaggctggagtgcaatgatgtgatcttggctcactgcaacctctgcctcccgggtgcaagtgattctcctgcctcggtctcccacgtagctgggattacaggcgcccaccaccgctcccagctaatttttgtatttttagtagagacagggtttcgccatgtcggccaagctggttttgaactcctgacctcaggtgatctgcctgcctcagcctcccaaagtgctaggattacaggtgtgagccaccgcacccagcctacaaaatattttttaatgaaagaagcaactaactaaaactttgtatagtagttatgtttttatattttatattcatatatgcagtgatgctcaatgggaattttgcaaatccagggggcatgtggcaatggctgaagatatttttggttatcatgtcagggaggtgctaatgacatagggttaaatcctacaatgcacaacctccctcaaagaattatcaacccaagatgtcagttgtgctgagcttgagaaactctgtcatagggaaaggaaaaaaaggataagcaccaaactgctagcttgttccttatatatctgtgctgttcaacttataatgtacatttattttgacaactgaaaattatcctataaaaataagtttattgtgctggcaaagacaatgatagagcagaggtggcagactgttccccaagccaactgtttccaaaggagacctgagggactgggtgtgagttgacagtggtgggagctggaagcagcaagggatgcggggacatctggggagcctggacctgaccttggagctcactcacacaatctaaataatcccagagtgaggctgaggttttcctgagttggatgagggcctgcgaaaatttcctattattaggcaagcctactatgagagtgagaagcctaaactcaatttccattttatagcctggagtaaaccacttctggtcaggcagcagggaatcataacatatcagagctgaatacctcactggtttgctgaggggcaagttagtaggtgttcctcagaaaggattttgtggtcaattaagacagggaaactctggcttaaactgcaggtaaattaaataagaggtctttactgcaagcctaatcagagcctttattatgctagtgtccatctccaaaagggtggtcatcaaatgcaggccctccctgtcttgaccaagtcctttttcttgagatcatgtcttgagacttggatgccatgcaatacactttgggaaatactaacctagttgaacgacagttttactgatgtagaaatggcggcccaaaggataaaaagtagctgaactagctggtggggctactttccagaccaatgcttttttctcctgcctaagaccttaaccacagttgcaaattaactacagatcctcagaattttcgcccaattcaacttggaggggttgcagtggaggtgagggagaagggagtaacagtgaagccattcaaagcaaaaaccacctttaaagaaattttggccttagaatacagggtttttttttttttttttttaattggtggagggggcacccaggaagaccagacgtgctcctgtgaagcaacgctccaccacgtccttttgaaaataccgtagcctgcatgagacaggcgggagcacctaagccttcaactctccccatgttgcctccaattgacctcactgggccaggaaaagccctataaactggttttgtatactctatccaagtagtaaatttactaaaattactggatcctactatataccagacctctgcaaggcattgaagattcaatgatgagcattaattcccactctaaggggatttttctatctggtagggaaactcagataccgcatgcagctagcctgtcacagggctatactgactaaagctcaccctaagaaatttgcacatcttagcctatgggcaacgggaagccatggacggaatatgttttccgtttcaaacaaggaactccagtcacagcaggctctaactccatttcctattatcaactccccttcctgctcctcctcccttagtagcctcgaaaaagagtggccacttccttcacatcaccagggccttggtcctggtagggggtcccgcccccggccctgtcctcctccccaggccgggacctccgcgcctcccacacacagtacaactctaacacgaaactgggccaggactgcaggtaggtcccgtccaatgcgacacgctcgcgacggcccacgcactgccagaaccagccctgccactaaccagcctagtaaggaacgcagtgatctttaggagcccacttctaaattcaaatcatttggggttcagtaagtctcttcacagacggggacctaatagcttccattagcagcctccacgtttgctgaacacgactacggggccagacccacaggaactccaatgtggttcagccgctcaactccagggaccaaaaagactttcccacctcccagcgttattaaaggcaaccccgcccccaagcctcagccactacgcggtgcagaaagaggcagagctgggcatgcgcaatttccgcccccgccacagtcttgggagtgggcgggctcgagggctgggaggaagccgaaagctgaccgagaggagaaagaagcccgcccccggaagtccctcctgtctctgcagcttgttcccggaagttttgctgctagtcgcggacgcaatggcttcaaggttacttcgcggagctggaacgctggccgcgcaggccctgagggctcgcggccccagtggcgcggccgcgatgcgctccatggcatctggaggtactcgggtctccgggcgtgccagggaccagagtgttgccctcccagggtggtcccagggcggcaaagcggcgcggctcgtgcagcttctcgaggtcccagtggccgctttacggtccccagtgcctcaggctctgcaggcatctccctgtaattctggaccgctgctcctgccgctccccgaactcactccgctgcgaaagtatcctaaacggaggtgccgggtgaccttgggagggaccggggctgccaccgggatggggaggggtccggcctcccttcaaacctgcgcccacctcaagcagagtgggttctacatgcttttagacaaatgtcgacaaatttgcctcggtggttggagaaagaaaagctcataggccgggcgcggtggctcacaactgtaatcccagcactttgggaggccgaggcggacagatcccctgaggtcaggagctcaagaccagcctggccaacatggtaaaaccccgtttctactaaaaatacaaaaattagccgggcgtggtggcgcgcgcctgtagtcccagctactcgggaggctgaggcaggagaatcgcttaaacccgggaggcggaggttcccgtgagccaacatcgcgccattgcactccagcctgggcaacaagagcaaaactccgtctcaaaaaagaaaaaaaaagctcccccgagtgctgccgcttgtgtggatgggtacttggtggttcttaggggaccatggatatgagtagcctttaggagcttgtgagcccgctaaaacttatacagaagtttcggggcaccattttccttgatcatttctgtttgtagtttttctatcagtcatttcagtcagcgtcataattcacgttatcttcctttaggtggtgttcccactgatgaag

SEQ ID NO: 8492 - DNA, 6000 bp, Homo sapiens
ggccagcctgggcaacacagcaagaccccatttctataaataattaaaaaaaaaattagctgggtgttgtggtgcatgcctgtattcttaactactccagaggctgaggtgggaggatggcttgagtccagaagttcaaggttacagtgaactacgattgagccacactgcattccagctgggtaacagagggagactctgtctctaaaaaaaaaaattaaaaaaaaagtagggtgggtggttgagggttgtgcagtgtgagtgagggtggccagaaaaaccatttccgtgacagttacaaaggctgtgtgtggatggtgacgctgaggttttatcttcaagtgagttgtgcatatgaggtttgtttgattctaaagcatttattttctaaatgcaaacttttagaataaagtctagttcctgttgctctattttggcataggtttttaatgtttcatatacttagaacttcaaaatggtggtggttggggtctgtcttcttacctgctggaggccctgccaggtgctagccagaagcagtcattattgcttaggcagtcgttgtgggaggctgggtgtggctctcgcggagccagaatgaaggatagcaactcattaacacacacacacccacccctaaacacacacgtgcacctacacacagctgggagtcctaaggaagagaccacaccttttttgttttttgcttttttaccaccttcattatgagtctaaagtcaattcaattaaccagctatttgaaatttttacatctaacaggagctgagaagatccagtgggttattggttagaatagctggtggggctggtgggtcggggtaggtgagaggagggaagggtgatgtggaggatggactggggtgtttgctgcaaggtgggtagctgagggttggttcaggtgtttggcattggttgggatccaatagctgttgtctgagagtctgctcgtcatctcttcctgctgaggctggtgggactgaactgaccttcatatctcagcgatgagtcctgtagactgcaggctccacggcagttgcagctcccagggcttcagattggagctgcctgtgacatgcagaggtggaagcacagcctcagctgtggtggacggcagcctctttcagcccccaggtgcataacaaaggctgtcttgattgtatctgtgagagtgccatgatttggggttttctctgtcggtttggaccagatcagaaagcaattgggactattggtaagaaaagccaatctgtctattcttggtgtggggacacttgagctggttctcagcagtgcaaataatagctagatgaataagcattgagctgctgtctgatgcagaatgaaaatcagatttccatcatgaggaacaggaatttttttcatttctcccccagagcagagagtgtaggtccacctcagtgagtggctaatccatgtcctgggaggccgacttccagggtttctctctcagatagagagagacaggttttaggtctctagagtctaaagaatgaagaatcattgcttcagtccttgcaataaacttcctgggcccacggggcagaagggcaaggccggggagcaggggcttccacctcatgcaagggagacagcgcgcctcaggtcagagcaggaggggcctgcttggagcctcctgagccaccggcaggcagagggtttggttgtgtggatggtagagcaggagggtggaatgctcggggccaggtactgcatggggcctgggtgcctgtggagggagagcaggctctggagggggccaggttccagctgccctctcatgcatgctctgggtctcgtgggaggggggttggagggaaagtgggcaggggctgttcgtgttatgggtggtgtcctggaattctcacctttcccagtgtctctcatggaaacccaaggtgggagaaagaagcagaaggagatcctggaaccaaaaacacttcagcaatgaagactggattttctctgaaatgaacaacaaaataaaatctctcctgtagatctctaaagctctgtgcatactttgtctatgctttctagacaatcttagccttaggtatgaaaggaattgaggtgaatagtggagccgttcattagatgtccacattctaatccctggaagccgtgaacaacatgttaccttacatgggaaaagggattaagacacagagttttttttttcctgttattgtccagttgaccaggacagcctttagatttttttttttttgagccagtgtcttgctctgtcatccaggctgaaatgcagtggtgcaatcatagctcactgcagcctcaaactcctgggctcaagccattctcctgccccagctttccaagtagctgggactacaggcatgccccaccccacctgggtaattaaaaaaattttttttgtagagatgggggatttggctttgttgcccaggctggtctggaactcgtggccaatcttcctgtctcagcctcctgaagtgctaggaccgtgcttgcccagaatttttaattttatgggttctgattgctaaatttatcctatggttttgatgaccatattttcttgaatccaaattaaggctctctgatctgacaatgagtgagtttctggggataatatgacagagtatttggaattgagggtgtcccataaaaactggggacacatatttcctgtcacaatacatgacgtagcctctctctcccttctcaccttccccaccctgtggcttgtacattacaaggaagagagaggggttggaaccttgccacaagggttttcagaggattctgctaatctctgaaccagaccagactttggaaaggcctcctgggtctaaaaaatgaggaatcattgcttcaatctttgcaataaacatcctgggtgactttcacctcaaacctcagaggatttcacgatggtacagaacattctgtgcttgtgggtttcccatcagttggtggagaaatcgagccattcaaatgtgctattggtggtggacacagtgcagcatgggccatgaagcggggcggaggggtaaagtagccatggctccatgaggctccggcaggcctggggacttactcttgggtgtctgttgggtctgagcattagttcttgaaaagactatgtaagcaattcttgtgactctatgatcaagttttcccatagaaagaagtgaggttatgtaaattcctccttatagatcacaagatcagcagttaactccagcatggccaagagcagatggcatggttttgcttcctctctttggctgaattaagctgtgggcttcctgtgttatttaatgaaccgaatcctaattgaggcaggtcagctgggggtgatgtgtttagttgagcacagagcgagggtggagacaggggctcaattattggcgtgttctgtatcctgggatgatgatggtatttggtgagattttcctactgggatgaattcccacccttgaaacttactaggcttgactcaaaatttgtgctttgttcttcaatcttgcctcatcaaaataatgggaaaagccccaaatatttcaccttctaatggtccttaaaaagaataaacatgatataatgtaacatttaccctttgctcaacaaactccattttggggcattcacagtttccaaacagtttccataagaatccatccattgtgaagttatacacaccattaaatcaatacagcttactcaccttgctccccatcctcaaatgtctggacttcagttttctcttctttttaaactggaagacaaatttgaccatctctaagtttctacctagctctaacattgtatttttctaagattttatttaaccagttgagatttgactttcgagagttaccatcctttgttagcaaaaggataaaactagggcccatgggcccttctgacttagccatttgttctgggtatgaattccctaagatttctctaaaggagtttctatacctgcctctttacttgtaagaaaatgaagatctgcataaaccaggcagacagtgttatgaaggttaatgccatgggttttaaagtacattttgaaaagcattcttcctttccaaccaccaacaaagggattccaaattacacctcttcctaaacgatgcaacatgagtgagcacataggcgagaggtcgcaggggatgataagagggttctagccctggagcctggctttccagagaggctgtggccaaggttttacgctcccatttggcctcctgttcatatgaaggaaggcccaggaccatgagttctcagatccgcgggctctgagcaaaccgggtgcaccctgactcggcttcatcctctctaactccacggtggcgacttgcatgggagagaggagcaaccaacaacaccttcgggctggttagggggtttaggagacattggttttgtacagacatgacttgatgctggattcccactttcagaagacaaactattcagttctgcaaactccacaatctagaataaggaattagataaccaaccccctccttcacttaacagttaaaaatcatacaggactctgaaaacaaaacaaaacaaaaacttaacctttcttagatcctaaaagcgttccttggatggaaaaccaactcttccactggctaaagatcaaaagcatctttttctctttaatggggccacagttgggcaaaacgcccatcactttaaaaccacctctcggctggaagtacgtaatttttagcgagtcacagaaaaatagggaaacttatgcggcgtttccttggccacttccccatctgggtgatcatgtactcagacccagcactgcagcctgggggtgctccccgtgaggaggaaaaggtgtgtccgctgccacccagtgtgagcgggtgacaccacccggttaggaaatcccagctcccaagagggtataaatccctgctttactgctgagctcctgctggaggtgaaagtctggcctggcagccttccccaggtgagcagcaacaaggtgagagaatgcagagctgcaggtaagaggctttggagagagagagagaaagagagagagggagagagagagagaaagagagagagagagagagagagggaggcagagagagagggaaaggcaaagagaggcagagagagaggcaggggggaaggcagagagaagagagagagatggagagacaggcagagagacagaaagaggcagagaaacagagacagaaagaggcagagagacaggcagaggcagagagacagagagagacagaggcagagagacagagacagagagagacagagaaagacagagacagagagaggcagggagacagagagagacagagaaagacagagacagaggcagagagacagagacagagagacaaagaaagacagagacagagagaggcagagagacacagagacacagagagaggtagagagacggagacagacagagagacagagagaggcagagagacagagatggagagagacagagagaggcagagagacagagatggagagagacagagagaggcagagagacagagatggagagagacagagaggcagagaaacagacagagatagagggagacagagagaggcagagagacagagagaggcagagagacagagatggggagagacagagaaaggcagacagagacagagaccaagacagagggagagacatagagacagagagagaaagacagagagaaacacagagacagagagagagagacggagacagaagagagaaatctgggagtcgggacacctgagtccatttctggtggaggctcaggcgactctccggatttctccagacctcaggaacctgatccgggtgaccttccttgcccatgaccttcttcacctgtgtgaaggtggctggaagcattacttgatatttctgggcctcagtttttctatctgtcaaaa

SEQ ID NO: 8493 - DNA, 6000 bp, Homo sapiens
ttaaaaggaagccacctagagaaaatacattgacagttatattcagaaagattaaaaggttgaaaggctccaacacaaaaatctagattttggaaattgcttgtgtaaaaggaaaagtgacaaaacttagagatcaattacaaaaaattgcagaaaaccaaagatggtgggactgtgtggaattacaagggaaagagtattacatttaagaataagtttaaaaagggttgtattcttcctacatgtctggcatatgatggagaacagaggttagaacaggcacttcttggatgatgggaagggctgccttttgggtgaccatagacagttcagttcctggtgcttcaaattttatgtgttaaagcaatcagaagccagtggcatgagagacagaggccactaatctggttctgttaggtgtaacagtacttggatgtcgccaagtctattggcctctggaacttgctgtgctatatctattaacatgggaaaaaccaggtgcaagaagcctctttcactcatttgccttcactgagcaagattcaagctgcaattagcacaaacagttggctggtttgcctgtcacttatgtcttatcttcctcctcttattaaggaggttaagaaatggtttattgcctatgaccgtcttatgaaatatgtcacactttctcatcagctcttatttcctgttcacatgtggctttctggttggtaaaggttttattaaatcagaggaatttgaacggaaagataatcatagtagcccaccaccaattgcctagggaaagggagagtgttgagtagattgaaattgagaagttgtagtgagaaaaagtaaggcgaaatgtagataagaaaatagttacttgaaagtcagcagatggaaaatgtatgagaggagcgataaaaaacctaggctgtagaaggaagtccatctaggacagtggtttccaatctttgttgtggttctgtgagagtttactggcagtgccataaataacaaaaatatgtgtagcaaattaagaatcacagaggccctctgtgcaaaaatgtaattttctttatttctttacaattgaagccaactagacttaggaattctcatttccacctgatggtagaaaaagatctcactaatttagagttgttttgtccccactggttcaagactcagtctctctgggggtagtaacacaatctcttcagaattctttccttccaaaccctgcatttgttttttctgaaggatcaatggagttctttgggggtggtggggctaaagtggaccgagctgaagaatggttgtcctggtgtcccgggaggggttctggtccatgagttatcctctgttcttgaaaacttcagctaggaccatgcttgtcccatcagactaggtccaagggctctttggtcttcttagcttctgcactgccccctttgagtgtctggggactctcagctgctttacttgaacactctgggatgcactggacttttctcaaggcagcctgtcctcaggcccaggcatatctgctgccaggcctgctgtttggctcaggccatgttggacacgggggctttgctatgaccctggtggtgtccagaactaggctgggaagccaaatggcatccctctcttccagtcttctccatcaacctcttcagtcaggaggaggccaggtgatgcagtttggatatttgtccctgcccaaatctcatgttaaaatgtaatccccaatgttggaggtgggggctggtgggagttgtttggatcatgggggtagatccctcatgaatggcttgggccatccccttggtgataagcgagcttttgctctgagttcacatgagatctggtcatttaaaagtgagtggcacctcccgcacctctctctcgcttcctcctgctctggccacgtgacgtacctgcacctccttcaccttctgtcatgattgttagtttcctgaggcctcctcagaagcccaacagatggcagtgccatgcttcctgtatagcctacagaaccatgagagaattaaatctcttttcttataaatttcccagtttcaggtatttttttatagcaatgtaggaatggcctaacacaccaggatttctcttattaggtggtgctgaagagtggaagctctgagtcactcctcagaaacctttcagggtctagtaaagagcagctccctccctctgcttctccccttcccacctgctggtcaactctgttccttggagtgggaacaaaaacaaatagctttacattaccatacattcttctgtactccgtggtttatgatgtaaaccttatggtctaagttgtccaatactttggctttggaggttcaaggaaaaaaaacataaaatacttcttctttcaagcctagccttaatgtttataatggacagtctttcaaaatgtcctgccacatgggccataggagatgctttatttttcaggcattggattatgttgtgttggtcaatatgattttgtttcatgtgcattatcagaaactcttcccaaagagggtcctgggatctgatcagctagacaagtggaggagaaactgaaaaccctcaggggacagggtctcagttaagtctcctgaatgataagcatttcagaggtgggagggagacaccccggaaggtgtccagaggctaacaatgctatttctgtttcttgtaagtttttgtccaagatgtgggccattggattgcatcactagcatacaatgtcagtgtaagcagtaggctttacactaaagcatgttgatgtgctcagagcatttttgtggtgctgagaccagagcagatagggatacagggatgacagtctccaccttacggaagcctcctacccaggggatggagtgagacaggcaggcacaccagttatccaaggaaaggaaataaagggaaggagaaagtcagtgaaagtggtcaggatggctgagtgagggagaaggtgacttgaaggtcccagatagaacagtggtaataaggtgagaaagaggaggtcttccaattccatttctgtgttgggcgggtgtttgagagtcccacctgggtctagaggcctgcatgtctagcaggacactgggtaggagtggctgaacggggacaacacttaaaaaagacaaaaattacggattttatttctacatggttgcacaaatcaatttcactttctacttgtaaactgcttaaaaaccttcattatgaaaatggaaggacgaatttatgttcaccatcatagtgcttctgggctggttccacagcatggagccaggcccacctgctgtagctttcagaactgccatttggacacgtggttgaagcagccttcagttggaggattcacagtaatggcatcactgtgggagcttagaggaacaactgcttgcaaccccagctgcactggaattacctgggagctttaaaaacactgccttttgggcctcagccccagagactctgacgtgactgatctgaacacaggagtgtcatgtcctccggtgattctgagtggagtcaaggctgtgagaccttctgctgtataaaggaatattgagagctgggattgttaaggaattctcttaatgctacgtcactggcctctgatgtaagcctgctttctcgaggaaaaggaaccataaaagcttctggaaacagattgtttaagaatgagaaattgtcatcatgccaggttgcaagacagcttttagggcagatgagcttctgctgctcattccttcatcttttcctccagcctggatttgtccgggggcagctgaggctcaggttacctcaattcttgagtttctgaagaggcatatccaggggtgggttacgagaacaagagcctgcccagtctgaaagggatgcaggaaggggcggtgtgtactagaaggaaggaagctatcatcatttattaaaactcttcttggaggatggcccatgaagacctccaaacaagctggaggggccagtcacttgctgaagactagcgaagtggagggggaaagcccgagggagctgcagactcgaccactgcgccctcccctcctctccctgcaaggagcccaaggtgtgatcctgccaggcgttcgttcgctgcatgaccttggccatccttccattcccctgggtgtgaattctcattggcaaagtgagctggtgggcataagtgggttttaagtttaaaaatttaaaaaccctgtctgcccccaagtgtggtatcaagattttatagtatgacacttaaattgcttttttcatccgggcgcgtaacagcaacaatgaaaccagcagataacgcgtgagtagtatcagctctgggcctggcactattttatatgtattagctcattttttttaaaaaactgttttcaaccactccatgagatgagtgctcttatgatccctttttcacagaagaggaaacggaggtacaaagaaattagtgcacaaagccagtcggagagagcccctggccaggcaccaagctccagaggtcgctctggcgagcgtttgcttcgggatctgatgccctggagtcgccaactcaattcgcgggtcgcagccaggctccatgggggtagtagagccaggtcgtagtggctaggtgagttgtctcaactaactctagtggagccgccgcagccctggaggagccgggccgcgactcgagagcgcccggcagctctccaatgctttggaaccggcgggacccctgcgggctacccggggcagggcggtgtccgcaggggtctgtccagccgcgcctgctcctccgggtggagagttgggacacccggccagctcgctcgcagcccgcggactggcccagccgagccgtctccgcccgttccccgcccccgcagcggcggggctagagccagagccgcgcccggcagttcccggccgcgagggcgggcgcagcttgtggccggcggccggagccgactcggagcgcgcggcgccggccgggaggagccggagagcggccgggccgggcggtgggggcgccggcctgccccgcgcgccccagggagcggcaggaatgtgacaatcgcgcgcccgcgcaccgaagcactcctcgctcggctcctagggctctcgcccctctgagctgagccgggttccgcccggggctgggatcccatcaccctccacggccgtccgtccaggtacggggaagctggagcatccggggactaggtaggggtgagacggaccacagccttgacaccttcgagtcccccgctctgcaggacgccgtgagcgtcctccctaagttgcacttggttgtcagagtgtgttgtgtaagaaggggatggcggtgaggtctgcgtgtgtgtgtttcttgtgtggagcaagagttaacgttgttcaggtcgtttgaaggaacttgccagttgttctggaggggggttctaggtaggtgtgtgacttcccgtgtgaatggctttcaggttttctatccggctacgttctacaggttcaggagcgtccctcttagaggttaggctcaggaccgtcagtctccttaacaaggtaagggctgaggccttaaccacactggggagggtaacttgttgcccctccagataaaggatggtgctagggaatgtagctacaagcaagtaggcgctgagaagacactcattatttacaacagtcatgcccagcactttacagtttataagcccttgacagcaactggtcttttaccctccctacagtcttgtgaggagggtgctgtcatcacccctgttttacagcgggggaagcagaagtttaggtgaccaacttgttggaggatgatgtcctgaaggagggtaagacctctgcatgcagcccccctctgtcttccctcccactcgtcctgcctgccagggctttctcctctgcactgccgggaggaaggaaggccgctgggaaggcacgcagatgctggctcctgctgggctgtctctccac

SEQ ID NO: 8494 - DNA, 6000 bp, Homo sapiens
gcagctgttagaccagttgagcctgtaccacctgactctagactcataggaggctgttgacatctctaaagctgtgttcaaccagttgagagattaatttacctacagggtgaagttgatgaagcttgtttttcttagaacctttgacctggaagtgatcccaagtgccatttggcttctgcttccgggtctgggaaggctacaatgataccattctacagtgttcattggttttcctgtcaatctacacatcctgaggatgagattccttaggcttctttagtgaaacggtattgcatgtttcacagcctgtgtggggacccactcctgctttggttcatgtagttaatccttccctggctaacactacattttccctccacagccatgttacgtcacttaccctgcttagccagggacagactgcagcttctcatttgctttcaaggctgtagacagcagccatctgtttcaacagtttttgtcgtcagatgctattccgtagtcctgccttccacactgtacttgattgcttctgaattcttgtctttcctaaaactggacccatgtcctctctcaaattcaaaaacacaggggaaatatttgtgttctcaagcgtacttttagatttttaaaaagtgctaaccaagtggttaacattatgctagacactgagaaaattacaaggtaagaaaaaacagaaatctagccagagaagaagagtgtgaagagaaagttgttcaggaaacaatctcatatgacagagggtcttaaacccatgactgaactatttggactttaccactaggagtaggtatatgggagatattggaggcaacaggttggaagaactttcgacataaagaaacacattgatagggcactattgtacagcagattgggaggaggtaaaaggttacatagggaggttgttaggaaggtggtagagtaatccccttgggagtcaattatatttaagacattttataaaataaattaggagaaacttctttttattacgaaagcaataatggtttgagagaatgtggaaatttctaaaacatataaggaagaaaaatgtcacccataacttcacaacctaaagataattattgatattttataacatttctatggatataactgagaccatataatacatggagtttaacactctttttaaaacttagcataaatatttgcccacattactattatacgaaatacaatctataagtagtcactaagtctatcaaatggatggtccataatctgatagctttgctgccttcagtggacatccagattatttctagttttagctatcagtagtcaaagtgcaatagttatcctttctcaaatatttttacttccctaatcatttgcttagcatatattcagagggcaagattccttttcaggttcttgatgttccatagagacatttgctcctcttacacaagcagtgtgtggcactgagaatactcattattaaatcattgctaatttgatagacaaaaaaaggttatcctttgccagttaactattaacatggttgaatgtttcacttaacaattacaattggaggcgggtggatcacttgaagccaggagtttgagaccagcctggtcaacatggtgaaatgaaaccccatctctaccaaaaacacacaaaaagcaaaaaacaaaaattacctgggcgtggtggtgcacgcctgtaatcccagctactaaggaggctgaggcagctgaggctattggcttcgtctgtgttattttattttggaatttacaaactgtttcctcctttgtgattttgcactagctgtttcctactttggggaaagcccttctcgcagacctccacatgctggactccttgccttgacaagggcctctgctgcaccatagtcccttctgaagggaggacttccccaacaccctctccatcacttcatcataattgctttcagggttctcaccagcctgaaatcatccttcaaaattttcttatttacttgacactagaatgactgtaaactctaagagggtctgtcttctgtacagctgtatttctggcactcagaatatcacctggaacacagtgggaactgtataaatatttgatgagggactgagcgaactaatgaatggagctcgagggagtgagtgattaagcccaggactgcaggaaaccaagtgctttaaggacctccttccagtctccctggctgcttcttccatttctagaagtccatttcatcccaacaatagcagtctgctacagaaatgctgctatatattcccaagcctcatagaggggaaatatgagaacttaagggccttaaaggtataaagatcttggtggagccccaaacacccaccccagcctaatactgggttttggaaagtttaattgttgcgtgtgaatatatttctgtttcattctcattgggaaacattatctgtgggatatggccaatgggaaataatcagatatttagttagaacaaataaaaggtagtatgcatcatgtaaaatataaatttgtatatgaaatctttaatccaaattgttgccctcctacccttctgaatagccgtcatatcctagtctgagggtcaaatagactgaaggtaaaattcaaccaagcagaattctgtaatgctttcatcacacacagatttgttgctttttgcctgctctcagaatgaagtgatgaatctctagaggaagttgatttacttcataaaaaaaaaaaccaactgaaaattatttcctatggccactgactaatgctagaaaacattaagaatattcccattgaaaaaatatctgcaagtgggagagaattagacaaggaggggttggtagggggatggtgataagcatctattacatattatacaccctgttatggaggctttacaactgccacctctgaaaactgggcataacctctcaatctaaatgtatataaaataaaatcacaggatagcttttacatcagagcagcaaaactggcaaaatttaaaagtctgacattaccaaatattggtaagaacatgaagcaatgaaattcttttcctctaaaggacatagctatggaaaaaaattagggcttttctaatacaattgaggatgtacctacccaatgattctgcaattccgttcactaaatggcctctgaaatactcgcacaaaaggacattaccagaatctttgcagcagcaccgtttataagagcaaaatataaatttggaaaaacttaaatgttcgaaggagatgaatacatttaagtttttttttttcaaggtaattgagaacctgcagtaaatattatggtttcctgttatttttaattgctaagtttacaatacccggaatcagttctgccttcaaagccaagtgttcattttccacgtatcaggaaacacatttggcatagagaccatcccaggaagttaaatttcagattctcagaattagtagcaaagtgcaatgtcagaagtgtccagtgagaggcactgcaggggactgggatggcctgtcttaacttcatacattttggggcaacaatacccattaaacttggcatatatactagtcctcaggctaagaaataagataggacacaaatgcatctattcataaagtgaaaatgaaaaaagatagcataaagatttagaaatacctttcaacactgctcatagaaataattctgaatgcaaatcatatgacttttataaaaatagtaacacttttgttttgttttggatgaggacataaacgctgaagaatatacatatacagaggaacctcgtttactgctgatagtaggggaaataaataataatctctatttatagcttaagaaagaggtcctcaaagagtgggagccctatgggtccctgagagacccttcaaaaagatctgtgaaatcaaaactatgttcatcgtaatattaagaccttatattccttttttattctcattctctcattagtgtatggtggaccttttcagaagctatatgacatattatatcatgacactgattgcagaagcaagtatgagaatccagtcatcttctagtaagccagacatcaaagagatctgcatctatgtagaacaatgccgcttttctcaataagcctgttttagaaagtagagttatttttcataaattgtatgatatttgcgttaacatgtaatgggtttattgtcacttaaataagaaagtaaacgtttaaaaattctccctttaacttctaatgtagtaatattgacaggcataacctacatagacaaaagcactttggaatcctcaatactttttaagagtgtagaaatctacaaaccactgaccttcagcctatcacaggaagctttgctattagcacaattattgcatctctgctcctatggttgcttttgtctcactgtctctgatctttcaaagaccgttgggaagagcttgaccagtaatctattgaatggagattacattttgaaccttttcctacaactcagtgccctgtgggatgactctggggtgtctcctgatggctagggcaacaggtccctgttgacatcaccttatcgggaagttttagacaggaacagtcttcaggctctgaagtacttgaacaccatgggattcctgccttacagaagttaatgagcacgactcaggcagattcataattctccttagaagccatttgggatggcttccactttggggtcattccacataggccaatgcagagcatgcagtaactgctcaaataggatttggaaaggaatgaataattcatttagacgttcaacttggaatagacttaagcagacactcctggtgatgaaggacttagatgccagaaaatcaggctcaaagactttcaagccacttcctagtgtgatgtcacattccttcctacgctccactggggaaggcaggtctgccccgcccacggtggcggggaaatacctaggcatggaagtggcatgacagggctcgtgtccctgtcatattttccactctccacgaggtcctgcgcgcttcaatcctgcaggcaggtagacaccgggccgggagtctggctgagccaggcatgggtggggccctgacagtaggagaggtgtgcaggaaaagacgtggcaacaatgtgtgccaccgcaggccagggatcaggccccccaggccggcccccgaccggctaggtgaccatgggggagccgactccgtctctgggtcgaggagtggagctcgcggctattttcagctccagcggctccctgccttcctttctcctttcccgctggcccttgccaggtaggcctgccctggctgctccccagtgagcgggtgtttggggtttctgtttagaccgccaggctcgggtggatcccgaggacacaggcgcgcaggggaggctccgtgcgccgcgagcggggttggggtcccacgtctggaacccaggccgcaggctgcgctggggggcgccctggccctcacgggggctctggacaccagcctgcttcgctgtcaggtggcagaagcagctcccacgcggtccccaccgccgccgccgcctactcctcgcccatcctcctctgcggcggggcgagctccctgccctggatcctggtcgggcgcccagacgaaggagacaggggaagggcagtctttggggaaacgtggggccaaagtcggagggctccccaggaaaaagggaaggtcagcggcctgggcggttgtctttgagattccgaggtcgcccacgccggcgcctcgggcccgccctactgcgtcctcccctcccaccctcttctcccttccttgcagcccggtttggggatgtggtccttgctgctctgcgggttgtccatcgcccttccactgtctgtcacagcaggtacgttccgtgtgtcctccgttcccagaggctgcccgagtccacaggctcctggcctgtcattgggagcccccggggat

SEQ ID NO: 8495 - DNA, 6000 bp, Homo sapiens
agattggagcaggttaaggagatggggattgggagaggagacattgcaattcaaaattgattggtcaggaactcaaacaaatacttggacaccgatagcagcattattcaaaatagtcaatagctagaagcaacccagatgcccattaagggatgaatggataaacaaagtgtggtaggcacacacagtggaatattattcagtcattagaaacaataaagtacagacccatgctacaatatgaacaaaacttggaaagattatgctaagtgaaataaggcagtcacaaagggcacttattgtgtgactccatttataggaaatattcagaatagataaacccatagaatcagaaagcagattggtggtggctatgggtttgtggtggaagaggaagaatggggacttcatgttaatgggtatggggttatactcggggatggtgaaaatgttttgaaactagatagagttagtggttgtaccacattgtgaatgtaccaaatgtcactaaattgtgcacttcgaaatagttaattttatgttatgtaaatttcagcgcaatttttaaaaatcagaagcaaaaaaagaacagaaaattgagtagttaggctaagtctcacagagaatgtacagtttgagtgctcacttggaggaggtaagttagctcttggaggaggtgggtaacaggaagaagctgtccaggcagaaggaacaatgtctgcctagtgccttcaaggaacagcaatgaggatacggggttggaggggaggggtcagagaggtgattggtggtgttccatcgtgtggtacctcccagcttctgtaaagacgttggcttttcctctgggtgaggtggaagactttggaggcccccttgatttgacctaggttctaacagaatctccagagtgtctgttttaggaatatacttaagagggtacaagtggaagcagggatagcaatttagaagcagttattaaaatccaagtgagagaccatggtggcttggacaaggatggtggcattgagaatggagagatgcaattgcaggtaggatgtcctttgaagatgaaaccataagttgtcctgatggattgcatgttcaatatgtgaggaagagaagagtcaataataaatggagtcttggtctgagccaacattcagcatggagttgtcatcattacaattagaagacaatgggagatgctgaattttctttggggcaagggaggcaaggaggctggaggagatcagaagttctgttctggagacatgaagcttttgtgaattccacttgttccttgaatatatgatggtttcttctgtttttgtttgtttgtttttttaaattttagattctaaggtacatgtacttgtttgttacaaaggtatattgcattactggtggggactggtcttacccaaattgtgaatattgtacccagtaggtaatttttcattcatcaccccctaccctccctacttttggagtccccagtgtctattatttccatctttatgtccatgagtacccatggtttagctcccacatatgagtaagaacatgtggtatttggttttctgtttcttaactggttcacttaagataatggtctccagctccatccatgtagcaaaggacataatctcattctttttatggctgaatagtaatccgtggtgcataggtacaacattttctttatctagtcaaccgttgatggacacttgagttggttccatgactttcctattgtgaaccgtgctgcagtgaacatactagtagaggtggagaggtgtcttttttatacactaatttcttttccttagaaaagtagtgagatttctgggttgaatggtagttttacttttggttcattgagaaatcttcatactgttttccttagagattgaactaattgacattcccagcaacaatgtataagcattcccttttctccatatccatgccaacatctgctgttttttgagtttttgataatagccattcagacgggtcttctggtttttggaggggaggattgggtgaagcaagaaggagtttggagggaaggagtggaggcttgagtgggcctagagtttggagtatgggcaagaaggatcccagagacaagcactttgcccacagctacacagctaatggagctggggggcccagcatattctccagaggcccaggctaggccgtctaggggcatgcttgttctgccccatccactgcaggtcctgaaaacattttcatcaataaaaaaaaataaaaaaacagaataaaaatgatacccagatgtcctctagtgaaatgaggggaaaaaaaacatccatccccagcttattgtgagagtcactgaatgagagcctgactcactgaaattcatataagattaatgtaaccaagttccctgtcttttgacactggtttacagtaagagcaggccacacatggccagctctggagtgtgttaggacatttacattttacatttcagtgtgatatctgctaagtcaaatgaagaagtcttgaaagataccttctaagttcggaagtatttgagtgtcacattccatatgccagcagttagttgttgccctcaaaacataaggttttgtttgttcttttgttttttgtttttttaatggttatgtaagtgaagtagattataaataggcacatacaggatttcaaaactgtaacaaaattaagaaaaagctggttcaatgagcttagattctatgagattaatctgaaaagggagagtagttatgagaagtcttaaaaaagtgggtgtttgccagagaaacaagcggacactggaagatttctgattaagttggcagaaatttatgggtgcttaaaatgccttgctttattcatgtattagaagcccttgcctttttgcagtttgtcttaagttgctataaactactctctgttatgttgaatggtgcctgaatagtgagaagccaaaataatttagttcttttcaaagaagaaattatagactagcttattttaataacccagtccaaattataaaaagaaaagctttaccagcctaatctctggtatagagaatgttctctttttttagttgacattggggggagaaaagcttgactttgaagttcagcaagtctggtttcaaccccagccacaactgggtgaactttgtcaaattacttaaacagtcttatccttgggtttttatttgtaactataaaatttgagtgatgttaatgataagtaccacagagtattgtactttgaatgaaaggtcttaattgtcaaatgaacaactgaattattttataggaagagttcaactttaataaatactcctgcagaatttcatcattatgatgttaaaattgatggaagctttattttttaaactgagaaactaatgcttacgtggcctagtttaagaatgaatgctccaacttaatacatgttttaaaaagatgttttgggataccaaatgtaaaagaattccgagtttgtgttattttattgaacaaacctattcagcacttggggaatcgcaggcagcattgcagactcgctggctcctggctgtgatctcacacccaaactgcaataatatcctgataaaacggacttccacaagtaggtcaagaataataatgtgcagacctaattcctctaatttacggcgaacatctcatggtcaatctccccgcggtcaaaggactgtgtatctcttcctctcagagccactccacaggctgaaaggctgactaaacccctgacagataagagattcaagagtagtcccagcccccatggggagcaaagacgctggctcaaaaaacgtactgataactctcccttttgcagctactcctttctgaaccttccacaagcagtggcagttggattctgtgattagtctagtcttcagagccagccttcttgagttcaaattctgacttcaccccttaatgtgaagtgacatgggcaagttgcttaatctctctgtgcctcagtgtccttgtctgtaaaatgggcatcataataatagcgcctgccacattgggtgagtgtgagaatgaaggaattaatacatgtaaatcacttagactgtgtctggcatagaggacattctaaagaaaagttagctattatcattatattattatatgggtctggaattagttcctgaatccttctgagatgtgatgacttataaacgtaggttgagtttactcatgatagggtcatcgcaactatgcatagctaaaatcaaattttgcttttcaagtttgttttacctggagccctagagttcagggttatggttttctttgtcactccccttgagggaagcttcttagtcacactctccttctctttctctgcactctatgcactctagaaaagctcctttttttttttcttcatccaggcagagaggcctactgggacttaaatccaaggagctgaaatctgttttgggatggggtggagtcacattctggaacctagacagagaatttctaagttccagaaagtgctgcttacttcgcatttcctctcccccacctttgcttttgaaactcctggcaccaatgctgccaaggctggcggagctttcctgagtggtgtctgccaaatgaggagtcaaggaatatctggaaaggcagcctccaggtccccgatgtcaagaccatttagaactgaaagtgtcccaatatcggggtacaggcaataagcattagttattaatcagcctgagaagttgattctaaaataggaggaaatgattcaattatttcctctcaagggattactcaatgttgtttttatgtttaaatatttatttgtcaacatcaagaattcttagtacatgatgcaccagcatttttgaacaagtcatagatttggccacaaatcaaatttcaggatgggaggagtgtctcccctttaaaatagaagagagtgagtagtctatgaggagggacctacaaagactggaaactattcttagctccgtcactgactccaagttcatcccctctgtctttcagtttgggtaagcatcaattacttatctaaaatttgtaataagaaaagtcttcataattcatgattgtgtttatctttatgttagtaaatttctatgttggttctattcttccccttatattttaagaaaagaagtaagaaagtaaatgattatttttctgaaagaaaaaattaatgtatttattattattcatagaccttcaactactcttagaaagcctttggtgactcctgggaacaagctgagtcaggaacaaaagtttgagggtttggggttgagaataggacaattacttggctaatgctttagtctagttctgattttgctactccttagttgctttgtgatgactacttgcacatgtgtctgtttgtgagttatttttgtgagcatgctgctaccagcctgtgtggatgtctgtggtttcacatgatacattttattttctaaagtctactgaattttatggtttttttttcaaaaatagaaactcatattctttccttcttaatttagtttctttcaggacattctcatgagactggtgaaatataactgcgaagtagcatgataactgtgaaatagcatgatcattgtgaaagctatatgacccaaaacttccataggaataagtgcaatgcttgcatatctgaaacctgctgttacatctctttgcacttaataaatatgtgttgactgattcattctcctgggtggtgctgagaaagtaaaaatcatggctgataaaaattctgtttatggttttgtctaacttatttttcagttgagatataggctactcttcccaactcagtcttgaagagtatcaccaactgcctcatgtgtggtgaccttcactgtcgtatgccagtgactcatctggagtaatctcaacaacgagttaccaatacttgctcttgattgataaacagaat

SEQ ID NO: 8496 - DNA, 6000 bp, Homo sapiens
agcttccttgagaaggcaaatactgagccaagttgaaaggactctagggacctggcatctgggataagtggggagggtggcccaggtagcacaggcataggcagatttggggggaagcataaggctaacaacagacacttgtgtgacaaggactatgaggtggcattgattttcttggccttacagatgagaagccagattccacacaaattattttgtttgttagagtttaagcgtgtgtgtgtgtgtgtatgttatgccccaagatcattttctcctctttgcatttggttgttttatcatctcacaggctgagtaaaacgactatgcatggaacactgtagaagaaaaattatattaaaaaaaaactggtgttatgattttcatccaggcattttgtctcaggagttgctcgattgtatgtgttgctaatgagtgatttatattgaggcatctacattgattcatgtgtgtccttgtgaatagctgtaatctgaggctggccatttcacttcctcaaatctcaggttcctcattagaaagagctttgaaatggctctttccctgtacattatgtgtttctgtgaattacttttagagaaaggtcagtttctcagggtgggacccataaacaagggcaactgggcagagccaggggttcaggtgactgtttggaccctctggaagggctttttactgtgctgccttgggagacagagtggtcagcttggaactgaccttaagcctaggtcacccaatttttgaaggaaacttttttttttcatttagagaaaacttcatgcctttgggtgattaggtaagtttgtgactattcgttatgtgtgtgtacacacacgtacgtacatatgtacatgcacaaatatttaatatgtcttagacacaccaaatatatgcatttaagatgtattaaatgtactttcctgagaatacaaataagtgccctacgtcggcggctctcttcctgactgtatgttagagtcacctgcggagttctgaggactcaagatgcccagtctgtcctccagaccactgggtggagcccgggcatcattatttttttccaaacttgggtgagagctggtggcctagacttcacattagttgctaaaacatactttccaagatatcatgcgttaaaaagcatttcaaaagtagattgtgcagatgtgccaatggatcagatgatcacctagattcaaaattatgtatattttatggatgtaattcattcaataattcagcaaataacaaagaaacaagcagacataaagtgaaaatatgacagttagtgataagtgctatgaatagaaaaactaaacatgggagggtagaggaacattggtgtgtgtgagcatgtgtgtgtgtgtgcgtgtgtgtgcatgtgcatgtttgcatttggaaaagcatgctgtgctagacttgcagtagagtgctcagggaggacctgtacattataagctagtgtcagcaaaccgtaggggaaatacaggattatttaattaacaatagagaagtaattagtaggtatttgaggaaagtaagtttagttactccctatcttcatgtcaatcaagaaaattaattgttggtggatgaaaaaagttaaatataaaaacaaaacaaaacaatactgagccataaaaatgaagaaactatgtaagcatctatttgaccaccaacaggaaaggatattctacacttaaaagcaatgaaaacatctcaaagcaaaagaatgatcggtttgactacatcaatataaaatttgtcatatattagcataacaaaagagagaaagtaaacaacaagttagacaaacatctgagaactggacaaaagacataaagagatggttcataaacatgaaaataaaatggctgataataagtgattaatatttgcctcatttatacccaaagaaatgcaaattcagaaaacaatgagataccatttttccattttggctgtctaattacattttaaaagtaaagctgctcagtgtgcttctgggtgtggtcgatagatgctgtcttgtgctattgagtgagagaatatgaatattgcaacacttctggaatgcagtttgtcagcatgcatctgtcaggtttcaatgtagtcttcaactcaatcactgtactgccatcgagtaacatccaggaaataataagaaatgtagacaaataataatagctaacatttaagcggtattaccattcaccagacacttgcaatagtaactcatttaactttcacatcagttccaggagatggtattattatccccttctatagataagaaaattgaggcacagaacaggcaagtcagttgcccacagtcggttagctggttgaaggtagaatggagattcaaatccacccaggctgccacctgagcccatcctgcaaaaaaactgagccatcctggcttacctgtgaagatggtcatgtgattatctcataatacatctggtaaatgataatatatccacatgaagtaatattaggtggcaattagaatggttttaacaaagagttttgtgacacaggaaaaatgctcattatgtaatattaggtggaaatgcaggatatgcaatcttttaaacatcttttattttttgagaaggagtcttgctctgtcacctaggctggagtgcagtgatgagatctcggctcactgcaagctccgcctcccggattcacaccattctcctgcctcatcctccttagtagctgggactacaggtgcctgccaacgtgcctggctaattttttgtatttttagtagagacggggtttcaccatgttagtcaggatggtctcagtctcctgacctcatgatccgcccatctcggcctcccaaagtgctgggattacaggcatgagccactgtgcccggccaaacatcttaattatgtgacaacatttataaaaagtacaagaaaacatgttaaaatattatacatgttgagattattttcttctttcagtcttcattttgtaaatctcctacattgagtgtaaattgctttggaaatcagaaaaactttaaaaagaaagaaacttaagagttacggaaaagcaaaaatattgatgttaaacataacaattaaaaacccttaaaattcttacatgtgagacatttaatatttatattcttctatgcctattttattaatacttgctagagtatctgttacatttatcagaatatctctttttctggaaatgaattcattatttaatataaccttaatctgttaaattcacacataaaacttaagtacattaaaaattttacatacacacatccacatttgcagaatggtgtgcaaataccagctaatttttgtatactgagatcttaatatgtttcatattgaaactcagagttaacttgtcagtttgctgagccatctcctgataactttgtctcttggtagatattgaatattttttttaaagtggtgctttttataaggttacatcagtcttaatcagagtgacataaaggaaataacattttttattctatccaagataaaagaataggcagagttaataataaaatgtgtgtggaggtagtgggggaggtttcaaaccatagacccagtctaatttgattatgcacagttggtactttccattcatacttgtttctttggcctttacattattgattattatctcttggaaattccaccaaatatttggtgatttttccataaggatgtatgtgaatggtttggcagcttagccattaagctttatcctggattcaggcattgacaactctgtttttaggatggaagatgagtagttgttggtgagaggggcattattctgagctgagaagctgccatgcactcaggaagtctccataagccttagatggtttaatcactcaataattccagaaacaggccttcttatcatctccattttggtaatgaccaaataggctctaagacttgctcaagttttgcacagcttgtcaggactcaaactggagtggcagcccaggtttgtgtgtttctgaaaccagactctgccatcaggctgtgctccctgcactcaggatggtaaacaagggatatggtgttgtttatgcagtatttagactctgaatggtctccactgtgggggatccttcctccactgggctcaaagttgtaatcagaactccgaatgctaggttgcagtaggatcaaagttcaatgcagatcttagttccactgggacacagtcaatgtaaaggaggggtctggagtgtaggagactgtcacttcatctctccatttccctaaagtaaactcatatgggcagccacagacacacgcgaacacatgcatacacacctatgcctcagtgacacatgttagtgagtgctggccatgtgctaggcatcgtgctggattttagtgatacagtgaagagcaaaatagacttagtgcctagaattatgaaagaattatgaaacctacgttctgaaggaggaagatggagttttaaaaattcaaccctaaatgaagatctcattacaattcaggaatgttttgatgtgaaaacacacacacacactctgttacatgggcagaactgccatacatagctcagcatgtcacagattgtttattcatagaatggtaatatttgtagcagtactattgttctgaactttggccttggaagcaggatttagtagaccaggcctgaaattcttcagactctgttgtatcagagaaataaattattagggatttcttccagaagaaaaacttcattgccttgaaattttattaattttatatggctgaaagttctgagaattggttactatattaaggattataaaaatcttctaggttgtttttttaaaaatctgtgtgccagaagatttttaaaccttcataagataggcacacttttgtttgaaagctttggctgaatctgttttattctgttttccagagaagccatttgaagcagaatccaaaccatgaattgtagagaattacccttgaccctttgggtgcttatatctgtaagcactgcaggtaagtgattatacatactctcaaacatatttcatgagtaattgaggaagaatgtcaaagtttttttttttatgtggtggctactgaagatgctgaatttattcagaaaagaaaagattctgcagtctgagttcatgtagtgagagcagagtgaaaaacttgcatcttgaaataaattacatttgtctgaggtgaaaatttatttcatgttatttgaaactgaggaggtggcagccatctttattattgggttttaggaagtttgaaacacactttctccttcctgagagggaggcaaagattcatctcattatttaggtaataatgagaaaagtaaacgacaaatatattagacagcttaaaaaaattagagtgagacagaatatacaaaaaagagactggctagaccaaggagctcaagtaggcttcatagtagatgtcaaatgccaattttaatttattagcagtgattgcctagagttttttttttttatttgagaaggattctgagacttcattctttagcgttccatgattgaatagcaaggcattccttaggctttgggggagaaagtgggagcacaaatattaatttgccttgatctattatctaggagagggaaacacatgggctcatttccctactttgataattactgctgaagagatagctgaattaagcttttggtactttcaaataacacaggtccaatctcagggtatatttacttacgtgaatccatttattattgagatccctgcaatggaaccctacccagatgataaaagaatgaggtagatcttcatttttttatatgtaatgatctgtcaaacaagtgagtggaaaagcaaggtacaggaaaatgtgtcatgagttccatgtcctgtggacatacactaatagccttactcctcattataatgagag

SEQ ID NO: 8497 - DNA, 6000 bp, Homo sapiens
cccaccccacaagcacttacatcagttgttttgtgcagataagggaacttgcacaggaggcttacctaaacatgcctacagtggaaaatcccatcccttaaaacatgtgcagtaaggaaaataaatcaatatggagcaagtcagtctaagtgcccgcatgttcattggaaggacggggtggagctaccaggaattcacaccttatgccctggtattcaactgtgaagggggcagccggaaacctgcttttcagggtccctgtctgctgagagccttcctttcacttaataaattctactccactcactctttgatgtctgagtgcatatttcttcctcgttatgagacaaaaacctagacctagctgagctaaggagcaaaaatcctgcatcattggtgtggatatattattaatatgtgctccaaaatcatgtgaaatttgtaaaattctgatatgtctttatatacattgtcagatataattatgattgttattttaaaatgttgtctgccacagaaataaccaaatttccttgtcacatgcatctttagccatggctaaagacttagagtactaagtcctttgtcatccacagacatttgttgtcttactttgattcttctcaaaaaacggtttataatcagctatagtccaaaatttgctttttctccaaggagattcttgaaagtgtaccttgacaagtactcttgaatacaggtttctgattactttagatattatatgattggactgtgtaaaaacactcagaactctaataaactgatgcattcacgaagattgctagcccaacctcaagcacaagaaaagttaatgacatgggactgaagtgatagaggactgaaatgatttttaagatgttttgtttgaagcattgctgattctttttatattttgtttgccagagtcatgaaaaaaattcttttcagctatttgtagattatagccattgggtaaaatagatctttgtgagtaaaattgaagcatttgcctttctctccacctgatttctccaaaatttggaaactatatgtgagcatttttattttattggcaatgtagttatttgcataagtttaataagaatctgttttctgtaacaggacacaattggagacactgattattttaccaaggctttgactggaatggcatattttcagatataaccagactgctttgaagaattgaaattgactttatagaaccaatcaaaagcctcttgaaaaggatggcatagtaacttatgtacatggttcctttttaaggtttctaattttgcagtaagtaaagaataccattttctgacagctctagggtcctcaagacatgttggaacctcaagaagagaggaatttacccaatttgtacaggtatcacaggtacatcctggtggcaaattcttggcttggcttcctaacctcgaggcttttaaaagtgtaatccaaaatgccctgtgaaagttccagcaaagccaacttaaaacagcctataggtctaatcatgattcttattgcactttatgcaaataatcagaccaagtataatactatatcttattttacaagtaaattgatcctagtaagatttatctttggtagaaatgggaaactggagagagtaaaattatgtttccaaggaagattatagcatacctgttattagatcgcagccctgaccattaattgtttttgagtttttattattttcctaaaatttggattgaatccccagtgaaataggtttcaccacgtatctctcattgctgtacttcttccaagacaaacaaaagcataaaacttcaaaaactagagataattcaacaagcaatggaagttatataaatcacttgactgggatctatctaggaatgggccttccttgggatgccaagggatgaaggatgcctattctaacctaagcagagtttgatcatcagtgcttccatgggaagatttttgatctaagtggggagaaaagagagaagaaaaatagctcagagtagtgtgagctatctgaggtatgcaaaatttattaggcccagagagatatgagtacgtgacttcagtcatgctccccacctctcacccccccactgtactcatgcctagggcaattgtttaaagtcattttgtttctgactagctacctcattcattatcttcaggttctcgaacatcatgagacagacaacatggatagccaatcaatagcttgtcttattttaatgtaattcttgctaaacaacttagaaactgcctcttattttcctttaaaaatctacttgtaactgctgctggtcagagaatatattcagaacaacttgaatctatggtcccacaatgtgatcctcaagctctgcccaaataaagtctttacttatattaattatgacacagcttgtttttaggtcgaccagcaaaagatcttgcaggtagaagatggatagtatatgtttcttggattaaattcatgactatacactataattatttctctctcaaaaatatgaatagttggaagtcaaaaaagtgttttatttctccttgaaccatatttctgagaaaataataggtatgcacaacataatttgaaacataaattcaccaagtggactcatttccatttcatccaggaatttatctcaagtgaaatagaactcatttggccaatggtaacatggtaatatatttttccatcatctattgctgtctaacaaactaccccaaaatttattgacttaaacctaacatagtgacttaaacttaacaacgtattatttttcacaatgctgcaatctgggttgggctcagctgagctgttgttcttctccatgtcacatctgctgtaggtattcactcacaggcttgaagccgggtgggttagaacagctggggcctggcctagcatctctttctctcctgttctcacaatctgcctagcttaggcttctttacagtaaggtgatctcaggatatttgggcttgttacctggtgtctggctcccaaaagaggaatcggaagctgaagatcttttaaaaactggtctgcaactggcaacagtgtcacttccactgtgttcttttcatcaaaagtgaaccataaagccaggctagattcaaggacagagaaaacacattttatctcttgatgtgagaaacaaaatgcacatggaagtaaatgggaaaaggtgaggagttggtggaagaattgatggcagccatttttagagactagctccacaatgtctacagcaagactttccatctcctgtaagccctgttcaaactctattaaagtgatcaaattcactttaggaggcaactaaatagctgaaatagtttgtatattagttcctgcacaaatctcacgttaaattgtaatttccagtgttggaggtggggcgtggtgggaggtgatctgaccatggggtcaggtttctcatgatggtttggcaccatccctttggtgttgtccacacgatagcgagtgagatctggtagtttaaaagtgtgttgcatccacccgtttctcacacctgctttcaccatgtgatgtgactgctccccttttgccttctgccatgattggaagcttcctaaggcttccccaggaaaagatgccgctctgctttctgtgtggcctgcagaaccatgagccaattaaaccacttttcttagaaattacctggtctcggatatttctttatagcaatgcaagcatggcttatacaataactttagattcagttttgaggtctgcatcaagatctctgaaacttcacaaggacagcttccacaccccaattcacttgaatatagttccattcaatggttattgaacacttaccaaaaacaacaccttattattagcctttttcattcattcaacctcatttctccaaaacttcccgggtctcctgcccttgttcttactactgggcctgttgccacatgacattgtaaacctgaagcatcacatgcctggagtgtctgtttcactgctccttgttaccactgttggaataggcttggaacaaaccctcacatcctcttggaatcctaggtagactcatgaccagtggtggatacatttttggggctccttcctgtctgcagttactaattcttcttgtatcctcctaccctcacctcaggtaaacacttattttgctttcataccaaagtaaatttagttttcatttgtatttcatgttattctctacatatgtgtagaagcagcctggagctttgatgtgctcagctgtgccagctttacctttattagaatactagactcttgacggaggatgttatctagacttcaccaagatggtttctagacaaaactcattacaactattgtggtctcagagtttttgaagtattaaatggtttcagttgctctatcaaaggaacaatggagttttcaattatatgttatattctgagactatctctcaataggaacataaaaactcaagtaactttagactttaaatgtattttcctttatgtattaataaattattgctttataaaattggtgttggagacataatttttctttttcaaaattagaaagttaatcacaaaataggctttagtgtttatctcaaaggtcacacttttagagattagttttacaagaagaaaaccaaaacccacagttgagaaattgagttgaaagttaatattctttacaggaaattcctgtaaaggaaaccagcttactcactctttcaactaaacccaaccacaaactttatctcatcaaggaggttggtcagagaagagtttgagatgcttcttcttcagagcacttcctactgaaagaggtagtttatttgattttcctctgtatgaccatccatttcacaatgtccatggtcatttacaaaataaggttttcctttttcctccagttataatcctttatttttgagctggtgtaacgtggctattgtgtcttctccaggtatctctctggataggaagaaatatagtagaaccctttgaaaatggatattttcacatattttcgttcagatacaaaagctggcagttactgaaataaggacttgaagttccttcctcttttttttatgtcttaagagcaggaaataaaggtaagagagcagtacttcttttttttcactagatttcctaaccagaaaacataagttgggagaatagcttaaataatttaaaaaatgagttgctaatacaattacttttcaagaaatattttagaataacaaaatgggttatttactaacaaaatttacatctccatatatacggagtcttcacttaaaaaaactgatggttataaaataaacccgtttaaagtgctttgagcattttacaggaagggctaagagcagagagattcaagatatttgccaaatttgaatgcccatttaaacttaactgtaacatctttgatggcaggtactacagcttcattttctgttatccctagacaatggggtctaaagccaccatggagcatctgagaatcataatgatattagttaaattaaatactgtcactattacacgagaccaaatctctgtctgcaggtgttctctgtgtaaagtagtttaagtctgcctttgatggtgacatttctctccctgggtctcagatccctgttgacactgctttctccagcactttcctctctctcccccgtttctcaccaaaaagttttgtgggtaaagtttagttcattatttctgccagagacagctgaaggtgtagccttgaccaactgaaagggaaatcttcatcctctgaaaaaacatatgtgattctcaaaaaacgcatctggaaaattgataaagaagcgattctgtagattctcccagcgctgttgggctctcaattccttctgtgaaggacaacatatggtgatggggaaatcagaagctttgagaccctctacacctggatatgaatcccccttctaatactta

SEQ ID NO: 8498 - DNA, 6000 bp, Homo sapiens
gcaacagatactttagtctcagagtgctacacaaatactttctggtaaagtcaacaatgagcacacgttatgggaaggaagaagaggtgtgctgattattttgttgaaaactattcctggagagaggtgactttctaattcatcatgtgtaaaatatggtgtcagttctgccttttttttttttttttcctttggagcttctctaaaacagaagttgcctctagaaaactgagggtaaaaagagaagaatgttccctaagctcctcttctggctatgcacagctgaaaccctgggggatggatgggagattctcttgccatgtgtaccaccctcaattagtcccatgagggaagacaggatatagcaatctaaattataaggcacccactggggagaggatgtctggccattcctttcctgccactgggctctatgtgtgagcgggtttctatgaacagatgacaagaaccacagggattcttgggactggcaccaaaaaggggtcaggaaggcaggtcagagaaggtcaagtttctacaaccaatatagttatctgaataattagatcaaaactgtcaggtatccaatagcttgctgcggacctaaaattccaggatgattcttttaactctctgctttgcaaatgaaaactgtttatattttcccttcaccatcacaagtataaacaggaaagcgcacagcaccctgcgatactctggtgcacctgtgaatggatcttttctgagaaattaagttaactgataattattatttggatcatatttccatttatttagatcttctttaaacaattttttttagaatacaagtgtgacacttttttgataaacttattcctaagaattgcattttttgatgctattataaatggcattattttcttaattccattttgttttattcattgtcactataaaacacaatttgtttttgcatattgatctcatatcctacaagcttgttaaactcatttattatatctaatagttttttagtcaattattcaggatattctgtttaaatattttagagtaatctatttaaaagatcatgcaagtggaaatagtttgactttttttccttccaatctgaatgccttttgtttcttttcattgtctaaatgccctgactaaaagcagctctagtagaatattgaatggaagtggcaagagtgtatctctttgtcttgttcctgttctttcagggaaatgtatttagtcttttccctttaagtatgatgttggctgtgtattatcatgttgaagaagtttccttccattcctgacctgtagagtgtttttaaaataaaaggttgttgattttgtcaaatgcttttctcagtctgttgaaatggtcatgtggttttgccttaattctattgacatgtatgttatatgaaataatttttaaatattaaaccaaccttgccttcctgagataaatcccactttgtataaataagtttgaattgttacatcttcttgatagattgacacttttctttttcttaaatgtccctctttatctctagtaacatttgttattttaaagcatatttcgtcagtgtaaagccactcaagttctcttagcatagtgtttgtgtaatatatcttttctcattttttttttttttactttcaacctactggtatctttgaaactaaaatgtgacttctgtagacagtatgtagtccataatttttttctgcctaaaaactggatattttagatgatttcttgtagcaattcttgatgctgctttctccccctcccccaactccagggcttgttgttgcttaattgtttgctgtttgtttagtgacttggctggactatatcagcaaagtctatttccctgtgcagctttttatactgatcctcagccagtgaagcctggggcatggttataatacccctaagccctttctcccttcccccagaataacaatggttttagcaggcttctctgactttctttcactgatatattaagcttctagctggtctgttgtatctattgacatcacactcaactgttagcctccagtaactgctggctgaaatggcctattgttttcaacaatgccttgggttataaattactccacagtccgatccaattaaagtcaggctcctttgcagggtaatctttgagaccagtctctgagacatgttatagcctcaggagagctcttttcagccatctctttttctggttcttctgttaaacttctagttggtctactctttaacttattgcaatcatggagctactagcttttcttccttgctcacaacctaaatcttcattgtttttgacagtgcccttaggcttgaacatctctatattttgttccaaataaagttagcatacttagagttagttatagagttctctgttctatagcctgtctcctctccttggcagaaactctgttccactactctggagatggggatagagatagtaacctacttctcttggagtgatacccctggtgtgtgagtgggatgctggactggggtagtagccactggtcatcttggtttatttccagtgttgtgaaaactcagtcttatgagtaagttgagagttatcggggtccagtattcctaatttgctgtttctggggtagattcagttacatttgcctgcaatagagtctgttcaacatattgctaggattggggtagggcagagtttggttacgtatgctgacaacctgacttttctgggtagaaactgtagtcataaactgggatctgggattagaggcagccccatcctcgtggctacattcatccagaatagagtttttctcacattgagctgaggggtgggtagagaaaacaggccgtgccttcaggtcttaccaatatttagaagatttttttcaatttctgtctgctcttaggacaatttccagagactggatggttgtttttgatttttaatgatctcaccagttatagttgtttcactaggaaatctatggtgcttcttatgctgtcattctagaagagcttctcctttcttccccctttcccctcacttttgctgcccttagtttgcacttctcatggaagctttgtctcacatacactttctggggaccttatactaagaaatcattttagaaagaatgttctgacatctgtaagaaagtactgcatgagtggaagtgatgccgatggttgatgaagtgggctgctacatcttaacctggaccacaagttagtagactgttgcagagctcaagttgttctcttaccatcctcccaagattggcatttttactctgagagggactggactatcagccatcaggtgatcataaggctaaacgggttgccatatactcacaaaatttggaattttagagcaggaaagggttaccaggtatggacagcatctttattttatagatgagaaaactataaaggctcaaactataaggctcaaacaggtaattttccaaagccaatcagataactaatgtctgagtacataagtcttttgattcttcattttggtctttccacaaggcactatgtgagacttgctccctcatttctttttagaaagaaaagtacaataaaatgcaaataaaaataaaacacctattataaagcagctttctattaaaggatattcatatattctttgagaaaaaataatcgactcaatatgtgtacccttcttgtagtccacctgatagtctcatttcagtgactgaatctaatctattctggagtcaaactgaaggaaaaagaaaaaatattcatatgtgaacttttaattctattgcctcactatgaatttgcatctaggtgttagcccttctcaaccattcctttctcaatttcccagtgatgttagctgagtgtgtgtgtgtgtgtgtgtgtgtgtgtgtgtgtgtgtgtgtgtgtgttggctggggggaaatcccctgcactcactaatatgaactaagaaaaaacaaaacacaaagcatcttgcagtttgatgtaaaagagatgttggggtagtatatggatgatgtattattctcattttttactgagtatcagtaatcattgcaaaagtgttgtatcttatcctaaaagtataagaaatgtaatttaaaataaaaactaacatttaagtgccaactacatgccaaattctttacttgctttatctcatttaatgttcctagctactcaatgaggcagatattttcctctctgtttcagataaggaatttctgaaaggtaattaacttcaccaaggtcacctggcaacaagtagaagagcgagaagtaggctcataaaaattatctcaaaattctttcatcaacattctatgatgctgcttctttttaacaacaacaaatgttttttaaatggaaaatctggatgtgccatggagttttacaaatccaggtatttaggtgtatttatggaacttgttctttggcttcctgttttttaaaaattatagtgtaaagttcatagagatctgaacttcattccttctatgaatgactgctcatggagtctggtaacatgcaaaagtttcagtgtttgctaccatccttgttgttaccacctccttcttatcctccttcttcctcatgtatagagaccatataagacagtttgctggacaattctggtttgtgcctatagctttgcataattatcattattattcattccccaaagtgtcctggtttagataatttcatggtcaccttaacgttcataactgaaagtgtcaagggtgttgtattgcaggtgcccactaggtgtcagcagtgtgacctccagagaaccctcagagaaaggatttcattacaaaagtcaaatcaaagcaaataattaagtgtagttccagagctacctgaagccgtggtcattcaaaacaaatgagaggacagggggaggagagaaggaacaagcgcagatcaggtagctccttcttgggatctgatagacagggaaggtttcctttcctcattagaaggactccagtgatctgtggaatgagcactacagtatccttttaaattttcacccacaagacaaagccagtatgcagtgaaatgaggaaatgcctttaagtgaagagatttttatttctttcataaattgctcaagccatgattggatggaggtcctccaggtagctccatggactttaacaagtctattgaataactgcatttgagttggaagctgagttgcctgaacacaaacgatttaaaccagattagaaagtgtctacatacagagctcaataacacactcggaatcttcttgggaggacccacagactgtacctatattacttttgacccaggtggatgcagtcactctctagaagcctccccgacttcagatgtgtggcacacatccacacaggggtgtaggtaggagaagcccacaggaatggctctgcagatgttcgtgacttacagtccttggaattgtttgctactgctagtggctcttgagtgttctgaagcatcttctgatttgaatgaatctgcaaattccactgctcagtatgcatctaacgcttggtttgctgctgccagctcagagccagaggaagggatatctgtttttgaactggattatgactatgtgcaaattccttatgaggtcactctctggatacttctagcatcccttgcaaaaataggtaagtccttaaacacctggtttggtgagttatctttttacataagatagtgaatgtgaaaatgccttatagataacgggctaagaggattttaactgttactgctattacattaaaaattctcttcccttcagtcaagggaaagtcataactgcattttactaagctatttaatactttgagattgctctttgaaatttgagagcatacttctgggtactgggctgtgttggtttcttctcatttcagggtgacaaccatgtgacattgttgacatgcaaaactctc

SEQ ID NO: 8499 - DNA, 6000 bp, Homo sapiens
ttagttgcaggtacctagcaactatatatactctacaaatatttgttgaatcgatgagtgagtgtgccttatatgtaacaacagaattctatttagaagttcctatgggaactgtaaaagtcatttactatccctctaaaatcatccttatttctgtatctctctttcccctaagaagtagggtatataagcatcagtacccaagacagacctcagtttttctccctgcaagatcagttcagtttttgctttctgattgcattgcatgtcagagttcagatgatacacgacagagttgaaaggacagggagtctctcttcccacatgtgacatcacagtatctggagcaggatgtaggtgtgtgtccattctacacggatgttttagattaatatcttaaatttttaaaaccttttataaagaaacataaagttacttgtccccaagtcccttattttatggaggaaaaccaaagcactgaaaaacttggtggttggatatctgaaagctgactcttagcttaaatatattaggaggattcaacattaaaagtagcactgttagctgggtgtggtggtgtgcctctagtcccaactacttaggaggctgagaaggaaggatcacttgagtccaggaattattaggagtttgaggccagcctgggcaacacagtgagactccatctctacaaaaccaaacaacaacaaaaaagtaccaagattatttataagcttgaatttgcagaaagtaccttttcataaagcaaaacatttctctgctgaaacaaatatatttggccaaaaagaaagagaggaaagtattaattctgtgggcatcagtaaaatgttcacgccactgcatgactgctctctaagaagaagtccttagatttttgctgagaattaagtctcttaaaaaaagaaagtagtttaaacattgagaactttcaaatataataataaaataaccaaatcaacagtattatgagagtcaactttttataggcaaagattctcaattgatatattacacaactaatggctagtggttgtgcaatgcacattttaaagaaaggggaatataaaatatgaatattataaaaatgtgcaaagaatagtatgacatattaatatctaactattattagtaactattgcgactattacactggtatctgaggatggagccgttccctggtctctgtctcttgatagagcatacattgctcctgcatgctagcttctaagggaggtgctaacctctggcgccgcactgtggtgcagaagagctactgccactaatgagcagttcccttcctctgtgtcagcttccactctgcatctgaaaaagacagatagcacattaaaccttttggagttgtgaagaatatgtttgctggcatgcagagacctctacctgctccttcatacagaagttcctgaggtttcaacattctacaactcttcagtaagctctaagttctgtatggcaagagacacaaagttaaacctcagttcctcctgaagtttccagtgcaggagcgggggatttaagatcagtcctgggttaggtcaggatcctaatctcctctgcacagctcacagttttatattttaaggtgcatgtcctcttaagctaactcagctttatcttactagtttctttcccttgtaccaggaagtattccaaaatcctttgtgattcctagtgatgccagatctactctcttgcttgatggctgtataattcaggagagttactcctattaaagtattccattaaatacagtaatattctaatggaccactcttgagcaaagtgcagagaaaagtacgcatttgccttagaaggttcataaattcctagtaaatatttctatgctatgtgaaagtcaatctgaaatcaggtaactataatttctaaaaatatttagaaatcttgtaatgtgattaaattcacacatcatttgggtagaagggggaaaaaagacatgagagatgccaaaatgtgaatgagggatcactggagaaaacatttcatgtaaaactaggagaattcatgtccatcctgcaactggcctaactgtgagaaagccctgcagctcagatccgtagtgtgtgagagttgttgatttcaccgtcaattcatacatttattcgtccaacacatatttagcgggtactcactgtctccgggcaatatgctaggagctaaagataaaagaatgagttaaacagaccaataccttcacagagatgttcagtgggagaaaagcaaaatgattaagtgctgaaaagttatgggagatcaaagggcataaaagaagaccccccaattagtccagaaattcagctaccaggtgagacgtccaaaggtcgctaagaaaccactaaaggattttaaatgtgtacacacgtttcgcttcttgcttcagtcatcccatgggtggtgttatcactttcacggctgagctcctagtcagagggcactttgaagaaatagccaggccaagtcgctctcagcataggggcataatttaactctttttaaatttgctttaagggaaagatgaaaagaatgtctttttagactaatttcttcgcctcccatttacaagaataaataaaacgacttttttttcaaatgtaaaaaaaagtggatagcctttaactgcagtagcatagatgtataaagttgaagtgataccacataaggtttacaggcagtgagggcccggaaacagatttgtcattcattttcttgttcatgatacacaattattcttaaaagtgttgtgtgacaaactcctagaaagtattgtctaaatgtgccctctccctattactatgtcactaagtttgtagaactgcctgattcacttaccaaaactttatcctgctgtaacttttttgaacaatccctgtaatattctccactgcttattttaaagtagctgagaatatagcgtgctgtttatgggcaactagtcatggggtagagggtgagatgataccagtgttagcctgggcaggcctgggtgtgaattccatccagacacttacttaatatgtaaacttgattaagtctatttgtttatttttacacatttctacactatatttcttcacttataaaatgggtaaaaaatatctgcctctttggatttttacgattgacaaaaaaatgcaagtaaagtgccttgtattgagcttcccatgtagagacagatactcaaaaaatttaaaaatctcttatttgctgccttttcacaggggtatgttaggcacatacctttaataaacgtttccagtgaaaggagaaggggaggctgagttttggatgcccaatgattcttctcaagataatatctttagtttcaattctgtagcgcttttgaaaaactgatgctttgtgaaatatcaaatgaagtagtgctctgtaacatctcccagaattcttctctctttttagcctggacttgtccctccattactttgaagacccaaagaggactgttccttattttcttctatgcaggtggaggatttttttttcttgtaccctctgctgacatctcactgattttctatgttagaactttgaaagaaaaaaaaaaaaaaaacggctttgaaggtcgaactgcctggtgtttgtttaatagtagaagccacgtgttttgacacatcaaagattaagaaaagagaaggattttatttcataaatatcaaagggaaaactttcagttaattgaatggcaactagtcccctttgtgctcatttcggtttctggcgataaagatgctcaaacagtgagatcgcaaccagtgaaggaggcgctctgaaggacaggaaaggttggctctgcatgagaaagcccttttagatccagaagaagaatcacgcttcctttcttttcctgaccacagcctgtcctgtaattagcggagcaagtcaatctgagcgaggcaaatcactggttttccatgaaataattatatttcttatgctcttggacatgtacacctctaagcctaaaagcggagaaagatgttttggttttttttacgtgagctgggggagggagaagaaaagtggcagcgacagtgtagcaaatgggtgaaagcagcacaatgtggcaagaggagagaacaggattccgattccgtgggggcgtgggaacactgagttccgcgcagggagtttccctgttcagagcaccttgtgcgcgagttgataactctcggaaaggaaacaaaatttggctttcctaaactttctgtacgtccagagaatcccatgccttgtcttggcctccgcagcgccaggctggggtgacagcactcctcctccaccggcccgggcttctcctccggaccgcgagcctgtggcgcctccccgcgcgcccagcgcaccggggtgtccccttggaggagcctgcgggggcgggggaggagggaagggcgcgactcgtgggtcgcgctggttccttcactggatggacgtccgacgctgcctccggggcggagacagctccggccaccatgcgcccgttgcggcgattccacccacagttcgctggctctgggggtggcgggtcttggcgcgcggtgcctgcgcgaagggagggcagccatcgcccccgcggtcactggggccccgcgttccccgcgggctcgggcaggtgcgcggtgtgccggccaggtccccttgtcctcctgccctgcggcttgggcgccgcgcccgccccgcccccgcccgcgggccgccctgggcagggcctgccgctgcggctggagagcagcgcaccggcatgggcaggcggccggcggcggagggcggctgagggctgctgagggtacgcgcagcggcctctcgtcgccctgcacgtgcctcgccaggcagtgcgcctgctcgcagcgaggacctagccctctggttgcagagacccggtgccgcagcagcggcgggtggctgtcgctgccctgccctgcacggggcagggcggagcgggctgagcagcccgggcgcgatgcgttgagcgctcggagggccaaccgccggtccccttggcggcaaccggcggcacccatggaaccactgggcaactggaggagcctgcgggcgccactgcctccgatgctgttgctgctgctcctgcaggtggcggggcccgtgggcgccctggcggagaccttgctgaacgcgccgagggccatgggcaccagttccagcccgcctagccctgcgagcgtggtggctcccggaacgacgctgttcgaggagagccggctgcctgtgtttacgctggattacccccacgtgcagatccccttcgagatcaccctttggatcctgctggcctccctggccaagattggtgagcgaactggacttgtggggaatgggagggggcgatctcggggggacacctggagggtgaccgggtcagccagctgacctctagatagtgaccgcctcatcttgaatcagggcagggacgacagatggagcagcttcttctggttgaaaaggacccttggaagagcagtttcgcgttttggttcttaagggaacattggccttgaaatggccccaagtgtaagttctacaaactcagcgattgctgcttacttctgccgcacggaacgccaagtttgtcagctctctgcttaagttgagtgagatctgtttattgaagtgtaccagtctcacctgcagggagagaggtgccgacgaaccccggagctatgcataatgtggttaaaaccctggatgctacaggagagaggcgccttggcagtgacacagaccctgctgtgcgcctgactaatgaggtgcatggaaggggaccagggacacctgagtgcttgcagctgcaataggaacgccctttctcctccctctattgggttgaggctgtcactctccaggaagcttttgcttcggggtggctgaggccagtgaggtgagatgcatatttaaaaataattaactctgggc

SEQ ID NO: 8500 - DNA, 6000 bp, Homo sapiens
ttttctccatcattcttatgactgcatttttaaattatagtaattgcaaaaataaatataaatgtaaatttttaaataaagactatgtacaattttgggatagtgtaatatcaaattgagtgtaaaagcactgtttacccaaagttaaaaatcattcatttggaaggcatgagaactccgtcttatatctgccactaactggttgtgtgaccgtatacaaatcaatgcaatttaaacccatgatgacatacatgtatttaataactagaatggtcatgttgccttttccaaatctcagttttctactttagatttcgagtaaatgatttctcagatatttactcattttgagtctcttattttccttctgtaaacaaatacagtataactaagtttttgtctagtagtattccaggcacagtgctaagtgctctgtaggtaaaggtaaatggaatggggtagtcccctttacagagttcacagattaatcgagaaacaggcacgtgatctgtagaccattgttatatacaagtaggtaccatgggcgaacagcctagaaaaggaacacatgacccagtctggttatagacagaaatcagggaagtttctctttgctccatatctgagttgagtctaaaagaatgagaaagggttagcttcatactagttggggaaaaaaaagtgcatttaaaaagaaagctgggaaccgttgctaaggactgagtgtgaagctgagggagaaaagactgagaaagaagcagtgagaggactcttctacatgtatctctctgaaagtggatgactgacactactcctggcctgatctacaaaggcataaattggattatgttaaaatttggttaagaaatagaatctagactttagtctacggtgtggtttgccaaatatatgaacctctgatgcacccctgaggttattagcaaaatatttctttaccattaggtaaagaaaggtcagatgcatttatccacagcaccagcaatgtattaataactgactgccaccagaggccagaacatcagcaggcttcgataatgaatcaaagcaacagtaacagaaactgcagcagcagcaattgcttaccatatattgagtaccaaagggaaaatatgcattgcactcaatgtttcaaaacacagtcattcctccatacctaggatcaccctccaattccaaagtctgcagatggtcattttctgttacaaaatggcatagtatttgcatataacctatgtacatccttacgtatactttaaatcacctctagaatacttataattcttaatacaatgtaaatgctatataaatagttcttacactatattgtttggaaactgatgaggaaaaaaaagtctgtatgagtttagtacacacatgtttttgttccaaatattttcaatccccaattggttgaatccatggatgcagaacccatgggtgcaaagggctcactgtatgccatttcaatgaatcctcacactcctaagagattgaaatgaccttttttttatttccactttaaaacacagtgaagataacttaatttgacaaagatcccataattagtaaacctgagctaaagttgtctgttttgactttcaaagttatttccactctgaaactcaacatagtcttccaatcccagcttgtcatcaagatcattggggagggattgaaagaaaactaggttctcaaacccttgcccaagatatacaaagtcagaattcatgctgtggggccttagtatctgcaatttttcaagaactctacaattccgatagtcaccctggtttggaaatgactggccaattttaatttaagctaaatgtaatccattaaaaagtatgaaagatttgagttgacattgtatggggaaactggagcattaggaaggataataacttcagcaaaatgggcccccacagtctcaatatgcatttggatcatatttgaagcatgttcaaaatgtatagaccaagtgatgacattctcaaattaccaaagctgttattaaaaaagaaaaatgtaatgctgacgctgctgttccatgaagtgtactttgaatggcaaggtcagagggtgttaacctattaaagacagggatcttttcatttcaatcaattgagtatatacctagcacaaagcagcaggtgttttgttgttgttgttgttgttcgttgagacagagtctctctctgtcagccagactggagtgcagtggcacaatctcggctcactgcaacctccacctccagggctcaaggaattctcctgcctcagcctcccgagtagctgggattacagacatgtgccaccatgcccggctaatttttgtattttcagtagagacggggtttcaccatgttagccaacctggtctcgaactcttgacctcaaataaaccgcccacctcggcctcccaaattgctgggattacaggcgtgagccaccgtgcccggccaggtgtttttatatatttattgaataaatgactctccccgctcctccgagaagaattcctccatctgattaagaccttttgtttgaactttccctagaatctgtgtgtacagatatgctacatccttctcagcacttacaatagtatatagaagtgcagcttttgcttgtttgttccttctttcttttcatggataagttacttgagggcaaggtttgtataattttctacatgtattctcagtactgagaacagtgttcagaatgtaaaaggcacttagaaaatgtgtttttaaaaaataaatgatttataaatgcaaaacctgctttttctccccaaaagcgggaattgatctcccactgacatgtagttccctaagtccgtgcatgataacatattctcaggagagtggaggaagaggtacacattaaagtaccaatattaaagacaaaagagaaatgggtgtctgggaaattacaccttggcacagaaattcacatgcagcttcatccttagatcagacacggagcgcaaaggactcagcaaatgaggaaatgtctccccagaactagactcaattcatcagcagttgtcattttcaactggtgtttcttgtcatggaggacagccgctctgccaggcaagaatttggccactgtcaaggtcattgtccattctcagatctggcactgagtccatagtctggcaagcctggcttgtcaaagtggattaggtgggctctgggaggtgtgctttggctgcactcccaattctcataccgaaaggctggtgatgttctctgaggacggctgcctcttcagtctctctttggatctgagtcaagctccctgaccttaggcctgtgcactatttcagacactgcaattgcccatgcctgccctgctacagcaataagctgtgtgtcatcatcatcattagtatattctggcaggaaatacatcagttaacctgaggctaaggcccagaatcagaaaatgagttatagaagacaaaaacaatgaatgaatggatggatgaatgaatgaatgaacctcttttaaaacacatgggtaattatatgaaatcccatctctgtttcgctctgtcagttccttaaaattgcttaaattaataaaatgtgtatgtaaaaatggggttatattaaaaggcaacctaagtcttttccagaaaatcaatgaactagtcatattacccaggggaaataactatctttgcaggccttttggcccgtcttaatttctgtttgaactccctaggctttctcacctcaaaagaggtagttggatgcagttattgtttatacagagaagaaagaaaaggggtagtaacataaatttggaagttaatttcaaaatccagtgtaagaaaaggggagatggtctgattggcctagagaggtgaacagtagttcagaggcactcttatttattctatcccttattagacttgtgtatttcactgttaaatacactctcatggtggaatgcggaaagaagtgagaaagtggccagagtgcttgtagctttgtggcttgtgactcttctatcttattctctcccacccttctctcttcctccattcacattcacacaggtatctgcatctatccatgtacacctagatgtagaaatacatctatagatacatatttatatgtgtaatatataaataatctataaaaataggtaggtatatggatatattgtaaactaacacagcaaatttttgtaagctggaataggatattcagcaggccagctgcccaaagggctctaccaggaaagccatcttgtctgacttctgtgataacctcattgttaatctggaccacgcctagtgtccttcatggtagccctacttttaagtggcaggggtatgaatgtaaaaaggactttctaaaccttcctgaaatgtctccttcagggagcccatcaccagggacgccaggaacagcttccaacagggcccaggggaggccgcgggagaggaccccttccctctcagagagactcgtcaggaaacaattccagactctgacctgggaagaaaagaacaggacacttctctcctctaggcttccagctgctgcttctgaaaatataatcctctgagaccctccccattcccagcttccaaccagagggatgagaagttcgactgggaatcaccctaaggaatctccgcccagttttctggaggaggagatgggagtagcaggtacttgtctcaggatggggataccatggctggcagcgcggaccagagcccagcctgccccccagctccttgggccccgtttccttcgcatcccgcacacccaccctcctcgcgagggcagcgtccctagcacacgccctagcaccactctcctctgacgtccgcctccggatgtctgacgatcgcccccgcctgccgcccttataaaggggacttttcccaatactcgatcgattcccacctcgccctgcgccgcgcgccctccgccggcgccaacacctgtcaactctgcgcgctcccaggttcttggagacgccgagtgaggagccgccctgaccgcccggccccgctccgcactgcaccccgacccaccccgcaccctccctttctgcaccctcgcacccacacccctcgcggttccagggggcggcggccccgggcggagcgctttcgcgtgcagccaccactccaggtaggagcggagcgggcattcctgcgcctacgggcccgcaccctcggaaacgccttgggcaccgagcccgggcggttttagaggggagggacgcggcgtttttccctctcggtgggatgcgagggcgggtttgctgtctggcaccgttgctgtcagggtgcaagaggctacaaagtctgggcgcaggaaatgggtagagggggccgaggaaaggccgcagggggccgggagagcatcgggctgctgcggagaggaacttgcctgcttggttgctcacaaaggcagagaagacacagcccgcgggcgcttcttttgcctcctttaaattccagagaggctgattctttcccccaacgtctcttcacccacctgcacgcacaaatgtcagagtttcccccagaaacttgtatgtgagagtttgggttcatggaacagctgtggtcacaaaggtaaaaaataaataaaaataaaaataaaaggggacaagaatttcagaaggtgaatgctttcgaacttgacatctgtcttctaagagtcttgattttaatatctttgaggcttctgatgtgcttttaggcaattgtgtttaaaacaacagcaacaacaacaacaaaaccttttcctgtatgtaccattaatggggggtgatgaattgaatgaaggatattgggcgaagaagatcaagagaatggatcctttcaacaacaaaaaacatacttagttgctatagtaacttgaactacagaagcttgttgaaaatgtggagtttgatgtgtttttgaaatggatttttctaaagatttttttc

SEQ ID NO: 8501 - DNA, 6000 bp, Homo sapiens; identical to SEQ ID NO: 899

SEQ ID NO: 8502 - DNA, 6000 bp, Homo sapiens; identical to SEQ ID NO: 3336

SEQ ID NO: 8503 - DNA, 6000 bp, Homo sapiens
tcccataagactcaaaagagaatgagtaaagcactctggcaatcagttgactatcaatctatttttaccaagtaatcataaattttccatctgctgtggaggacaccaagttggatccctatatgggatgtgagaggtgtgagatactcccttccttcttccttcctcctcctccttcttagaaaggcatataaattttattaacatatatacagggagaaccacagagtgattacccccttctttcttagttttggaaatttttcttttgaaatgatttcagactcaaagaaaagttgcaagaagaatacaaagaactcctgcatactcttcattcaaattggttttattagattatcttgatagatagatagagatggtatacatgttatacatatataaagcttatatatataatatataaaaagttttttgtaaccaccaaagaataagttcagatgtggtgcccgcttacctttaaatacttcagtgtgcttttctctagaaagaggaccttctcttagtgtgataacggtgccattttcacattcaggaaattcacattgacaataccattttcttaaagtccttgttcaaatttcaccaattgtctaaagaattttaatagcaaaaacaatttttctggtgtaggctccagactgctaggcctatatgtcacatttagttatcatgtctcttgggtctcctttaacctctaacttcctcagctgtttcaagaacctggcatatatatatatatatatatatatatatatatatatatatatattttttttttttttttttttttggtaaattataccagctagttactttgtagaatgtctttcaatttgggttgtctgatgtttccttgtgattagatttaagtatgtgaattttttcctcatttccttgaatagcttgattagatgcatttttgcattttgggcatgcatttttggcaggaatatcacagaagtcatgctgtttcttttcagttaatcaaatcatgatacatatcatgtctgtttgtcccaatccttgtgggattaaccttgatcattaagttggtgtctgccaggtatctccactgtataattactgtttttctctttgtaattaataagtaatttttggaagatatttcctcatgaagcttttgccaactaactttagaatagaattgatgattctttctgaatcaattttaattgtgatagttgccaaatggtgatattttaaatttgttattccttctgcatttattagttttccaactgtaagaaagtgattttctttcctatttatgtaatcatttatttatttatgttagtatagactcatggattcctatttgagtcaatgagttacaatccactactatcattttggtgaccaaattgtcccagatctggtaagtggaagggagctccttcaaactggctcctatgcctttttgacgtgtcctcataattttttacccacttccttactttctggcaaaacaagattctcaagttcatcatgaatttctctattccattcctgggctcagccacttctccaaggatccctggtttattttagtggagaatgatatttataaagcaagatctggtgctagatgtacctattgctactggggtgtcgctgcttctaggtcctcctgggaatcagtgcaagaaaatataaacacacacacacacacacatatctacatctatttataaaactaaattttaaaaatgagttcacactgatatcatcagttgcaagccagcattatagttcattctaaccttcctcattttccttttttttttttccttttcttgctttctttctctttctttcttttttttgtttgtgacaggttctgactctgtcacacaggctggagtgcagggctcactgcaactttcgcctcccaggcccaagtgatcctcccgcctcagcttctttgagtagccagaaccacaggcacgccaccacacctggctaatttttgtatttcgtgtagagacaggatttcgccatgttgtccaggctggtctcaaactcctgagctcaaactatccacccgccttgacctcccaaagtgctgggattacaggcgtgcccagccactgtaaacatcttacgaccatgggtggtgactggcaagaaatgtaccttgctagttttaagatggagttatttttaaaatggtgtcaccctggctctcctatgctcctgtttcccaatttgacaaccaacacgatctttctgatcagctcatccttacttaaaaaccatcattggggccgggcgcggtggctcacgcctgtaatcccagcactttgggaggccgaggcaggcggatcatgaggtcaagagatcgagaccatcctggctaacacggtgaaacccagtctctactaaaaaatataaaaaaattagcctggcgtggtggctggcgcctgtaatcccagctactcaggaggctgaggcaggagaatggcgtgaaccaggaaagcggagcttgcagtgagccgagttcgcgccagtgcactccagcctgggcgacagagcgcgactcagtctcaaaaacaaaacaaaacaaaaaatcattgcctctccagtgttcttaactaaaggtgccatctgcctaacttaatttaggaatgcctgtatgttttggtactgtttaaatattcccagctttgccactctccgtctcacaccaacatccagtcatctggaagatctttccattcctccagttctctcgtaactaaaacgatttcagacttacccctcactcccacaggtaactcgcccttaactcttcttgtagaacttaaatttcatgtattgttctctccttctgtccctcacttacttcctaaatctctggtggatgttcccctgtggtcctgttacagttattctgacctaaacagaactgatcacgttgcttactgggaagatgcacatgcaatctctagtgtatagtaggtcctcaataattactggtgactggtaaagcagccaaggcctttggactataaatcgatcttattctacgttaataacaatattagcacaggattctattcccttgctggatattatttacatttgataatgaatgaactaattctctttgacagcaaaacatgtattcagcttacagccgaaaatgcaagggaaggtacacaataagacggatccaagccctgacccctctgagctttaagccagtcaagtaactacttgttctgaaaagtattaactgtcctattaacgttaaccttcacaacacaatgccttgtgttcaactggccttggcctcaaagcactttcctggcacattccctgaatttaaagaacggtttccatacagctgagagggtcgaggcaggggtaagtgtagaagacgcaagaaatggagacaccctgggaacagaactctagactgcactccaaccgtagcacttactaggcattcgactccaggaccttgacactcgcgctcgctggcggcgagccccgcctccccactgcgcctcatctcccagacaggccccgcctccccactcaggccccgcctccccactcaggcccgtctcctcactcaggccacgcctccccgcccagtcccgtctccgtactagggcttgctccaagccctgcttcctcgcccaacctggcctccccactacggcctaaccccaagcccttctcgtccagccccgtctccacactactgcctggtcctcaactccgcctccccactccgaccccatctccctgaccagccccgcctttacgctcaggctccgcctccccgccgggtcttgcctccaaatcccggccccgcctccacgcggccccgcctccacgcggccccgcctccacgctcggcctggccccaagctcttccttcctggggcactctgtctccgcactccggcctggtcccgagccccgccccgcctccacacggccccgccaccacacggccccgcctccacgcggccccgcctccacgctcggcctggccccaagctcttccttcctggggcactctgtctccgcactccggcctggtcccgagccccgccccgcctccacacggccccgcctccacacggccccgcctccacacggccccgcctccacacggccccgcctccacacggccccgcctccacacggccccgcctccacacggccccgcctccacacggccccgcctccacacggccccgcctccacacggccccgcctccacgctcggcctggccccaagctcttccttcctggggcaccctgcctccgcactccgccctggtcccgagccccgccccgcctccacagtcccgagcccgcctccaaccctgccctgtccccacacccagcttggccccgagccacgcctcccaccccgcccccacactcccgagccccgcctcgtctccacactccggcggcgcctccctacccggccccgcctccgcgctcgggctgccagccctcccttgcacgttccggctcctcttctatcttcacgcccacgctaggccctgagcccagcctccacgtctcgccgccaactccacatcctggctcctatctctgccttccaggcatctcccagctgcacgctcgggcccggctcagagccctaagccctgcctcccggtcctggccgggtttcccagaactgcacggcgcctctccgcccaggcccaagcgcgagcccctcctccacacccgagtccgagccccgcgtcccggattcggacccgcctgcctggggcggtgctgcaccaggtgcgggtgtggcaggcgtctcggagcgccaggtgcagcttcctggtcaagatggtcgccgcctgccgctcggtagccgggctcctgccacgccgccgccgctgctttcccgcccgggccccgctgctgcgcgtcgccctctgcctcctgtgctggaccccggcggctgtgcgcgcggtccctgagctcgggctctggttagagacagtcaacgacgtaagtggagtgtcgggacccaggcgtggcacgtctcgggccgtcagggccgtcgtgcggcttcgcttgaccccgggcttgttcaccctgcctctgccgggtcagcaccgggtcccctgataccctccctgagccttttgtctgttacagccggggagcggggagcggcccctcctccggcccgacctgggctgcaggcaagagccgtcaggattgcgcatgggacggccctcgggtccgagcgctcggactgttactgagggtcaccatgcccgacgccgtggccctcattctgctctgacatgttttggctggatcaggaatctctcggcacatctagcagcatctttgggattcgactcttcctgtccggatgcagccacagtgggccacacccctgaggccgcagggaggacttgccagcgcttcagtttctgcataaacttagaaagcgggtctgccgcttccttaaaaaaaaaaaagaaagaaaaaatttaaatgagggggaaacgtgcagtagtcaccctacctctatttctctcttcttgagttcctgaatttctctacagttcctgtcacagttccgggagagagagtgtgtgtgtaggtggggcgggacttgtgattagggagtgcttgaaaggcgaatctggaggcatgagtgggtggaaactcttctttccaaggcaggctattagaaaacttggcgtctggtaattagaggagatgatgtgggagagatgcaggggcagaattatggaaagtcttgcaaaagagagacaggaagtctggaagaggcattatctccggcttctctggggtcagatgactcatccagcactgtttgggatgggtattttccacatgcatgaaataatgtccaggttctaaagatgagacttatattttgatttccttaaccagaaaaagaaagtagttccaaagactacaaatacttcccac

SEQ ID NO: 8504 - DNA, 6000 bp, Homo sapiens
tcctggactgtgcgggcagcgagctgacccttccttttctgctgtaggatcttcattacacaaagttcctgagtttccagcaagttgcctttcttccctgtttaagagctgagaaaactgggccttggggaaagcgagaagtcccagtttaagtcaccagagacgtcttcctaaagaagtattcaggatgctgtgctatccagaagctggctccagagacacctggaccatttcaagctctaagaactgtgcttctgttccctctgcctggctcctatgccatatcacacccacatgtgtgaactcaaagccaaagggaagagaccaggccatgtgcagccaggacagaggcatgtaaaatctagagagggtgggccaacctcccatactcctgtgttggcggagaaatagacccaccagtttgtctggcacaaccaaaactcagctttcttgccatgggatgctggcctgagaccagtcacaaccagtctcaaccagtctccatatcagggcttggctgtctgggtgctttcaagcacccttcccccacctggatcccaagcatcccttggactctgccaggacagagccacagatgccgggggaaatgggaaatgactggagacacagaggacagccacattcaaagctggtgggaaagtggtggtggtgacatgtggcccttgcctgaaacattattttgaatttatttcctgtaggaattgactacaggtgggttttgtcttgcaagataggtttcctttcttgagaaatctcaagagaacagagttttcagtaactctaagacacggttaggccactgcaacaactttatttctggagagaacatgtgctctggcttcctgcctcttcctactctggggaaactggggccaatctcgaagactgatctcctagaaatgtccttttttattccaacagggtttgatgcagctcaaaatacaggctgtaaaagcaacagagttaataaaaaggagggggaaagaaggaggaagtaaatgtgttaagtgcaaataagagttggcacctagggcaatcatacttgcctcagtacttgctggcatcctgggaaaaggcacttacaatcttgaaatttgttaggttcttcgcagctttaactgccgcttccttctctgtgcctccgtttctctgtctataaagtaaggggaaaatacctcatctgagatttattgagagcatcacctgagataatccatgcagagcacctgaaatagtacctggcacacagtaagcattcaactgcatcacagatattattattattattattttgagatggagttttgctcttgttgcccaggctggagtgcaatggcacgatcttggctcaccgcaatctccgcctcccgggttcaagtgattctcctgcctcagcctcccaagtagctgggattacagccatgcaccaccgtgcccaactaatttttgtatttttagtagagacagggtttctccatgttgataggctggtctcgaactcccgtcctcaggtgatccacccgccttggcctcccaaaatgctgggattacaagcttgagccaccatgtccagctacaggtattattattacctcattcatctggggatggggagggcattggtgggtggagaggagctggttctcctttactccaaggctcctaccttctcttccctggatgttctcgcccctgctcccatgcaagtcctcacagacggcctctgaagccgcctttgttcctggtctggttccacaacgttcccatgcccacttgagctccctctactccaagtagactatttccaggatgagtacttcaagtacatcgaacagtgacctcaaatgcatttccttgactgtgcctctctgaactaaaaagtgcagaaatgtcattgcttccttcttttgtctggtcttccacagggctaggttgggatccggggggagagtagctttcctagctctcagcagctcaactccaccgaattagtgaacgatggacatgtccccaagaggactctaaacccacagtccccaacatggtgttctgcagcatgccacaggtcatcttgttctgtcctctctgagggtgaggttggagagggaccctaggctcacaggctcagtgacagtgactcaccaaagatcctgtgggcagtcagggtctgggccaggccagtgagcccattcatatggcatgagccacaacactgttcctcttcctccggcagcagcccgttttgcgtgtcccctcactatgagccgtgggagaaatttgaaagggcttggatcagagggcagggagaagagggtggtcctgacatctgacacatacttcattttaaacatgggctatgtatgacaggccttcagctagttattgaacaaagagaataagagcccttttacaagggctttacatatattcattcatttggtcctcacaacagcactgtgagttagaagtctcaatctcacccctttacagatcaggaaactgaggcagataatttatttgcctatggtcacaggactagtgagtgacagagcaggtggtttggtcttacagtctatgtgtttaaccactacaccaaaccacctccctaagatgctagagggggtttgtgccaatgcctggattctaagagattagattctctttaggatctctgacctgtttcctcagcattcagagataaggccagaaacaatgccatttgtgcacgaactgacaactgacggtcctcctacctcctatttctatttaaaaggcactgtaacttctttccacaggcagatccctacctctcctcccttaggggaggacgaaggtgtcccagccaaggaagatcctggtctccaagggctgtaccctactgatccggaggcaaagcagtgagggcccaccccaattcctcacctcccattctactcttcggcagaagcatctcagtgttggaaagataaggatttcttcctaaaaaggaaggattacactatatcagagtctgaagatacagttttcatttgcaacgcaagggaattcctttgaatctctaccttatgatttccctgcaaacccactccgatggggctggagagtgctctctcactcagatgaatctctcaggggttgtccagcaggtgtttgccaacttgaagagctacctactatcacagacctataaaagtacgcctgtggacagactgaaaacaaacaaacaaaacacacacacaaacacacaaaacaaccgcacactgggagaagttctaggcaatttccttgcaaataactgctttgaaaattactgttttaaattggcagaacactaaggactttgaacagatcatcccttttactcaatgttttcataaccttgaagtgaaggtggagggagcagtacgttttaaggtgccaggattacactacggggtcagtgctcccggatatgaactttctttttcagaccgaccttgggacctacagctttgtaagttactcatacaactccatcaaatgttacaggtaggtcagaggacattcaggttgtttaagcctctataaatgactcaggcagcaacaatttacaacgtctttgtttctgctatgcagtgccctcctgctagagatggcaaaaatgtggggagggcttcagagcattctaagcctggtatttctggctggaatttttaaatctcactacaatcctgacaagagaccacgaccttaatctcccacggcatgactggttagtcttgatcgtaagccatataatcaacacccaaatgtgcataacacatctaaataatgtcaaaactacactatataccacgcaggggaccagaaatcaatctttacctcaaaaggataagcttccaggatgcaataacatccccttccacccttttctacaccctaaaacagtaatattcacggtaacagcaaagcggaaatcagcttttcctgaacatgtactgaattctagtcacattcacacacgttaattcatttaattccagccacaaggtaggcagcctctgttaacattttacaattgtgagaacgcagagatctgggactggctcaaggtgacacactgcagcaaggagtcagaatttgaatccgaagcagtgtccttccccctcgcaacagctgcggcgttacaaacacaggtcagccacggagaaattaatgacccacagccatccttgcagctctgcgccataactggggagacaagctggttcccgtgactcttcagtctgttttcacccaagtgcatgactgcgggagcaaagcgaccacgtgagcatcccccccccacccccccgcttcccccaggcgagggacagtgccaggccaaggacaagtcacaggtgcaacaacgtgccagaactggatccggagccccagggcgcaagatctcccgcagcgtcacccggcagagggacgggtgtggccaccgggcgcggcaggtcctgcgtgcgctgaaagtgcggctggaggcgcggacggctttccggagccccgagagaggagctaggaatgactttggtcgcagcctctgtaaccccgcatgacggcctctagggggacagcgaggtccccctcgatctctggctgtaatcagccggcggggccagacggtgccgagactccagggcgaggccgcagggagggggctgtcccgccccacgtggaccggctccccgctgggggcgtggccgccgaagcgggccgggccaatgagcgccaccgtcgggctcacccggctgggcacgccgggccgaggagggctgcgtcatgccgggggcggggcttcggggccggcgcgaggcgcggcggggtcacgcgggtcgctgcgcgggctataagtaggggccggcggggtgctccgctggagtgatggctgccggcgctctctgcgtggttcttcttctcggccgctgaaacccccgcggctgcttcctgggaaggtcgtgagtcccgctgagctgtccccggtgccgccgacccgggccgtgtgcccgtggctccagccgctgtcgcctcgatctcctcgtctcccgctccgccctcccttttccctggtgagtagtggcgccgcctcgtaaaggctctttcttctccccggggccgggcgcggacgccgtggcgctggaggcggacgccgtgggcggcgcggctggcttctctcttcgccgctggccgcctccactccgcccgtctgcccgcccgcgggcctttttggcggtccccgggcggcgcgcgcgggaacggcccttttccgattttcgcgcggagggcgcgcgcgggctggcagcgcaggggctgggctgggcgcgcgcgggccgcggaggacccggagccacgtgcctctccttctcgcgcgtcctactggggatgggggtctggagtagccggcagaggctattgcgggaccccgggcgcgtgggtagagcggggtgccccactggccccccaggggcacgcagctattgttatttcccccctcccccgcaggatgaacttgcgtcctttctcttctccgccatggaattctgctccgtgcttttagccctcctgagccaaagaaaccccagacaacagatgcccatacgcagcgtatagcagtaactccccagctcggtttctgtgccgtagtttacagtatttaattttatataatatatattatttattatagcatttttgatacctcatattctgtttacacatcttgaaaggcgctcagtagttctcttactaaacaaccactactccagagaatggcaacgctgattaccagtactacagctgctaccgccgcttctggtcctttggtggactacctatggatgctcatcctgggcttcattattgcatttgtcttggcattctccgtgggagccaatgatgtagcaaattcttttggtacagctgtgggctcaggtgtagtgaccctgaagcaagcct

SEQ ID NO: 8505 - DNA, 6000 bp, Homo sapiens
attttggaaaggcaactgcttaagagagtggttgtgattacacgtacaaaatatttcaggcatttaaagtactgggctgaatttttcccagtaattaaaatagggcataagaggcagcatatgttctagagatcactagagtacaataagccaagggcagatatgaagccagcataaagtggggaaatataggaacaaatatcctattacagtgtgtgtggtctattcctggacactgtggttatagagtccaagttctgctgccaatgccacaataagaaagccatggacaaatgtagaaaacagttaataaaagtgatgctatctatgcctgatctaactccatctagtgagaagtttcgagaaagagtttgagttgagtttgtggaatagattaagagtaagatcaaggaggatagacttggatatataaataaaaactgagttcattcttaatgttcaggagagaacagatcctgcgtctgttgtatcttacgcagactctgttggtcaatacaaataaactatatccatttggtttcacttgctctaacttgggatttctcaacctcagtgctattgacatgttgggccagaccactctttgctgtgggtctgtcactggcatcgtaggatgtctggcagcatccctggcctctaccagtcagtagccccttccccagctgtgacaatgaaaggcctccagacattgctagtgtcctctcgggagcagaattaaccactggcttacatggtagctgttgttgcaggtgaggaaactccgggactaggagtaggtctgggtcattctggtctcatggcttctgtgaattgggagccactgtagcagtctatttttgggcctttctgaaactgaggatggttgagccacccaaagaacactcagaggatgcagcatttgtcaatcaggatttacagatggaggaatctgggcggagagttagtagtctgcccccaaatcacatggaagaactgatatttatacccctgggataacattctataccctgtctcttttctctataacaagtgatttttattttatgctttgcaaagccccaacacttaggtattgagtgagaggcaaagcaggaaggacgctcctgcatttctgctcctatccctgctcctgtcttggccaaagtagcacagctatcaccattccatgctgaggatggttagtgttccttttaaaatagtaacaaataatgttctctgaattattcctctatgcctgcttggaacagaagacagaccagtgttaacccagaaagcaacacaacaatattccttatgtgctgtcggaactctcttttcaagggtaaggcaggctgaggctgcagggtaaatctgaaaatcaacaaggtagaaagatacagagactgactcaaaaagaccatttcatcatccattcctggtctctttccagaacagtcatcttcttgcctccatatttcagtcttccaggctatcctgtgctattctgccagagtttctttcctggcaaagccttaacaaatagtaccccgttcttgagaatctgaattctcatcctgatagcatcttgcttggcaatcttcaaattctatattaatctaggaacttctcactctaccctttttcataaaataggaaatcatctcagggtgggagaatcacaacttgaccactcatctctcccctatttgcctgtcatgaaatctaagattctgcattttgagactgatttttttttaaataaagaggttgactgctctagttattttcttaaaagcagatgaacttgaaaattttgacatatgtatattttgtcagccaaaggcataccatctatttcaggaggcaatattatatccttgctaacaatgtgcgctttggaatcgaactgcctcaattcatattccagcttgccgcttttagcaatattatctgaggcaagttttcaaaatcatctgaaccttcttttctcatctgttagataggataataatgttctctatgttacagttatagcaattaaatgacatgatacatgcaaagtatttttaaaaataataaataatagccatcttcattattattactactttttttgaggagtcattgataaaagcaaatgcactattgaagagatcattaataaaagtcaatacaatgttgaaggtcatcttgtccagtttcacaatcatctctgagttattgggaaatgtgttataatgaatagatcaacaaaaatataactacagtaaggcaaaataatatgaaatgaattacaaagactaaatcactctgataagattgattgtcttctgactgatattttactatattcctaacatgggtctgagaaagaggagaataatataggcaaattgctacaatcatcaattaagtaaatttctaaaaatgttaaggaatgtataacacaaaacgagctaaagaattgtttgcagaatgagtgttgaagatattgggtttgtcatggttgccgttccctatatcatgctgttcttaccgttgctgtgaccttcttctcttgttcagcaggacattgacatgcagcatgtaacatgtactactagaagatgtaaccagtgatctggctcttatgccaggacagattttgttctagggtcctaaattggtactaccttcatcactgattatatcagtcagtggtccatgctattaatacaagcagcatgacaatcttaggggtaagaaacatgttacagtttagaaagatctgtacaaggtctacttacagagactggtgtcaaaaatttttatgagacttgggaaaatcatatatattttttcctttcctcttccctgggttttccttattccttaatacatgcaaagctgatggggtcagtttgggatctcgaagggaattatcccctctgtattacaagaggcctcatggtgagctatgctttgttcaaaaaggatgaaagcaatttaaattaaataacaatggataatcatctagtttattgtaaggtattgccacttgaatactacagttttactatggaatctttgtttcaatagttgttttttattttatatgtgacttactacaagaacttactctgttattttaatgtagctatgtttttaatatttcttgagtagtagtaaagagggttatgtcctgttatcatggtgacttacccctgccatccattcctggggaacttgcttggctgctatggtccgtgtggtgacaggttattccttggtagacatgaagtgcagagggtacagtgacattaaagaccttttcattacctgaaatcttcttacaaaccatctaccaaggtatgttagaccaagaaaaatgtcttctattttcttctacagattataaccagcaatacgctgagatgataatggggctggatatgaaaataaatagagtactttactttctgaaaatcattccatagcaaccgaatgcatttgggatgatatctatctatctatctatctatctatctatctatctatctatctatctatctattctaagagcatatgtttgtgttcaaatgtctgcttttctaaaaaagtatttttggaaactgacatataaaatgatcagtactagtaatgctcaatcctttcttgtgttttggtatagtactgactttttataatctatagacattttgcatataatttcagattagctgatatagctagggtttaattacaattacttcctagagaaaaagctcctttgtctgaacggtgataattctgagtatatgatttagatgtgcctattataactgggtgattgaaaaaaactactgagtaaattcacaatttaaacaggatgacacaaggtgtacatttaacttatttatgacacaaattttttcaagcctccattttatggaaaatatagaatactgtgtgttacttttatttattcattataggactattttcttttgggtccttctttacctactgtaagctttgtagcttagtttgcgttactttctgtatataaactaataaagaggcatatttttcaatagacatgagcctttcactaattcagaatgcctatttctttcattaggacaaattagagattatgtttttctctgaacaaaatgcatttttatgtcaattaaatgagagtttttgatgaaatgtttcctaacagagagtaagtaattgtgatataattgtttgtagatgaaaaataactgccacattcatggcaaatgtgagtttaatgcagatgattttcatgactatgatgtgttttatgcggctttttatacccactgttttggaagcattcatagtaccagttaaggcaaaaccagcttaatgtttgttttagtgcttggcaacaaatacagtctataaaatatgtagtagttaatattaaaagcacatgccagattgtaacataaagagtttattcaatctctttaaagtcatcaatttgaagcttcatctgaatgagttagcatttgagttccatatgattttcagcaggtgagatcttgtgaagttaggaattggctacccctgcgagcccccattggcacagcccccagtttcttaatgagcttgcctcattgctgagtgagcaaaacactcttaacaatgttccttttgagccatctttgttgcagggggaaataaagagaggcgccaagcctgcaaattctttcctgatcccattggttcaccaggagagaacaattttgttttccatggttgcggtctttcaaggttgcctttacttaggatttgattacctgtctccctcaaccaattagcctctcccacacactctcttgcctccaataatgatcaacctccttttctaagaccagcctcctctttatcatattgcattaaacacttgatgaaagaagacctagaaggctttaagaaagacagggtaatattttgctggtgtagagggcctgctcttcggagacaaatacttgcttttcattttgatcagccgtctgcacttaaaagcctcctagccagggacatgttaattaaacagtctggggctcagtgctgccatccgtaaattggaggattagagaaataatatacacaagtacctggtacataccaaatatgatagaagatatcttcaacctttagctataagaagaatggaaaatgaaaaagagacaggtggagagagggagggagatgagagctgcgtggagctggtatgctggttaggaggtaggaaataatgaggcctcgaccatctaagatacagaagtctccctgctgaatcgaaaggaagtgctacaatattctttcaaattcatcgcagttgagagaaaactggagcagagtgtgatatcaagaaagggcttcaccaggatgatcaatgcaaatggatatggagctttcttggaatgaaacattatcccgtaacaccaggtaattttctttattaaaaaatacacattaaagtcttagaatagtttgatatttaccgacaagttgcgaagattttacagagccgtatataccaccctattgctaatattttacactactatagtacatttgtcacaatgaggaataaacgttgtggcacattactattaactaaactccatactttatttaactttattacttttcccctaacctcctgttccaggatcccctctaacacatgacatttagtcattatttctccttagccttctctgaactgtgacaatttttcagactttcttttcgacaaccttggcagttttgagaagtactggtccctgattttgtaggatgtgactcaagtcgattttgtctgatgtttttctcataattagactggggttatgggctttggggaggaaaacttcagaagggatatactattcaattcatatcctaacaagggtctatgctatcaacgtgacttatcactgatgctgttaacctagctcacttggctaagacagt

SEQ ID NO: 8506 - DNA, 6000 bp, Homo sapiens
ctgatagcagcatgggtgggggagaggacgttgccactactggggatggggaagctgttacttctggccaaaaatgttcatcagagtttattaactcagtgtccccagcttcatcagggtcctcccacatgtccccattccaagttgcagggtcccattcttttccaatcaatgccctcattctaacagtagacacctggtgaggctgtgcatgcatctttcattgcaggtcagccactagtataagaacttgtgtctgtttttccacaatttcagctctttctctatagaagttcagactttcgctcagggcagtcttagcagatttgaggctcagtatctgcttctgaagccgggagacagaatccctgagttcatcatttttttcatcactttgtccccgaacttaggggcaaccaaccagcttcaatatgttccttgtttctccacatatggtcaaaggcattatgtatagggttactaaactactggcctctcacgagtgaagaatcaggagtgtcaaatgcatttattttgcataactctctaaacagttcatgccaaggactatcagtgttctccatactattagaagtagattccttagcattttggggtctaatcatcttaagcagccaactccagaaaccccaaaacaaatgaaggaactccatccttcatattctgttcctctagaaccactcctggtacgaatatctgtgttagtcaaggttctcttagagggacagaactaataggatctgtatatatatatatagtgtggagcttattaagcattagcttacatgatcacaaggtcccacaataggctgtctgcaagctgaggagcaaggagagccagtccaaatcccaaaactgaagaacttggagtctgatgttccagggcagaaagcatccagcacgggtgaaagatgtaggctgggaggccagacccatccctccttttcatgtttttctgcctgctctatattccctggaagctggttagatggtgcccactagattaagggtggatctgccttccccagcccactgacccaaatgttaatctcttttggcaacactctcatagacatacccaggattaatactttgtatccttcaatccaatcaagttgacactcagtattaaccatcacacctccaaatgaggaaacagtgtgaacaaaatattcacctaaaagaagctgtgatttgtaaataagcaactgacagcatattcggcctctctggtaatcaaagaaaatgctgacacaaataactatgtatgtttcttttctatggaattaactatgattttaagtttgctgtttaattctggcaagagactctgagataaacactggtactcttgattgggaagaaagtaaaggtcacagccagaacttatgaatgtatcaaaagctttaaatgcatttgtaacctttgattgagtaattctgcttgtcagaatataccctaaggaaaaaattatgaaatccagatatttatgttcatatggttatcacagcactattcaaccagcaaagaaaatgaaacaacctagtaattaaaatgagttaaagagcttttctacttttacatgagaaaatgctcatgacataatgtttagtagtaaaagctcagcacttgaaatcacgtattcagtaaaatctcaagagtataaagcaaatattcgtaaatgcataaaaaagactaaaggtaaataaccttaatgtgctggagattgcaagcaattcttagggtttaggtatctttttggctttttcttttttattttttctttttgcacaaagagcatgtgttactgtgatgaggggcaaaacctttcattaaaggcccaagcaacatctacctaccaccatctgtaagggctcacccaggagacagcaacagcagcaggggaccgccaactccactcccaataaggaactagcactgaggatttggaaggcagtttcccatgagcagtttcttccctgaagaggaagagaaaattcatctccaggactggatcataccatctcacatcttggagggctctgcagcttgtatcagccacagacagtcaatgaagacacagctagaaccgtccatcccggctgcactgcagagcaagttcttgtcactgtgctgaacttctgggttctcatctttacaatggactcttggcaatactccgtttaagagtatttatgggaactagacaagataagaactggtttattattgcaagatatagctgagttttttttttaacttcattaataaatatccaacacatgaagacacactaataatacatttcttgacttatgtcagactgttaccatataattaaatttttcacataattattttcccttcttaagagtcatttatttaacattagacactttcatagttaaattttctaaaatatgtcaaatgtttccctgttagctaatttgctacacactaagacacactatttactttctttttcaaatgacttggggtccttactatgaacaaagtatgtgttagaggaggaagggggccaatatctttaagtaactccagtgtactctcattgtaattacctctttaattattatcgaatatattactcacaacagcctaactttgcagattgctccaatttccaggctgagaaaaatgaggctcagagaaagaaagtgaaatgctgaaggttacgcagctagtaggcagtagagtaactaacccagattgagttccaaagccctgtggtctttaatagcgcaaggaactgtcacatcctccagtgatggctggagctgagattgctttagttctgtaacaaatgctacttcgttcttgtatctgacctctgcagtttgtggggctttcaattttcactgtttagttcgttagtttattaatttttggcttattttctgtaaggaattctctgcaacattttgatgccttcaacctgtcttaccctaagaaattaaggaaatctcttatgattacgtctaaggccagtaggttctaaatgagtctgtaaaagtgacttctctaagtgtgctgcaatgacctaatgacttgtccgttgttacctggcagaactttctgcttctttccaactttccagctgcatttcagataattaaagttattttctctcaggacagaggagcgggactactgttccacgtagacgtatgtgtatgtattaccaaaaaaaaaagttaaactgttaaagtaatcacgggtgcagtggctcacgcctgtaatcccagcactttggaaggccaaggtgggtggatcacctgaggtcgggagttcgagaccagcctgaccaacatggagaaaccccgtctctactaaaaatacaaaattagccaggcgtggaggcacatgctggtaatcccagctactcgagaggttgaggcaggagaattgcttgaacccaggaggcggaggttgtggtgagccgagatcacgccgttggactccagcctgggcaacaagagcaaaaactccgtctcagaaaaataaataaataaataaataaaaataaattaatcattactcattgctgtttattaaatgccttttctgttcccactgtgattctacaatcactgcctctgtaaaaccccggaatgcaggtgttcttgcctccattttatagatgaggaaatcaagactcagggcttccccaccaggccaaaggcattctgtgagtagtttatttcaattcaacatggctgtgctgcacatggcagttggagtaaagatctatcagcatcgggggttcttcatgatctaactaaagtgaatcatgagtgctttcccactgcgtcaagaaggcctggagtttgtgcagcccggctagaggtgagcaaagcctctgtgttgcaaatctccagggcgcagcctctcattgtattcaatgcagatgacagtcccaaaggcaccgcccatacattgtacagacagctggcctggctctccggattgtgcaggataggccttaatggcagaaggtaggggagaggtgggcgtcacaaaagtgcttggggaactataaagtaaacaatgaaaagcagcacaggaaggttcagacatcacacaggagaagcacagggtgttcccctgggtggggatttaaaacaagggcctcaagttccctgcccttgtctctgggcagaaggggcagataatgctatgatacattttttgtaggtggtgccatttgactgcatttaaccaacaaaggtatgtatcgaaatccacgtggagattttcatggcaaaagtagagcgaattcacaaactgcactgtgtctggcagcttcagacaaaagcaatgggaacaaatcacgactcttgtccagcaattcttcctgttttggaatgatctttgctcaacagcccatccatgagtacagggcccccaaaggccaacaagacagggactctctccagggacaaatgccccgcagctgagagaggccgcccagctatccagcggccgcgcagccagccaagatttcaacacaggtctgccctatttggtcaccatccccgacagtgctgggccaggccatcatgtcacattggggagttttccctgcactccagggggaattctcaaccacaacctctgtatccggtagtggcagatggaaagagaaacggttagaaaagcgtggttcttgcgcaggaaagttggagcaaagaagagttcagaagtgggcgggtgtgtgtttaaaaaaaaaaaagggggtggaaaccccaccagccaagtctgcagaaaaaaaataaatgaagtctgcctatctccgggccagagcccctcccctcggcccgcgcgggaggagtgtgacccaggtgccgcttcctctcgccgccgagggtcaggagcccgggagcgcgaccctcccccggcccggcctggcccggcctggccagtccccgcggtctctgcccgggctgacgcccaggaatgtggtcgacgagaagccccaacagcacggcgtggcctctcagcctcggtgagtacccgccgtggggaagggtcctggggacccactggaggccgcggcccgcagcagccaggggccgagccacggccacggacgccctggtgtcccggtccgtgccgggcctccaggcggaggaggcgtccgctgggctcagatccccgactccagccccggttccccggcgcctgggctgcgcggagtccctgtcccgcgtcccggacccctacgcgcagcctccacgcgctccgagctggagaagccgccagcccgccctcccagggcgtgtcgcccgctttctgtttctttgtgcggggcatgtgaaatgtgtggggccagaattgtctccctaaagaacagttaggtgagagttcacatcacaagttgcttctgtgctgctccccagccagggtccgaccggccaggctccggtgaactccaggcaactccagccttgcccagggacttgctcgctccgctgggcgccgcaaaggcacacagatgcgagggaatcctgcggcctggatcctttggggatttgtaattcctcgctgctggttttctcttttaaaccatcacgttttcttgctgagaggaaatcatctgtgatgaaagtctttgtagatgcttggaaacattgctgggcctctctctgccctcttcctctgccgttggacttttgcaataaaaactaccatttgattttaccaaaaaacgtaatgtacatccctcttacccccaccctgccgcggtctgattcttagagtctgtcagagaggagataccctgagcctatcatgtgacaatgataccttattgatatgataatgatatgggtattggagacaccaactcttttataagtctttgaaatccagggggttgtgaggcctcacccctcaccccgcctgagcttggagcttggcgtggaggagtgctgcttcggtctacgtgtgtacacggca

SEQ ID NO: 8507 - DNA, 6000 bp, Homo sapiens
agagaaacagacctgtaaacaaggacattaactgcaaggctgcctgtaccacagctgtgcccctttttatttctccattcttgtgtacatgggcagcttcctgtttatagtgggcaaaaccccaactactatcctcaaaagaaatggattccactgtctttggccgggcgtggtggctcatgcctgtaattccagcactttgggaggccggggcaggcggatcacctgaggttgggagttcgagaccagcctgaccaacctggagaaaccccgtctctactaaaaatacaaaattagtcgggtgtcgtggtgggtgcttgtagtatcagctgcttgggaggccgaggcaggagaatcgcttgaacctgggaggcggaggttgtggtgagccaagatcgagccattgcactccagcctgggcaacaagagtgaaactccgtctcaaaaaaataaaaaaaagaaagaaagaaatggattccactgtctgaagaaagccatggcttcttagtagatgttgagggcaaaatgaagtaaaatttaggcatgcaaaaactcattgtttcccaccccaaaaagcagttacaaagtttccgtataggagaagcaaaggtgcagccagcatgctggaacggcttcctgcgctgcactctgcattgcttgcccctgctcttctccctagtgctgtgtgtctgtttgggatggacctgggtgttggtaaacattgtggggcagctgaaatcctactgttccaccctggctacttttatacatataaaaaatttcggccgggcgctgtggctcacgcctgtaatcacagcaatttgggaggctgaggcgggcggatcacgaggtcaggagatggagaccatcctggctaacatggtgaaactccgtctctactaaaaatacaaaaaattagccgggcgtggtggcgggtgcctgtagtcccagctacttgggaggctgaggcaggagaatggcgtgatcctgggaggtggggcttgcagtgagccgagatcccgccactgccctccagcctgggcgacagagcgagactccgtctcaaaaaaaaaaaaaaaaaacacaaagaaagaaaaagtaaaggaagagtgcctgttatctcctattccttggaagctccacattcccaattatgtggggtgtagcaggggagacatggtattttacttcatgttctatttggagttttttttttaaatttacttatgtttttgtatattttgttttactatgttgtccaggttggtcttgaacttttggcctcaagtgatcctcctgcctcggccttccaaatgttgggatttcaggtgtgagctaatgtgcctggcctggaatttcttttttaaccaccagaacttctcactttattttcttcaataaagaaacgcatactagtaactgggcaagaaatggagtggggcttagcagcaggtaatttggtttgagccagttgagggccacagagacaggtgactgatgggtacagagtcccaatgcaactctttgaactcttggacttctccctctcagtttcagacaagaggctgcacattcagatagggggctggaaagcaggcgtcctcacctgcacccagccttctttcccctggcctcttctcaataaacatgaacaggaagccagtttttcttttctttcttttttttttttttttttctgagttggagtttcactcagtcgcccaggctggagtgcagtggcacaatctcagctcactgcaacctccgcctcctgggttcaagctattctcctgcctcagcctcccaagtagctgggattacaggtgcccgccaccacgcctggctaattattttgtatttttagtagagatggggtttcaccacgttggccaggctggtctcgaactctggacctcgagcgatctgcatgcctcgacctcccaaagtgctaggattacaggcgtgagccaccacgcccagcccagaaagccagttttactgaatcagaaaacttgttatgggacactccctcctccaggtactggaacgcctacttaaactgaactttattaaaatattactttttttttgtctgggtgcagtggcttacgcctgtaatcccagcattttgggaggccgaggcaggtggatcacgaggtcgggagtttgagaccagcctggccaacatgatgaaaccctgtctctactaaaaatacaaaataaatagctgggtgtgggggcgcacacctgtattcccagctactcaggaggctgaggcagaataattgcttgaacccaggaggcggaggttgcagtgagcctagatggtgccactgtccaccagcctgggtgacagtgagactccatctcaaaaaaaaaattattattattttgaggcagggtctcattcttttgctcaacctggagtgcagtgacacaatcatggctcactgcacccttgacctcccggattctagtgaagcttccctctcagcctctcaagtagctgggactacagatgcatgccaccatgccagtctaatttttttatttttatttttttgtagagaaagtgtcccactgtgttgcccaagctggtcttgaactcctgggctcaagtaattctcctgtcttggcctcccaaagtgctgggattatagacgtgagccatcacacccagccttaaatattactttttcctgttgttgaagtgatacatattcatgaaagaaaacttggaaaatgcagaaaagtagaaaaaagaaatgtcatccacagtcccatcactcagagagaatgtgttagtgtatttttggatactccaaactcagaccctgaaaggtccctaagactgaccctgaaggtggtcagggctagtatagccttaatgagggctggtcaagaagcttgttgatgtcaggcaatttacccgagctcatccagaagcagcggaaccaggaagaaccccatgtcacacaaatctctgaactcttgtgttgactaagctataatatcttgcaaaagatgggattgcaggcatcataggactccctaccctgcattttttaaattttccccagagaggagctgggttaagacaggggccctgattggcagagtttggggttttgaagaccaataataatagggctcttccaatattttttttaagagtttttcccttttaaatttagatataatttatacacagaaaaatgtacaaatcttttttttttttttttttttttttagatggagtctctctgtcgcctaggctggagtgcagtggcgtgatctcggctcagtgcaacgtctgcctcccgggttcacaccattttcctgcctcagcctcccaagtagctgggactaccggcgcccgccaccacgcctggctaatttttgtatttttagtctctgagtatctgggattacaagcgcaccaccaggcctgactaatttttttttgtatttttagtatggacggtgtttcaccacgttggtcaggctggtctcaaactcctgacctcgtgatctgcctgcctcggcctcccaaagtgctgggattacaggcgtgagccactgtgcccggccaaaaatgtacaaatgttaagtatagtgttcagcttgataaagttttacttacacacacgtacccaccactcagatcaatgtatagaacattttcagcaccctaggagtggggttgccaggaggctctctcaagcctctttccaggcagtacccctacaccaccccccaacccctgctaggctggaacgcagtggcttgattgcaggtcaaacttctgggctcaagcaatcctcctgcctctggctcgcaaagctctgggattactggcatgaaccatctcacctggctaacatttattttccctctattgtcttcagaaaacccccaacttttcatctggaataattttagactacaaaaaagttataaagctagtatacccttcacacaatttctcctaatgttaacatcttacataaccattatacatttcttataactaaaaactactattacctaaacttaaattttattttaagtttatagcctagctacatcaccatgttgcatatgacagtgtctcagtttttttcttgcttttgattaccttgatagtttgaggagtactggtgaggtgttttgaggaatatcccacaaacgagatttgtctgatgtttatctttcagttagactgaggtcacggttttttttttaatcacatgtcaagggcaagtgcagtgactaatcactttgattttcacgtggagtggctctacagccctctttccacactgtactcttggaaaggtcgtccccaggcataggccacactcagggtgggtgtggacggattaccacacccctctggatgaggtattattagaattcctctgcaaggaagattatcccttctccctcatttatttaatcacgtatttatagcagcacgggctctgggctgttttatactttaggttataacttaatgcaatgtactttatattgctgctcaaattgtcccaggcgcggcccccggaagctctctgggtagatccctgcgcccttggacgcccggtccttcagttttttgagcacctcaagcttctggcctacaaaacgctcccggctcagctggagctttctgcgcccgggtcctagagtcgcccatttctctaaggcgccttggccctatttttagagagcggtatttagaaaccaagattagggtgctaacaatttttttttaaatttttatatttttaagacaggatctcactttgtaacacttccttttagtggaagcgccgacctcctgggagacccacgccccctgccgccttccgtcccgtttctcagaaaaccacccagacaccccgccccaccggccggggcccgccgcgcatgcgcgccgaggcgtgacgtcagaacggcggccaggacgccggacgtgcggcagttgcaggcgagcaggcgaggaatcgccgtggcgtcttggtgttctccacgctggttcgcaggtgagtgtccctgtttagtccggacgaccctagctcctttcccctctggcccgcgcctctccagattctcctctagagctgcccagcctcgcgcccctctgaggggaccccgcaccgcgccacctccgcggtgtccccactccctaattttccctgaggctcctggccacgggtccgcccacctccctggaccaccctgaccttccccaggtccgccctctcagtctcccctagagcagcccattcgagagccctcccagtgggcccccccggcctctcagaccccttcccatcgcttccccggcgtccgcctccggtcctttccccgagcccctcctctccggccccgcggaccctcctcctttcccgactgcagcctccgccttgcatcctttctggccgctcgggagtgtcccacatgtctgactgccgggacctgctgcggcccgccgcctggggtctcccggcgtccgatctctacccctgctgctccctctgctccagggaacttgccttctcagttctcctgcccagaggtctcccctccttaagtcccggggggcgttgaggctttaccctcgcggtgcggtccgcccccgctgcatttcacctgctcttggccttgcaatgtctttagtcataagtgcttggtgtaccttatcttacatatctctcttcatgtttgattctgttactcaactagattgaaaactccggaggtcagggatttgcatagggatccccgccccgccaccccgcttaaatctcaaatgtagaccggttcagggtgggtggaggaaaggaatgaggtggagtggtcactgtaaaaaattaaaggaacatggttaattcaaaataatactgactcatggtctcagcctttaaatttttagtgcttaggaaagggtggaaccaccaccgagggaggagggctgacagctgaggggaggaa

SEQ ID NO: 8508 - DNA, 6000 bp, Homo sapiens
cccttgaggttggtgggacattgcattagactcacggcttcttaatagtactggactttggtttctgttttgtgttccatacggagaggtctcttcctttctgagtttccgcatgcagctggtagactcagcttggtttggcggaggccatgtagtattaggcaggaattggggtgctggtttgattctaactggaaaacataatattttctggcctcagggtcttcctctgtaaattgagggtttgcatttgatattttcctaagcaaaaccagacgttgtcttccagtctgtaaaaaggtattttatacattttaatttatcatatttcctgttaaagttgattgttagaccagggagatgtggttctgtggtgagcacaaaaccaggagtttggtaagaggttgtgcagtcaatgcaaggttagcacccagttgatttctgcactgtgttttggttcacggtagaagcagtccatattcatccaattatgaatgggagtggctatcattttaaagaataacttaccaagcactctaagttgcttttaatgtaaattgagatggaggctgaaaagagaagtagtagaaattgtttcaaagttgaattattaacatctaaagacagttgtcacttaaaatatgggagtcaggcaagcagccttggaacttcaagatatgtgaccaactctcatctggcatttaattagggtagtgcttttttgtcatacaatttcatgtgaatagatacctgggcctgaattaaaaaaaaaaaaaaacaaaaaaaaaacgtaaactagaccactactgagcattagttttgtgaccaataaggtggaaatttgaagttcaaacttcagtgtatggaggtagccagggcagttttgctgagtctctgcgatataaattgatacgtatattgattgtctctagtatcttaggatttggcatgtcaaactttttttgaaaaatgtttaaaaacatcttaaacaaaaccaaaagtcaaatgaaacatttgtggaacctctggaacatctctgtgaatgaatctttgatgttctttggagcacagtttgagaaccaataactcagttgctcacccctactcctgtggctctaacagtgttctgtgtttctagaactttctccatgttatacatgtggaaactgagatggacacacttaggatcacacaatgccaatggtagaacaagctgcagatcagagattttcaggtttttgatgcaaggttctctcagttcctccttgtcaccctttcaggtcttattttctgtgatcttctcagcataacagtgacaatacaagtggcctccaagaaaggttcccgggtattttcccctccatcccttgtcttagacatattttgtttctgtaatctcactgccctgcccccctagaattttcttctggagtgtttttttgcagttttcttctctgttaatacctgactaccatcacatccactttagtttaaccctgcctcttcaagggttttactactaagggtaaaatcttgtaaaaggtaaggtgcaaatgtattgtcagaatgcccaggttctgtggctcataccagaaggaggtcttggaggtctttgctaatttgcatttcttcacctcatttccaccatcctgtccttccatctagcaaatacttaatgaccaccctctgtgtgcaaggcatggccattgccggcatttcttgtctttgggggcctcacagaccccataggcgagatgaaacgggattgtcctatagagcaaggaaggagcacgaactgctatgagttacgagtactctatggaaggggagctttcctcagtctagggagcccctggaggctttatgcaggaaggaggtggggtgagattggaggctggagatgtgggtgggattttccaaggaaattgggtggacacagtgacttaggatttcttgaaggttactgtacaggatgaagctaaatgtaggctccttagccaccatttaatgatgactatgaagtagctcaggtggtacacagtgaggacagagaggtctgggaaccactaagttagagcagcgctgtcctatgtgaatgtgtgaatgtggcgcatgggatggtattgtcctgcagggctatttgaagagaccaaatctctgcttggggctggcattgcttctgaagggatgggcatttctgcctttgtttatcctctgaggaggcaggcccttgtgtcagaaatagggcctccagggatgttggatggccacctggaggaactgcttcattggtctcgttctcactccattggaactgggctgctgctcagtgttctcaggtgggttgagaaattggcatttgccagacaaggtgggccaggagccttctgaagccaggctcctggccaggagcctgtaaggttgatccagaggttataagagcggtcatatgtggtgaactggaagtagatcactgtggtttccttctgttgctaggcccatggccagcccttagttcctgccctggtcttggctgtgctaggcccatgacactcatctgcctgctctaagccaaactcctccttttccccatagctttagaggtgggcttgctttcttttttcttttttttttttaacagttttttttttgagatatgatacacatatcataccatcctcctatttaaacgtatacaactccatggcttttggtatgtccacagaattatgctcctatcaccacaattttagaacctttttgttaccccctagaaaaaccctatacaccttagctatcacctctcatttcctccattctccataccccagccctaagcaagtactaatgtattttctgcctttacagatttgcctattctagacatttaatatcaatggaatcatgcaatatgtgtttttttgttactttttttgcttagtataatgttcttaagagtcatctatgtgtagcataatcagttcattcctttttatagccagataatatttaattgcatggatatggcagttttgtttccatttcctcagttgatgcacattaggctggttttacttttgtttattatggataatgctgctgagtatggatactgctgctgagtacttctgtgtacaagtttttgtgtagacacgtattttcatttctcttgggagagttcctagaagcagaattgtttggatcatacagtaactccatgtttaactatttgaggtactgccagattatttcccacactggctgcgccatttgatattcccaccagtggtagatgagggttccaatttctccacatcttcaccaacacttgttcttatctgtatgtccttatgagtgtgaagttagtatctcattgtggttttgatttgcatttcctctaatgactaatgatgttgagcatcttttcatgtgctttttttttctttctttcaggagaattgacacatttctttgccagagatctctaaccatctttataaaggttgaagatgattttgttgtgttgaggcgtcagtgggaaggaacaaggtgattgctactcttttagaaagtaggaggatagaggggatgcatattgaggtggctaattctgcaaacagacttggtgcaaacttttttctggaagtgaattgatgaagtcacggccatgagctgacattactctggttggcaacaaggtcttctgagatccactgtatagtcccactgtgcccattggatgacttagctagaggacacagccgttagaaggtctggaggtaggcatcttcttagctccagcaacaacttcttgatcactgttagtctagggcttcctcattaattgtctggtcattcctgatgatcttcattgtcattttgtggcaccaagactatgaggatggctgttcattttcctcctcattgtccacctgttactgtgagagataggggtgtctcctgaataatgcttttgaaaagtcttaagttctgtcatcttaataggaattgtagagatgcattctgtgattctctgtgtgtgctgtgtgtatactgatattgtttctattatttcaagctctaagtaccactggagaagagaagtttcctggcacttctatagtcacttaaaatctgggccctcactaatcagaactgtactctgaactccgcatagctagggattttcacttcaaatttgcatgtctctgaactgggataattttacctaggctgagattttttggccatctctttgcgcctctgatacaccatctggatgtgtctgaccttctccaaggcaagggcagagaagaagccttctaccttctaaggaagctattgttcagttcctagcccttgatctttcctttgttttaactccatagcttgagcagcctattcagtagggttaattgaggaagtagagtggggtttcctgtctgaaagtggacagctaattcctaccagtgattcgggctctttactaaaatagtgaaagaaaaatcaccttttttgatgtagcacctcattggcttgctctaggaaaattccttcagccctggttcaaaattaagtaatgagtaatgagtatgggttatcaaaaaaaaaaaaagccaattcccttggagctaggtgcagcacctagttcgtaatgtggctgtcagagtgtaattctgatggggtggaaactccatcttgttcactgttcagtcaccagggcctgatggccgctcatgctcaatatagacttggcgcggagcggagtggaggaaggaaagagggcaggtgctagttggctggcctgcagttagaagggctgaataaagtgctgtagtgccctaggcgacatattcatttagcagatactttattgtgccactgtggtcagtgcctttctctgagaaggtgtgtgtgtggggaggggctccctaaaggatgtcatagagtcccacatagaaactttgaacaatccaaggtagacaggtgtttttaactcataatactcctttattccctgttttaaaaatttttttaaatttgatacaataattatacataataatggagtaccatgtgagattcaatccacatatacattgtgaaatgatcaaattaggatagttagcatgcacatcacccccaaataattattacttttgtggtgagaacacttaaaattgtctcttttagaaatatacgttattattaaccatagtcaccttgctgtgcaatagaacaccagaacttattcctcctaaatgtaactttttacccattgaccactccctcctcatccccctctctcctccccacccctggtaaccactgttctgttatctcctatgatagcaactttttagcttctgcatgtgagattgtacggtagttgcctttctgtgcctggattatttcatttagcataatgtccttcgggtatatccctgttgctgcaaaagacaggatttctctctctttttctggttgaatagtattccattgtcagagaagtgttgtaagactaggaaaggaacactgcaggctggagccctggggaaagtggtctgaggcaggtggtgggactagagctggggtctggcaaacaggctgggtttgattgtcagcataatagagagcactcatgtgccagctgggtgggaggagcagccgagtgaagaaggggaagcctctcaggaagcatgtgcagggtttatggtaatgagcagaccagcaggtacgtagtgggagaggggtgtgatggggcagaggaacttacgttatgatagtacaagacagaggttgagcctcattttaataggcattgtggtgggtgttgaatagtgatggaatgtatgggtctggaatcaggctgcctggtcaagggctctgaaacatgagtgtgcatcagaatcacctcgaggcttgttaaaggataggctgtggaccacatctcctcagttgctgattcagtgggtgtgggtggggcctgagaattcacat

SEQ ID NO: 8509 - DNA, 6000 bp, Homo sapiens
gtaggaaatccattcttagatcctctatgatgaatttccaatctgtgagacctttgtgaagtcaaagtacaataaaattgaattactaagaacttgaggccgggcacagtggctcacacctataatctgagcactttgggaggccgaggtaggcagatcacttgagctcaggagttcaagaccagcctgggcaatatggcaaaacgccgtctctacaaaaaaatggaaaaaaaaaaattagcccggtatgtttggcacacgtctgtagtcccagttactcaggaagctaaagtgggaggatcaccagagcctgggaagtcaagactgcagtgagtggtaattgcatcactgcacaccagcctaggtgacagagtgagacctatctcaaaaataaaaacaaaaaacaaaacacttgaaattaaaacaataaaatataagctcaattattttatagtttcaacagacgtaattatcaagtttctacaaaactttgtgaacaattgttgtctgtgtccatacatatctcattaaatattagtaacaaatcttttgagaccagcactggcttaagacctacactttgagtagtgcaggtttactccatcatccttccatttgatattggtttaaggtaatagatctcaaatcctgaactattctttgtcgggtatgctaaatgcccaacctcctgcagagtatttagtatcctagtcctaggacactaaaaaccagtgccatcacccttactagttattgtccaaaccaacacctttcccacctcctacccaccaatgggggagcatcagcaacgccataatttggaaccacttgggggtgtgggttctgacagttgctcagtagtgttagcgtaggcactgtggttatcagcctggggaggaattgagtcctagcacctgttcaagaaaattaagcacctgtggtaatgaatttaaagtggagggtgggaaagaatccttgccaaattatgcctattagttttgtttcctacacatttcttgaattttgaagggggcgatagtggggagaaaaagtcaaatattacctttgggatgttgggatgttgagatttatattacatcacagtttctcttaactcttctaactcactttctccttcacctaaaatcttttgtcttaacacttttccccttatccattcccacattcttatcctcctcgatatgtctttttgaccccattggcacagtgcaatgctatacagatggacgttaagtagaaggggaggaataaatagcagcaaaagctaggatgtagagaattttcttcccaccttgggcacttaaggagagggggatatttataaaagatacatcgatcatttctcccttccttggactcaccaagttaccaaatttattccccatgcattatgccttacagcgttggcatataagaaattcgttacttgtgccacttcaagaatgcccatgtcatctgaacacagatttttatagtagctagaaagcagcacgaaagcttctaagtccttcatttaaggggaacttaacatcctccatactccaaaggttttcagtcatcttcctgaagatgaaggaaaagagattagacgtgtgttgctgaagtgtctgttggtgggtccaaacgcaagttcaattataacccagttcatttccagctctacttcagaactgaagatttaaacttctccacatctttttgagccatgactttgttaacacaaaaagaaatcttttattctggaagcagtctgtgtcacttatttacctctacctcctcatccagccaacactctagattgaactggcttctcaagattcttccacctgggaataattttcagttcaattgaacttggcaggactctgaacttcaaattctagcattggagtggccataaggctaggtcttggggctgggaagtgaatgaagttagctaaagatgtttatctcataatgcccgatgctctggtcgattagaattcatgtttccttttcctttcctctcctttctcattttccttcccaaaccaggttttacaccttgcaatgtgttaggaagtggttgttggatttatggattttaaaaagtgattctagaaaacaaggaggaaagaagggcaatggggttagctgtagctacctctttttaagctttgaagctccggtggaaattagtcacaattccttgtctttttaggttacattatttttgaattaaaaaaaaaaacgaaggggtaattgaacacatttaggaacagaatagctgcgttactggttgttaatacttttcccatggggttttctgtctttgttagaaaggaatgtcctcgtgaagactggctgcttctctttagtactacagaaaaataattttcatgctctcgttcttataatggcaaatttagttggtaagataaggaatatatttacaagtttcagttgtattactcgctattccagttattccacttgctcaggcttcacaattaaagaaatactgaagtgatgcacagataagacaagagtggggcctgaccctaactgacatcaaattctctaatgaacttcaagtgtttctagagtaaaatatactcttccattccagaaccgttagtacaactcttaattcaaccagaaaatggaaggcttacacatattcctttgaccaactcataaagataggagaactacatgagatcattcagacacctttaataccgacttgggactttgtaactgttccaacatcagtcaaattctgagcatcacgatttgagaactggcaatcttggagagatttaaagagccacgttgattattaataaccctgataagttgtagaaatgggcagataattacaggatgaacttaatagacagaaatacagagtaatttagaggaagtaaactgctgtaaatataagtgagaagacttggctttgtgggaaaaggtgggaatcagtaaaccacaaatgaaacatgaattagccatattatacagttgttttattaaaaaccaaaactttgtagagtacattaacagagactgtatttaagagaaaggcagtcatcccttagtcatttatacaattatttattaagcacttatgtgctagttgatacttctgggtgctggaataaaataaggaaaaaatcaagatctctaccttcacgaagctcactaaagtgtggtaaatgacagagcaactaccttcaatagtctctagtttgtattctgcaaccaactgaatacagcaaatactaaaagctacttgaggtagggatccatcctatttttacctgttggatcccattccgtgcctagcacaccagcttgtaagcaatcgacatggattaaggggtaaaaacaggcccttaaatagctaaaattttgacaagtaatcacttgtctgatcatcaaatatgtcgttcgaaatcctcatttttttcttcaaagcgcagtaaacaagtatttgcgcacctattacgtgcaaaacagttttcaacacaatgctttgtgtgtaaaaggaacggcgggaatggattcaagttgcgcatcgtgataaatggcgtgaatatcctgagcgggtggacagcccttcctccgtgagttttttctttttcttttctagtcaccaagacagcacgcgtgtgcagaagctgcagcggtgggacgcagtgctaagtctgggggcgcacacaccagctcgcgcgtcgcgagctcgcctgggcagctcggcgggcgcggcgaaacagctcccacgtccgccttccaccgactcctcggtatcagagcggacgaggcgtccccccagaggaaagactgggcgccgcagacgccccttggagaagtccctggccactcgccccacctcggggtcctcttcctcttgggcttctcctgaccctttgggtgggcgctccagacaggcccgtcggacgcgatttggaaacgggtcgtgcccggcctagcccgcatctactcgcccggccacagcccagccacagcttagggactttgaggcgcccgcgcccctttgtcgcggtatctctagcccaagcaggccggacgccgaggcctcgcggtatcgagcctccgtccgccccgcctcctcgccctccactccgccccgccctcgctctctcacccctcccccgctcccgcctcgcttccccgacaatctcctcgcgctcccggcccggcacgcgcgctgcgcccggccgccgctgccgccgccgccgccgccgccgctgccgccgagcgttcctccgctgcgcctggcttccagcttcgggccggaaccggaagtttggggggcggagcccggcggaggccaggagaccgaaaacgcggccgagcccggagcccggagctggagccagagcctggaccagaacttggccgccgcctgcaccgccgccgccgctgccgcccgccgccccttccccgcgccgcagccgcctcgccgccaccgccgcgagctcggccgccagtggtcctcggactttaggtgtctgggttgaaggtcggtccggacatcggacccagtcagttcccagactgtccgggcggcagcggacgccgctgccgccgccgcctcttcgtcgcctcagcctggcgttttgttccgagagacgggagaggcgagcggagctgacagtgattttgacagtgatttaaacccgcttttgttgttgttggcttttcgttgtttggttttgtgtgttgtgcgtgtgtgtggcggtttttcccccgtggtgcattttattttttatcgttgtgctcttttttttcttttttttttttaacccagtgagcgtttttttttttttttttttttttttttggtctgggcttccgaatatgttttatgacggttgattttacaccaggaggtttgtctccgaggaagacccagggaactggatatctagcgagaacttcctccggattccccggcgcctcgggaaaatgggagctgctgcaaagttggcgtttgccgtctttcttatctcctgttcttcaggtaggtgcagggagcgcggcgcggtggggctgctcctgcggccgcggcggccgctgctgggggccgcggctggtgttgagtcggagagtccagtggagcctggggaggttgcccactccctgcgcccctcggctgccaccgccccccccccccgcccccaggtctgattgtgatctggaaacctccatgcatttttctctttttgagttgggtcggcgagctgataagagtgagtgctgtgttgttgtggaagtgagaaagtcatgttttgtggccataacactggatgacagcgctggttgggttgcaattaagccgcaaataccacaagtgacaatttatgcaaaggttgagatctgaaaggagtatttagtgtgggctcctccaaaacaagggttgctttttgtcatcgtttaattagtgcttcaccggtgaatatcacgacatagatcaagccagttgctgcttaattttggctgtgggaaacaatacatcctatcagcaatttaatctgggtctcccctcacgttttcttcaacttcagcgtccagcagtgttaaaaatagttgtagttgttgttggagtattaactataacccagtgcagaagaggtatgccgcttggtattggtaatgtgctggcgttcaaccaccatttgtgtgctcttttggggcatagattttgcttacctacggaatacttattttaaacgctttgtattgaagcattgttttcggtttagaacaacccatgtgaaattgtttttgttaaatatagtacactcataaaataggttttagctcaaggttgggggaataaacgggccattttatattggaaattttgattttgtgaggacgttctatggttgcaaccagtggttggaaaaactatctagtcttttgtatttgaaattctataaataaatacagcatctagctgaaaggtgt

SEQ ID NO: 8510 - DNA, 6000 bp, Homo sapiens
tcattaattgattcaaatttttttgtggctatccatggattttatcaaatctattcaacataatgataaagcttgaatatgaagaatgcccgtgcattataagaacagtcaatctgcagctgacatggttaccactaaaataacaaatcaactatatatgaaatagaattacttaatctttatgttgctaaatctttgtgttattagctggagctattcccactagcagtttctgcccaacctccttgctttcccacccacaatgggctatactttgaactgcacatgcaggccattctccaagaagctcttatcaagtttcttatgatccaggctatctaattacgggccctagcaacttgaggctacactacttggctacttctgatgggtgtagtgatcgatatgttatggcatatctataaactatttgtggtgcatgagttgaaaagctcaactcttagcctatttcaattttcttctagaatttattatcacctgacgtaaatacacacctacttatttatttggttaggatagccctccccaacatttttggccccagggaccagttttgtggaagacaatttttccacagactgggagaggggatggtttcaggatgatttaagcacatgacgtttattgtgtactttatttctattattattacattgaaatatattatgaaataattatctaactcaccataatgtagaatcagtgggagccctcggcttgtattcctgcaactagatggtcccatctgggggtgatgggagatagtgacagatcatcaggcattagattctcataaggagcacaacctagttccctcacatgtgcagttcacaatagggttcacactcctaagagaatctaatgctgctgctgatcttacaggaggtggagctcaggcagtaatgtgagcaatgaggagtggctataaatacagatgaagcttcactggctcacccatccctcatatccttctgtgtggcccagttcctaacaggccatggactgccataggtctgtggttcgggggttgcagacctttgggttaggacatacctcagcaaaatgtagtattcatgaaggcaggatctatatcttttttctcactgctagacagtgctaggcattttcttcttctcactggtaggcactgggaatatagcagtgagcattagccttagctcactgctgtattcccagttcctagtaaataactgtcattctgtaagtgctcaatgtatattcatgggatgtatgactgaaccctaagttttgtgcaggctgtctttactttcctctttgtcttcaaaacctattgcagtgcttagctcattgtaagtacaaaggaggtaagcagagccccagagtataaaggttcttatagggcatgttagagattttagacaatttcttaaaatcaatgagaagccacttaaatgttataattagaagaaaatattattagatttcattttagaaaataaagttattgctttcagtgtcccttaataatggcatctccatcatcctactcatccaatcttaatctcttaaagttatataatacattttcctttatccatcattcctaataatttgccaaaacctggtaatttaatttcagcaagacataactatctcaccctttatttccctttagaatgagcgccttggttaatcacataatggacaattgtagctgctaaactcatatccctgtcttttgtatactctgtagctaaggccctatacatttggccttatattggccaatagacattcttggcctggtagcccttgtattggccttatagccaagaattgtacagtattggtcttaccatttatctaagcaaatacttgcaatagctccactttgattaaagataaatgccaaactttctgtttgaaaaaatatgactttttaataactttcaacactcattcagataaattattgtggttattattcttatgaggtaaataatgataactacctgatttttaaaaaagtatttaaacttcaagaaatattgcaaaattactacaaagaattaacacatacccctcaccaaaatttaccaatggtgttataaaaggttgccacatttgcatcatcattctctctataggtatttctggaccttacaacctctatgttctttttactgcaaaatattttattatattttttaaagatccagggctttcttatatatgatcacaatacaattaaattaggacacttaatattgatataaaactaatttgattataaataaaagtcatacagtttagatattatagtttttattaatattttgaattagattgtctcagtaatgctctttatattaatagatattattcccagtttgctctccaattctggattacacattgcatttagtagtcatggtttttaaatctccattagtctggaatatttcctcagcttttctttgactttcatcacagtgacatttttgaaaagtataggcaagatattgtgtagaattttccttaatttaaggctttctttgctttctcgtgattgcattcaattatgcattttttaatctggaatcctaaatcaataatgttatgtacttctcagtgcatcatatcatgaggctcatgatatcacttggtcccattattggtgactttaaccttggtcagttggttaaggtgatgtttaccagatttatccactacatgtaatttattattcgtttgtaattaaggatctatagtatattataaaaacagcctcaagttatttttgtgtatgcattctccttgaaatatggcattatagtttctcccatcaagacatggactatattatctatgtttgggccatgtaacttccatggctaatgagacaccagcaaatgtacgtccacagaatctcagagtacttcacattggagcttgcactcccttgttgctttttggagccctgcaactacgactactgctagcctattgaaggatgatgggctagattaaacaaaagacaaaacattgcagctgagtcccacaccctcaagactaataagtatgccacaccagacaagtgagtgaagccatcctagatctctaaaccaaactgagctagccagggcagaaaccaacctgacaacccacagagctttgagaaattacagatgtttattggttggggctaataagttttggaatggtgtgttatgcaccaaaagccaatactttctagggtgatactttgggactacgtaaatatccaattacccaaataaattttaccaagtttatgattctgcctaagttaaatattatcacaaagactgcaaaatggaattgcgcctttttttaagagatgaaacatgtaagaatgggggcttatttgtctttgaaaaacataggactagtaagtagctgtatcagcatcagaaccccaatcttttacctggtccacagtttttctcagtatgccatgtagaggtgagtgacctgatgttaggactggaattcactagagagagcagtagagagacattccagagtgttatgagtgggaccctgtgtactcacacatgcacagaagcatctctggtaaatgctccataattgacggtagggcaggatggacaatgtaggaggagacattaatacagttattaacatagaaatttaaatgatacttgactcacgaaaagatataaagataatatctctggaaattgcctttcatgagtataatcaagaatggcattgacatactagattatgattaatagtatcatatgtttgtcaaacgtggctgtttaatatttttatgtagtcgttatatcctcccccaattctgccaaaaacatcctataagatgtgtgaagtgacactgtgagaagcaaggacccctgtcagcccttattacaaacaagacaactgacacccgaagggccaaaactagccaagagccacagtgaataaattgccaagcaggcacttgaactcggcaatcccaatttcctagaaaagttcctctcccatggcagtgggggacaggtcccaagtctttgagacgctaataatgtctgcgtcttaggtttctgccttgtgccaggcactgttctaaaatctttacatgtatttaaactcagtaccatgggggtattggtacaacacattaactgagacattcatacgtccaggtacttcggagtgggtgtgtgtttaatatcatacctacttgcctgagaaaggaattcaaagccccacttttttctttacctcttcataaaaatttgagagccacaaggaagcgctctgtgtttccagtactcttacagtgcgttcggtggcagtagtcaccgccaaccagaacactaggatcctgccagggtgtagatactgtaaccaacaagaggccaacctccgtcctttctgcggagggcgccgaagcgtcaagtaccccgcagcatctctcggctggagagccgacggcaagggtggggttgccggcgctttccccgagggcagtctctgatcctccagctcccctctaagaggctccctggtgcattgggcgaacgcggtgcacgcaggccggctttggcgttgtggggccccaaagcggccaggggtcgcgaggcgccctccggcgagaggagctgaccccagggttgctcttgggggccgtgcctgccaagtatcgcgggacttgcgcacatcgcagaagcgccagctccagaagcagctggagcgcgctcggtgcgcaccgccccagcccggggaggagcgggagcagggagggaggagggctgggggtgctggttacgtaaatgatactagcccagtgagaggcctccaggctggggctacgagaggaggagggaccacgcgaggaggagggaccgggaggcggcgggctggggtgggaggggggcgggggccggggagaagtgaccaggcggcggcggctctgctgaggtgacaacgtgctagcagccctcgctcgctctgggcgcctcctcggcctcagcgtccgctctggccgcgctcgaggagcccttcagcccgccgctgcgctatgaaggcccctctctggggctggccgaggctggagccggctccctctgctcgcgggcaagtgtgaagagagaggcgcgggcgggagccggggctgcgcgcggcgctcgcgggccggcgcgggttccaggtgagcgcggactcggcgagccccgcactcggcgcggccggccggcgcctgctgggcttgatctgaggctgaatcccgtgtgtggaccgccgttccctcttcgcgggatcgttggccaggatagcaggtctccgtctctttctcgcttcccctcttttcctcttgattgtctgggacgagctccctctgggctgccagagtgccggggctaggtgccgcaaagtcccgcggcgagtgccggggcgcggagccgagcgccccgggccggtcccagggcaaaggcaggggcgcgggcggacctggcgacgcggcctcccgggagctccgagtgcgctcgcttgcggggctgcaggtgttgcgggaggaccgcgtggcgcggaactttctgccgccgcccaccttctgctctgcttttctggctaccccggtgagttgttggtggcgggggggggggggggagcggctctggccccctctgcgttctggtgacgttcctccgcgggggtggctcggcctccaagcccagacaactttctcgcaccagctgcaggcagccccggctgcgttgcgggcgtttctactcgacccgacaccaggcgctccctgggtcttgggtgtcttcctcgacggttgccttcgtatagtgccccctttgcctcgctttttcagagtcctcttgcctctcattctcgccgtgtgtgtctctgcctctgtttctctttctgagccttggtcccctcagtccacactctccggccatgtatctgtttttttct

SEQ ID NO: 8511 - DNA, 6000 bp, Homo sapiens
tatgtgagataatggagatcagctgcattgaggcaatcataccacaatgtataaggctatccaaagtcatgttgtacaccttaaatatttaatatatgtatcattttattagtcaattatagctcagtaaaactggggaaaaagaaattcagtgatgcatccatggataatcattattctctgtaaaatatacatttaaattaattttccttttacatctttctttttacttaggagtgagtagttgagtaaatatcataaaataaaacagatattagttacttaggatatactcacatagtcaagaaatcttcaaatacccagataaagtaactgtagatgcaaagccagagagctggaaccggtgtttctaagattctgtacttccatcagggagatttaaggctagatataaaacagtgtttactgagctcctacttgattaacaatgaggatgattcaaagacatttgccatgagaatataacacaaatatacttttcactctaactttatgcagatctgttttgctgaacagtttttgatctagtctgagaaaattaaatgttgaggattaaatgagataccgtgaagtgactagtggtaggccctcagtaaattcccaatgaaaggttgctattaatatgattatcctgacaacaaccaaatagagtagagggcaagtcctcctactattatgctcgttttacagaagaagaaactaaaatctgtttttaaatgtttagtacaagctggagtcagactgataattggaataacccctccaaatgtctcccaaggataattcgtaactccagattttcagatggatatcatctccaactaagtatgtacagattcttgagaaatttgaccagccaaaggtacctgcattctacgacttgggatgacaagccaggctccctaactgtggggtacctcaaataaccaacccacttacgtatttagtttcctgctggtaacatggaaattaatacaactaaaattttagaagcaccgtcatttaccaatatacaaatgtcatgtgttgggcaatatgtgtgttgatgaaaaggtagaatttcctaatatccttttttttctattccttttacctatgcaattcattgatctgagatgtgaaacagcatgtgtgtcggaaaagagaaaaaaaaggagaaagatgtacagctatgagggccacagaaattattactgagtgcctgaagacacatagtgttgaattagtggtatggcttataaccaacttctaccatcatcacagattatcataaactcacaagggaaaagaccaagaagaggctgggaagagaaccttacacaagcttttccatgtgtgacacatccatagtcatatggctattagtggccaagtcagtactttagaccaggtctgacaacaaatctactcctccatttctaggatatttaatcaatgtttccttactctcctacccactcttcacatttcattctgaattgtatgtcaaatagaccgaagactaagccagagttaatgtgttgctttacccatgatagataagccaagattcccttttaattttcttaacatgttgctctcctgttgcaagtaatttgtgttttgattcgcaaggacaaaccagagagggataaaaagaaatcagtactctttgataaaatttatatggaaacaagaatatatttcaagcagtgttttaaactgccaagcatagaatataacaagtgttgactttcctaaaagacatttgagtaattccaactgccatttggggtgggatggtggctggacaagattgaatcatgcagagtaaaataattttaaagtattctattttcatgtttaaaacaatattgtaatgcaaaccatttatccatgatgctaaaaaaaattctcactttattttcgaatgtggatgctaaagatgtgtgctatgttttttgctggtggcgttctttttttattattattattattatactggtggcgttctactgaggggagttttaaggttgttaggggcagagacaatgtcacctacttcatgttttgggcatgtagggagttctcagtgaacaatggtcttgttaaatctataattagaggaaataagaatggcaagaataaaataaaatactcagatttgtttcttccccattgccagaatcatgttagtcactagttttctacttgtttttttgggaagagctggtacattgcctcccacatgcatccgacactcctattacagcaaagtattagcaacaatatgaatggctaacatttaaagagtaccttcaatataacaataactttaaccatttttaaatattctcacattaatctgcaaagcagaatttttttttattgctcagtaaccacataaaattaactagcctgcaagatcatacagctagagagcagtattgtgtgatattgaagcacacggactacagtcgtgtattcaagacccaacccctccaatctctaccagaagttgctttacctctctaaggtttcatttgctgactacaaaatacatattgtaatttactccttcacattagattcttgtgaggattgagtgagatagtcaatggaaagaacttagcaaagtgcttgagatatatatatgaatttggaatctctccttcccctcccaagtcattgggaacataagtttacctcaaagcatggaagctagaccctccccacactagagtaatgaacagcagtgttgtccacaaatcactcagagttcctcagagagaaggacagtggtcccgagaagtgcttctcaaactctatggacaatctttacaactggcaatgtcaaaatgtgtattctgatttagttgttatgggaatgcatagattttattagactgtactttagacagggaaggaatgtcacacaagttgtagactgtattggccaggatttttcagagaaacagaaccaataggattcatagaggtagataagtgagttgcagtttattacaggaattggctcatgtggttatggagactgagaaacctcagtccaggccacctgcaagctggagaaccaggaaagccagtaacatggcacattctgagtccaaaggcctgagaaccagggaagccaataacatcactctcagtctgaggtcaaaagcctgagaacctagtgagggatgtggaggttgtgggggcagactggtacaagccccagaggccaaagccagagaatctaaagttctagtccaaaggcagaagaagaaagatgtcccagctcactaacagagacagaatccacctttcctctgcctttttttctatctgggccctcaaccaattagtggtgcctgcccacattgggtgagggcatctcctccccactcagtgcactgagtcaaatgccaatctcttctggaaacaccctcacagatatacctaaaaataatgctttactggttctctgggtgttccttagcccagtcaagtagacacctaaaattaaatgtctcataggcaatgttcaaaaaccaaaaacaaacaaacaaaaaattgagactttttttctagaccagtgtttctcaactttagctgcacatttgaaagacctgggaagctttgtaaaaaaaaaaaaaaaaaaaaaaatatatatatatatatatatatatatatatatatatatatatatttaatacaatatcagcccaaatgtcatctccacctcctctctcatcaattgaccagagttttggggatcttgtttcaagtggttctaatgaaaagcctgtggcggaactgctaccctaccagtcaaccagcatcactcaaaatctggtccaagtcctggtgtggtcctgaaactgttgcttgctggtttaagacgagataagtactgaaactgagagtaagtgtatcttaatctgttcaggctactatagaagaataacatagactaagtgactcataaacaacagaaacttatttctcacagttctagagactgagaagtcagaaatcaaggcaccagcagattcgttgactggtgaaggcccatttcctggttcatagatggcaccttctcattatgtcttcactttgtggaatggcaaggcaatagggcctcttttttaagggtgctgatcccattcatgagggctctatccttataatgaaatcaccttcaaaagccctacctcctaatactatcacatttatgattaggtttcaacatatgaattttgggtggacataaacattcagaccataacaaagtgtttagaaacttttatagcagtatgacaaattaagtttatttgtaatcaaatgtaataataaaaacagatggattagtgaaaaaaaaatagttggcttacaaagaaatacattgaaaccccttgaatgaatgatctaaataattaaacatatacatctctggaagtgaggatataccaggccccttctttaagctgttatgtcttaaagctgaaatgttaacttcagtgataaattcctcaggcagagcattggcacctggctacaacagggttaatgagcaggagtagggtaggtggggtcacaaaccaggaacacatgccctccaagttagatagctttttttcctctttaattgccgtttaaacacacatgctctcacataacacagaaggtgagagctgaatgaagttttctgggtaatggcatgaaatgttttccttatgagaagtggtgttgagttacagcgtgcagacggagaacggggaggagagaaacggcagtctcaatctggcccccaccttttcttgggcttgtaggaaggtggacatgggctcccggagacaagacaagtgatatgttgaactgttcggtggctggaatcaactgctcctggagtgacctaaggccagtgtttatcagaacttagccagggccagccaagcaggcacagatgctctgctatgaaatgccacgcaggcagagactgacaagcggtaggaactgagctttccccttggactgctgcttcctgctgtgttcaggggagggggtcactttctggcaactctgctgctgctgctgctgctgctgctacttcagcttcctctccactcaaggtaagcaggctaagggagggcaggctgctagggaaagctttgtaccatgaacaggatccgaaagtttttccgaggaagtgggcgagtcttggcatttatctttgtagcttctgtcatctggctcctctttgacatggcagctctccgcctctcattcagtgagatcaacactcgggtcatcaaggaagacattgtgaggagggagcggataggattcagagttcagccagaccaaggaaaaattttttacagcagcataaaagagatgaaacctcccctaaggggacatgggaaaggggcatggggcaaagagaatgttagaaaaactgaggagagtgtgctcaaggttgaggtggacttggaccaaacccagagggaaagaaaaatgcagaatgccctgggaaggggcaaggttgtgccgttgtggcatcctgcacatctgcagaccctccctgtgactcctaacaagcagaagacagacgggagaggcaccaaacctgaagcctcctctcaccaggggacaccaaagcaaacgacagctcagggggctccaaagacctcattcatagcagcaaaaggaactcaggtagtcaaaatatcagtacacatgggacgtgtcagtttaaaacaggagccccggaagagtcatagtcccagcagtgacacatcaaaactagcagctgaaagggacttgaatgtgaccatcagtcttagtactgatagaccaaagcagcgatcacaggcagtagcaaacgagagggcacaccctgccagcacagcagtgccgaagtctggggaagccatggccttaaacaaaactaagactcagagcaaagaagtcaatgcaaataaacacaaagccaatacg

SEQ ID NO: 8512 - DNA, 6000 bp, Homo sapiens
gttgcctttttctataaagagctcagaagaagaaagaactctgatacatgtgcagctttgttcagaatagtacccttaaatatttctgctacccaaactaatggtgaactctcccataccagctctctgagtttcttaaagataatagtatttgcatacagcaattggatattgagttgcatacagcaatatccttctcaggatggactaagtttaaaatcaacttttaaaatagctggagtgattttaactgaaattctttggttgaattcttggctaatgtatctaaaatcttctcctaccttctgcaccctaaactggctgcaaaaatcttttatgacttcattaaacaaatacatgccataattattgttattctacttcattagtatgaatgaccatgtttacaagtaaaggcatagcaatacatttaaacaaaatcatttcagtaatcatttcagctgggtttcttttttctttctaagtactttattcaggatattgtttgatcgttctagtacttattagatacttctttgataactctgtcacttgggctttggaggtcatatcactaagttgtatcttaaagagattgttccattttcatgggagcttagttgcctctttcagaaaggcagtaagaaaaatcactgatagcatggcagggatagaaatcctgagattagattaatacttggtagaacagaggaggcttggcctagagaagctataacaatacaagacttaggattattgtatagaattccttctactgtggcactgctaacaattaagaatttactggggccgggagcggtggctcacacttgtaatcccagcactttcggaggctgaggcaggcggatcaggaggtcaggagatcgagaacatcctggctaacacagtgaaatcccgtctctactaaaaaaaaaaattagccaggcttggtggtacacacctgtagtctcacctattcgggaggctgagatagaagaattgcttggacgcgggaggcggaggttgcagtgagccgagagcgtgccactgcactccagcctgagtgacagagtgagactccatctcaaaaacaacaacaaacaacagcgaagaatttattgcatgaatttgggcacagagatagatatggaagcaatctttcttcactgtggcttttctggcaaaccagctttctaggcaagggaagtgggagaacccctggtttctagcattgcctatttttgtgttataaacgtatgtgccaccagtttcaagatatcaacatgatgtcattgaatgtgaagttgggaagaagtgcgcaccaccagctctgcccaagcccatgcaagctggcctggcacgcactggactctgcagaaccatcccagccccagagctccctgcagggtcagctcaggtctgtgctgtgactgcatcaaggttcagactctccctttgccttcttctttctcctctcacattagagacaggtgttgttcctaagaacatgctccagtaaacttcctgcgtgagaatctcagagtcccaaagcgaccccacctatagtgaagagaaattgaaagttaagttcatgatcattgaaaaatagagagcgaaagtcctctgttctctctcctaaattcattaactaattagatcaactatggcctccacctggttccctaatgagtcatagaatttaccttgataagttaataaatgggcaactcagtggcgctttgtgttttgttctgttggtccttatttaagtcctttatctcaaacagaccacacacaaaccaggatcaaatgtagccagatgctgacattagagatccacagtacaaagtcctttgttgccacagagggctgtagcaaaactgggaagactaaatctcatgtccaaatattattactgtcttgtttatcctattatgtcactaaattctcccatagctagcactcataagtcggtatacagaaagaatggatttctcagccataaacagcaccggcaaaattcctttttgccacatgaagcgaaaaagaaggggtgatattaatgaaatgtaatggaataatgtgctagaatagctataatttttagacctggtaaaattgtaaactagattaaaatgtgggtgacaaatgttgagtctaagctatttccccagaaaaacacaacaatttctacagtcaattttcaattatctgcccaaggagaaatagcaataatggcaattatccaaaagagtagataatgaacaaattcatttctacttgactttgaaatattattttgtattctgaaaccaacatttgaatgtagatgcattttatattctggaaagttgcagtgcctctaacttaagtactaaaattacactttagaaatcagactaaagaaagtagcttatatttttcctcttttcttgtacaatacgttcccactttctatattattcctgtgaatagatgtcattatctcttaggataatgttcagttcattctaaagcagagaaaatttgcatgtatatgttttctagttaatattttcctgcattgatggcaattaagtattttgattaaaaggacaccctcctttcctgcctctgctttgctaaaattattttttaatgtgtgaaaagaaaaatcccaaaacaaaacagaatggatattcaagataaaagttacatctaagtaagatttaagttttaaacctgcatctgcccatggaaaaatgagttagctatttacacattttccacacctttttttttttggccctggtttggttatttttcactcagtgaatgctatgatgactataataatacctaggatagggtctgtctcatgacagcattcagtaacttctcatttctttcattccttgcttcccttttctttgttcaataatattttatagaagatgcttcatattaaggcttcatatatttcaataatgtttatgtttttttccactctttccatagtaaattctacaaaagcaaggaaatgttttaaaaatatcgtagagtaaaatctttcaggtgctatttttccaatgtcaacattcagtacatgtttaaattcttaaaagctacctccattattttatcaatattattaagcaaataatctagtaagtgctatatgcactttaaagagcagaatgagggttcatgcagactaaaaactgactacatgctctcctgtcttatgcttacttacatggtacactcccattattagaataagacattttttacataaggcaaaggattcccaagtgttgcaatacttttgattgtttctgggactcttttgctttggtatttgacttgataagcagttggtgtttgtctgtttggccaaatagacgtgctctcctttaaagttctgaaatttgtcttcaattgaacaaatgacaaggcactggagaggtaggttaagcagctgtctaggctgagtagatctaagttcaaacaaacactggctccactaatcccaggatgacattgaacaatagacttgctctccctcagtcatgttttctcattattaaaatgaaggtaataatacaaaactaagaggattgtggagatgatgacagataatacgtataagtaacttggtgtaggcattcagtaaatgtgggtagttgttacaaatactagctaacgttgatgactacctatgcaagcaccatcctaagcactttctatgtattcatttatttgaacctcatgacaactctaggattcaggtaccgtcatcatgattttgcacatgggacctagaaaggttaagtatcatcagtggctgagtcagtctctaaacccaacccatacacttacccatcacacaacagtgattatcatagaaacagagagtcttttaacagaaactggaaccagcaaatggatccactggaatccacttgtgcctctgtccatattgttcacatggggccacactgctgaaacaccatcccaaacaaatgcctttgataagagttttatttcatatgaggacccatcacatttcagtcactcagcattacccagaacttactctatgatatacatgaacagttagttagaatagaacattccactttttattatgaagctttgtatacatatatagcttgagacccaagaatctgatcaatagaaggcaggtctagttggcttccatcctgttatttaaacaaacaggtctggatcagattcagccagtggcagagtggtcataagtgacactaaaaggtcttaagtgaaagggaaggtgcgcatgcctaaaatcccagctgtgccgtgaatgaaccaaatgtctttgcccaaaggcagcttcagccctctggaccttttttatcacttggaaagttaagatgttgcagaagaccttaggtaaaagctggccatccatgtgccaatcctgacccctcacgtggactttggttttagccttgtctgacctgtgcagttttgttttatttttaaaattagatcctaaagtacaaaactcaaaatatttcacatttaaaaaatctatatttctgtttttccctaaaaattggacgttgtgacatcattgggcctgtttatctttgtggcatcagtcaaaatcatcaactagacctgagcagtagctgccccttcaggtggggcatgggctcagtagctcatcacagtacccaccattccttattatctcacacccagtctgctggctcattgataccacctgcatgggcttgaaggcatctgagtttgtaatcctagtaccagctgaaaccctaaatgaggttaatttcttcattcttttttcattcagtccacctctattcaacgcctacccacatgccattctttgtattgtattgtccttaaatagaaatatttttttaaagtggcagttctgttttcatttctctgaacccaattcatttccgttatttctaaatttttctctcttcttggtgtccacttagggctacgcagcttgctcctggcacgggcaccttgaatctcctcctcacacagatggagaccatgcttgatttcctgaacttgtagtaagaagaaggaaaacacagcacgctggagccaacaggtaggcgagaaaccaggtaggcgagaaacacgtttctcagttatgcagcccagcgtcgaggaaaaataacagcaactctacaaaatcagaaatcagcgtctaaggactaatgagcagagagaaaagtctaggtttttttctttattaatgtttacctgctatagtatgcaaaatatccttgccataaaagccttatttcttttttaaaatttttaattgtattttaagttccaggatacatgtgtaggacgtgcaggaaaaagcctttattctgaaagatacaggagaaaaaaactcatagcttaaaagagtgtctttttaaaaaattcatacttacaagtgtctatgaaacattttagtggtggcctcttttaagataaactattaggtaactaaagatatgctttagatgacctaagacaattcctatttaaaacccatttctccaaggccatcactaattgattcttgaaacttctttgctgaagtaaactcatcccacaggcaattgtgcttcaatcatttcttacttcagttgaaaataataggattttgcatagaaaatgatggtacagttattaaaagtctctaaaatagtgaataattgttaaaatgtttttatttaaagtgataaaaagcaagataaatacttagaatattcctttatacactaaatggcacattaaataaataaaaatgattgcagcctatccggactgtgattcagggaaagaagcaccatgctggcaagaggtcacctggatgacactcctatctttcccatcatagcctctgtgactttgggccacttacttaacctttctaaactacagtttccttgtccatgaaattgacagttatttcagagtgtcttcaaa

SEQ ID NO: 8513 - DNA, 6000 bp, Homo sapiens
taaatggatgtattctaaattgtaatcgtgattaattgtaacaatatggattctgaagtaagacagatctaagtctgaataagttaatttgatcagttatttaacccttctgagtctgttttctctgctataaattggagccgaaacaacagcatggggttgtcgtgctaattaaatgagataatacttgcagagtagtacttggcaaacaaaattaaagattgttagtattactctgatttgataaataaggagtactttttcttctttttgtttatttcccatttttgttagatgagactgaatcatttcacttggtaaaaaaaaaaactaactaaaaagaatagtacagaacatttcctgggattattgaccctggagattttgtttaaataagcctccatacagatggacagagccaaaaccacagtgctacagctctaattcagcaaggaaaggctctccttcctttgagaggagttggaaaaacaggtccccctgcacagggaaaactcagaaggaagttccaggaggaagttctcctggtacattgtgaagatacaagaacagagttcatgtgggacatttacttaacaaatgcttggtatcacacagagtgccactgatagctggaaaattaacctgtgttaggccagatctacttcactacaggccattttctacagccaatcgacttcaacagggtagttataatgatatgtcctttatttttggaagtttcattaacattaccattcccaggatgtgatgtgtaagggaagaaaaacttctttcctcattcgttgccaggttcatggctaaggccccatgacaaaaatcaaattaacaagagaaaagcatacaagtttatttaataaatgttttacgtgacacaggagacttcataaataaagatctggagatccaggtaaacctgtgtgtttttatgctaggaagagtggatagttgtgcagaagtatgattagctagagcggctatgagctaatggtaataaacagggagatttagcaaggcttgtttgttcagattcttctgtttttgtgtcttcagagataggctcatttctttcctccaggtacagggagggcaccactggaatgagtgtcttatgacctacttcaggggaaggtcagctacattttatgacctgcttcaagaaagaaggggcaagggtgaacgtgacatactgcttctgccatttccttaaatgctaagattccatattttggggtaatgtgtcccaaaccccatcaattttgcactccaattagtttataggcagtttgccttcaaactaataatttacatttaaaaataaacaactaccataaagtcaagtttacgttcttgtagtcgagtaggacagtaacatgatattcagaaaagcacaaagggggatggtctttcacaaatttcagtaaacataacagtgtcaataaagcttgcaaactaaatgaatccagtgtatctagagaataaagatatttaggtgtaaaaccatcaactgttccagatattgcaagcttgttgagggccaagttagtgtcctatattatttatatttccaaaaacacctggcaaagtattttgcacaagacatacctgggacctgattggttttgttgattactatccaaaatacttgtgttgacatttgcgaggtagtattgccttgcaaatacaggctcaactccataaccacaaggagagcatttgaagcattttaaaaaatagcaatgaggtatctacttttttaacaccgtatggcaaaggaacagtgaacatttgaatgggtattcagcagtgtaaaacgctgacagcaaaactataccttccattgagttggcagctcattcttaagaagatattcatcccggcacaggtatcggacctgaagttaatctcagtgtatccccctcttcctctacaatgcagtttttaactctaactcaggagaatgtttaagtcaggagaattttaaaaaatatcaaaatcagtcttttaaatttcttttaaaaatatgtgcatatttataaaatattctgtataaataataaagtgtggtcatgttttttttttttttggagacggagtctctctttgtcacccaggctggaatgcagtggcgctatctcggctcactgcaagctccgcctccagggttcacgccattctcctgcctcagcctcccaggtagctgggactacaggcgcccgccaccacgcctggctaattttatattttcagtagagacggggtttcatcgtgttagccaggatggtctccatctcctgacctcgtgatccccccgcctcggcctcccaaagtgctgcgattacaggcatgagccaccgcgcctggcccggtcatgttatattttaagtttttataattgaatacttaaaacatacataaaagtagacagaatagtatcatgaatgcccatgtacatatcgccagccccaccaacaacccataggtcatcctgccctgtccacacctttacccattccttacagtcctgtattattttgaaataaatcccagatattatatatttcattcattaatacttaggttaattaggtaattgacctaaaatataaaaactcttttataaataaccatattatcatcatatctgaaaaattaataattccttaattatcaaatatccattatttaaatttataattgtgtcataaatattgtcataaatagatttgctgttttaaagcttgttccttcattttctctgttttgttttagataaacattgtcataaatagatttgttgttttaaagcttgttccttcattttctctgattgttttgttttagattcagaggttacttatgcttgtttgttacatggatgttacatgtgtaatgggggatattggacttctagtgtactcatcacccatatactgaacactgtactcaaaaggtaatttttcaaccctcatccccctccaacctccccccttttggagtctgcagcgtctattatgtccacctgtgtccatgtgtacccatggcttagctgccacttataggtgagaacgtgccgtattccctctccattttgtgtgtgtaatttatttctattgaataaatcaatttgtttgtatttcagattcccctgctggtttgatgattagagaatagttgcacttgtttcctttattctctgttttccctgtgaattggtcattggatataaaggccccattcaattcaggattttttgttttggggttttttggtgggggaaaggcaggatattttcttgctttcattgtgtcagatcctatcattttcagtgcagtttttaaaagctaacttttctattttctcttacctcatccttgcctttgttttgcccacaccttctatctgcaagtaacccatattaaaaacagagtgcataccctttcatatttttctccatattcacataggtatctttacatatgtacacagagtttgctttacaaaaatgaggtcatggaaagccttccaagtcaaatagtagagctcgagtttgttctatttagtggctgcaaaataatattccactgtgcatatgtaccacaatttattcagttatctcactactagtgggcacttgctttgctcccagttctttttgccccatcctgttcatatacacttatatacatttatataggatagaatcctaggagcaggatttttgtctcaaatagtagctttttattttaacagattttttttctggacagctttcaaaaaaggctgtagcaattcacatatccatcagcaaaggataagatcgccctttcccccacaatcttaaatagtctcaaggagccagcaagaatcaggggttctccaaggagaggggaaagtctatgagattccttactcagcaataaatgagctaacagtgaattattcctcaatagaaaggcccctttctattcatctttggatctttttagccaaataggcctcacacagaaccaaagcccagaacaacccaaaacagggtctgaagtccagaacaacccaaaacaaagtccagaacaagccaaacaggatctgaagacagttgtctctaactcactcctccccacttcatgaatccccgtgagttctttcccactggatagtacttgcatattacacaatcagctgcatctagcatctgctcttaatttcatttgatattttatcatctcagttaagattctgggaaaaagaagttgccttctttttgaaagggattgaaagaaactaggaaacttggcaggaagatcattcttaagccaggaaaaaaatttttaatgctcacatgtgaacatgtgatggtcataccagaaggagcacccacctccctccctctgtgacagacacattttcttagccttcacctttccttctttcaagttgctgaaaatccacagtgtttctgttcatttgttactttcattctcacctatcttctctcttgctccatctaccagaacaataattccccatataatacttctcacttcacttttcaacgcaggacctcttgttgggtaagctaaaaggatatgtgctctgtaaataagaaaaatctttattcaaagaatctatcaaatgttcccatgactccatctctatttgtatatctaaagattgcatagtagagaaaaacaaaagattagccctgcttcatcttacagctgggagagtcatgaaaggccaaatgggtaacaaagctcctggttttgaccaagcctagccaaagaagctactcaaatgtcaaaggcattgtttgtataaaaagggaaccaaagtacaggttccctttacagtagaaataagagaactccctgttgacaaagggaggaggaagaaaatataaagtacacttttaaaacatgaagtcttcatagcagcttatagtcgttcagagaaacatgttccactgagaatgacttgagagagaggattacatcattatgccagaaggaagaagccactgtgcatgctctatcaccagcctcaccctcctggtcagccttacaagagtgacactggatatactccagaagttggacccaccacagcctgcacactggagtaagtgctttcctccagttgaagctcatcttagaatgatctgtgacttagaccatccccagaatggtgtagttgcaggaagcctaacgtatgtctcctgagacagcctcagatctgagtttcctccttatgttttggtatttggaaaggggtggagaagatactcttgggtagaagtatgggaggcatacagattcagaagaaaaaggataactctatctttagtgtgttgtctgtggtggcatctagccttaccactgtatacttacattccacctacaaacattaaaataaaatgcacagtgcactcctttgttttaaaaaggaactaggaaaaaactcaaatggcaatttggttccagattttttttttaatgtgatctttgatctgaagtcaatgtaggatgagttctgaacaaagtagcactttcaaaggttgtatattaaagaggtgaaatgaaagacaacttggcacttgagatatgaatttgaatgtgtatatggttacagtctggataagacactgctaacatgacttcattaactgatcgcctatgtgggaccattggacaaggagagggggtgttctggctgtggtgccatatactgaaactgaacccatgagttgggcccacaggaattgagggacaagccagatagatggcaagaattctaatttccaatatgcaaatcagtctaaacatttgactttttttaagtctatttggaaagtttttgaaacacggctgcactaggcgagttcattaagtagcaaaattttaactattgttataactttttctttgcccttttcagttaacactgcatgaccacccaggtgcatgaggctctcttctcctc

SEQ ID NO: 8514 - DNA, 6000 bp, Homo sapiens
catttgcagtgcccaggctgtctgcaggcccacgtcaagctgccctcagcaccccagccttcctcccatgctcattagtgcccaaagtctgaaggggccgaggtagcagagggctggtgcctcagtactgccccaaggatacacacacctggctgggttgcaccagtacctgggctcggccacaactgtgttccacaccagagtgggtgctagggatagggagaggccagggagtgggagcaggcacttctgagcttgtgggggaaggaggcttcctgagcccctgagagcatagggatgcctgggtctggagccatagctgggcagctgcagctgcacccaggagttggtgggctcccaccccaccaactcggtagggcgtgggggctcccactgggattcaactgttcctggcccccacgggccaacgagtgcacagccctggccacacctcccccgctacagctggtgtccttgcaatggccactccatacggatcgccactgccatcaacatgactacaaacacgaccattcatacgttcaacagccatttattaactattatgtgccaattctttgtcagtactaagagcacagtagtaaacactcaggcaaagtccatgccctaatggagcttacattctaatatgcaaataaatatacactgatggagtgtctccttgtatttcccagttccaagtccccagagagaaaacctgattggtgtagctggtcactaccatccacttgtggggggagaaccttttctaaaggccacctcattcagtgtgggtattggctgcctgtatatcagggtttccctctagtccagtcagctgtgactgagagtgcatgacacataacatggtctctcatgtggtctcatgtggttagctccctcagcaaaacaggctaggttaggagattctcatctgccctatccaatgtggttcttattcaaatatggtaggaaccaaactttctcagggtagtctgaaggcaaaaagataaggctgcactaaccaataccaagctgagtattaataatctaaaaatccaaaatgctccaattggaaactttttgagtactgatataacactcaaaggaaatgctcattggagcactttggattttggatttttggattagagattctcaaccagtaatgttccaaaatccaaaatccaaaacacttctggtctcaagcatttcagataagggatattcaatgtgtatgataaaaatgatccctccatcatgaacaacttatttacaagaactcagaattggccaggtgtggtggctcacactttgggaagctgaggtgggcagattgcttgaggccaggagtttgagaccagcctggccaacaccgcaaaaccccatctctactaaatatatgaaaattatctgggcatggtggcgcatgcctgtaatcccagcttcttgggaggctgagacacaagaattgcttgaacctgggaggtggaggttgcagcaagttgaaattataccactgcactccagcctgggcaacagagagagactctattagaaggaaagacgggaggggaggggaggggaggtgaagggaagggaggggaaggaagaactcagaattaatgttaatggaactcagaacacacacaaaattgagtaccagatacttcttccagaagaatagattacttccggttttttagcctgtagacatttgcttctgttggacttcacttttctgctgcctctgatgtttcaaaataccaacctgcctgcagcagattcttactccaattgaagctgacttgacaataatctaccacgtgttccctccatcatgttgtattatttatattagctttggcaatatccttgagattttactatttgccttctgttggagcgtattctccaactaaaagaggaaacaactggcaccaggaaaaatggagcaatcattctcacattttttcagtcccaaaccaggtgggccctgtacctcaccctcacaccctccaccaactgctgctaaagaaataacatgggtttttaccatcaccctgggaattaggaaaaaaaagaaaaaaaacccacagattttgatgagacacaaatagtagccacagaggtcacttactaactgattctgaaaaaaaggctttgaagctattcattacacacattcaattcaaatcaataaacactactaccatgttcccaatactcaaccaggaactggggatctcaagatgaaaaaacatgatcggctgggtgtggtggctcacacctataatcccagcactttgggagactgaggtgggagaatcatgtgagcccaggagttcgaaacaagcctggcagcataatgagacgtcgtctctgcaaaaaatcaaaaaaattagctgggtgtggtagtgcgtgcctgtagtcttagctactcgggaggctgaggtagggatgattttgagcccaggaggtggaggctgcagtgagctgtgatcacacccctgcactgcagcctgggagacagagtgagacccatttcacaagaaagaaaggaaaaaaaagaaggaaggaagggagggagcgagggaatgagggaaagagaaagagagaaagaaaagaaagaaagaaagaaagaaagagagagagagagagagaaagaaagagagaaagaaagaaagaagaaaagagagagaaaggaaggaaggaaggaaggaaggaaaaaaaaaatatgatccttgctctgaatgaatggaccacgaatggtggaagacaggcctgtgatgatgacgatgatgtcatagaaatgaaggaactgtttcatggcaaggagagagtcacactgaccttaaggataaataagtaacatttgagatgggacttaaaggattaggattttttcaaagttaggattttttaagtggaaaatgtaaggaagggcattccagaagtagagaatagcatgaataaaatcaagaaggtaagaaagtaaatggcttgtgtggagaataacaagcagccactcatgaggctgaaacatacactacagctctaaggaagggctggacttgcccatggaccaccaacgatccacagcctgggttctataggccgcggctgccatcagacatatgggagacaactggtccaaaaattttgaccactgaacatggcagcagcttccatcataaagagggttataattgccaagcagaatgagaacattataattagatctagttcttccatttattctcttgcattaaatgtattaatttgttgaattagctgctaggcattctggtaaatatcaagaacatagagccaactccactgcagaccctgtccttgaggagcctaataactggagatttcatttatggatttatggatttattaggcctcctaaaaatctgctattcacttaccgatagcaaagaaaattatttttaaattttaaataatattttcttattacaaaagcacttcatgagcatcatagaatatggaaccagccaaaacaaaaaataaaatatctctgtcaccacccagagatcaccactgtaacccttggttcatattctcctcccacatcttcatatgcatacatacatattaatctgtattttgaggacatgtttttcattttgtctacagacacatcccgtcttgtaaccagcttttaaaaaagacaataatttccacgtttccatgtgaataactactcttctaatactcagtacatattcaaatttctccaaatgaaccaaaaatgtcctttacgcttatttctccaagttggcccccaactcaagcccttgcaatgtgtctcttggttatattcttcgggttccttttaatctggcataggccctttcataggactctgactcgacaaagagaactggccagctgtcctgaaggaaggcccacttcctgtatttgcctggttccctgtggtgtcattttacttgctcctcaattccccttacttcctgtaaacatcaaactcaagatgccatagaggcaagttaaccaccttgggctagaatacttcatgggcgatagcacgtactttacattgcatcacataggaatccacataatacctggttgacgcaacatcagtccaactgaccacaaagcaactaggggtttcagagggagtacacgtaaggggcaaaagcagcaacggaatacgacaacggaataagcatgaatacgacctggctacctgaaggaggtaggacggggaaccgagcagcagcaggtggtggaatgccagggaaatccaaccgtgcttcccacgctggcatcgctctgattatgaccaatcctctaatcttattctcacaattagggaggaagaaaaaaaaacaaacccaaaccaaaaaagaagttggtaggtgactctgtgagactactgttttataaagggagcgtttccttttataaaatttagctgagcagatgctaggcagcccacaggaggccactattcccctcagctgtacagtttgggaaaatacctacacacccggagaacagagagcttggtgtgtgttgagttcgctcctgttcatcagcagccctttccccgcctctggccaccagggggacctgcaaccaagtatgtgttctttcaggcgagcgggaacgcgtctgcataaatctagtccaatccagggccccgtagcaaggcgccaaagctgggggaagcgcatttctgttctctcgcgagcacgacgcggtgcctcccagtcctcctccggccctccctctccgccctcccggcccgcgagcgctcgggccccttccagtggctcgcggcaggtggcgctgtctgcggcgtcgcagcggcccgggctgcagcagagacgatctcccggcgggctgtgcggcccggctctccggcggcagcgagtgccacgtcccaagtgctacgcggaggattagagcaggcggtgcgctgggggcgggagcagcgcggagcccggctcggccacaccgatcgcccgccgccatgggctcctcgcaaagcgtcgagatcccgggcgggggcaccgagggctaccacgttctgcgggtaagggctccgacggcggccggggagctgcgggctggaggcggggccggccgcggggaggcggaggcccccatgggctccttcacggggcagccaggcccgatcccgcgaaggagcggcggtcgcgggcgctgccttggtcgaggctggttccggaggccgctcgcatcccacctccgcggagcgccctgggcacggggtccgcggctgtaggaggacgggctggagctggaggcggctgccggcgactcggccagggggcggccctgggaaggggggacaaccttgctctttttccgcacggccttctctctcctccaccccccctcatttttagcttccaaagttaggaagggcgcggaggcaacgtctccaaagtggtgactgtgaaggcagcctttgcgctttcctaggagagggatccggacccgcagtccggaggcggggcctgcggcggcaggtgttaaatcacctcggcgccggccgagtggcctgaaagaccagcagggcaggagacggaaaaccaaatggcctggaagtaggttcgacggacttaaacagacttgattttgaccagacttttcctttcccgtgccactcctgaccctcccaaaccttctcaagatttcctggagtgggaacttccgttctgttccgattgctgagggtgtggtttagattataaggtttagatccacagtggtaaagaggtagtgcagagaaattttttttaaaaatcggagtatataaaggaaaacaaccctagcttaacttccaggacgcagagaaacatagtatctcaaaaggcgtcagctaagcccctacctatgaacggcctgggcctgggtggtacaaagcatgtggtcttttcctcatggaaccgggcgactttagaagtagcattgatg

SEQ ID NO: 8515 - DNA, 6000 bp, Homo sapiens
ggcgcttcagcagggagtgctgcttccgccgcaggccccggttcagccgccgccgctggcgcgcactgtacagctgcatcggctgctccagctgctcgtaggacatgtccagcagctggtccaggtccacgccgcggtaggtgaacttgcggaaggtccgcttcttcttctgctctacttctgccatcttgccggatcctcagaagagcagcatactggacttctgtatgcaccagaagaaatgcaacattattttgtggaagttcaaaagacagatggcatctagggctcccagtgcctcatctcctgatgggtgggatttggattttctttccacaaccctcacaacatgtcttcttactctacattctacatctgtgtgagggacaaaaaattctgcatgagcatgtttctagcatctaggtgttttttttgtttgtttttttttttttttttttttttttgagacagagtctcgctctgtcgcccaggctggagtgcagtggcgtgatctcgtctcactgcaagctccgcctccctggttcacgccattctcctgcctcagcctcccgagtagctgggactacaggtgcctgccaccacgtctggccaattttttgtatttttagtagagacagggtttcaccgtgttagccaggatggtctcgatctcctgacctcaagatctgcccgccttggcctcccaaagtgctgggattacaggcgtgagccactgcgcccggccagcttctaggtttttaggaaggccatcttcttcaatgctctcccccacctgctacatcaggaatcacccaacagcattgctgacaggttattgagtctgattaggtactttggtgacaaactgcttacaatctccagagggaaacttctatcatttaacaactctgttttaaaaaagttcacaggcaggggtggtggctcatgcctataatgccagcactttgggccgccaaggcaggtggatctcctgagctcaggagtttgagaccagcctgagcaacatgatgaaaccccctttctaccaaacatacaaaaattagccaggcatggtgacacacgcctgtggtcccagctacttgggaggctgaggcaggagggtgagtccaggaggtggaggctgcagtgagccaagatcatgccactgcactccaatctgggtgacagagtgggaccctgtctcaaaaagaaaaataattaattaattaattaaaaggttaacagtaagccacaacaatgtttattgaaaaatttccccttctcagtgacagttttatttaatatcaaagttaggttcttaaaagataatttaaaagttgaaattctctcagttttacatataacttcaagatgattcaacaccattggtaccatttggccatgttttcatcctcccgaaatgttttgttaaatggggtctggaatcccagagattctcatctgctgctgctatgaagcaaaattaactcaagagtggagtgaaggtgttaggtcaatggggtgaaaacattaattgaggacaaagactagatacttttagggagagggatagggatacaatgatgtcattatagaattacaagctaaagttcgcaaaggaaaagaatcagtgtaagatgaaacaggcaatgtttgcagcactcaggaaccaaaaaaaggtctgaaaaaataaaaccggaagattcagggatagtttccttttattcctagggatccgctctcactcttctctcttctgctctgtgccctaagttgacctgggatggatacatggactgccctgtggcttctgattaggttctggttagcccctgggacaccctaggcagaagatcagaggggagaagagtaaggctggaatatttatctgcttccatctttctccctatgaggtctctgcaggctggctgcatccctgtactcaaggcctctatcggacttccccctccgcacaattttctctctggattccagtaattctctgcccttcagacctggggcactgcctaaccctgaggtttcctacactgcccacaacttcataaacagtcttgttcattatgaaattactcaattccaatatgctgtttgttttctgccaggaccctgattaacacactcagtctcattagcctcccaacacatgtttattgagtaactaccacatcccaaggaggaataaaatgatcaattagagaatcaatgccttcaatagggcagtctgagagtggagacagccagagaagcagatccttatattacatcctgacaggtgacacaaggaggcactggatggggaggtcagtgggatataaaagtctgggcaggggcagactcagggaaggtttctcagtggagatgggggtcagggaaatttagaggcagtggcgtgggtaggaagtggtcagaagctgccagagcagtttacagccaaggacatcagggccagtcaggttgtggtaagagactggcagggggtgctaggctggaccagatcaaagaaagccttgtgctggggaaaggtatccttctcttccatttgcttactctccccaccaagggaaaaataatgacacaggtgaggtctacagccttttactctgagcccttaatcctgccctactaccatggcttgccactcctatttccttagcctgctttgaaaatcatccccgtatacttcctgcacattctaaggtctttcaagacggcaacaagacaatatagcaaagtagtccttggagatgagctacagaagagggctagaagtgaacgttcccaaatgcattctggaagccctggcagtcagaaccctttttcttataatagcattagataatgctgacattgtttttgtccagtggagaagggtgaggataatgttggaaagagggcagggagcaagcttcacttcatcaaggaggggctttggttcaaattggtttgggtgggcgggcactttgaaaatccatttgtcacactaaacggcaagtccaggtccaggaggttcctgtcttccctctctcaagagcaaactgcaagtagtttcattgcaggataaggccaagcccaccgctgcccatgctgtttttgttttgtttccagacagagtctagctgtcaccaggctgcagtgcagtggtgcgatcatacctctcctgagctcaagtgattctcttgcctccacctcccaaagccctgggattacagctgtgagacacctcatggggacccggtttactgggttttttttgttttttgttttttgtttttttttgagacagagtctcactttgtcacccaagctgaagtgcagtggtgcaacctcagctcactgcagcctcgaccttctgggctcaagtgatcctccttcctcagtcccccaagtagctggggctacaggtgcatgcatttgtattttcagtagagacagggtttcaccttgttgcccaggctgttctcaaactcctggactcaagtgatctgcccgccttagcctcccaaagtgctaagattacaggtgtgaggcactgcgcctggcctttactgttaacttaaaacaaaaaattataaatttgaaaaaagaggagactttatttcttataaaaggttatagcctgcaaggaggccattccataggctgataaacatagcctctggcctaagaccagagacaggcacttggaaggcagaggggttggggtaggagctttatgctgaacagtttggccaaacatacatacgtaacaggttacaggaggagctatgaatattaatggaggtggtccttacacatgcatattgaacaaacatgcatgtaacatgttctctttggggtggagacttaacatttaattgtattacttcaaatacatttaaatgtattacttcaaacctacacttcaaaaggtcttttcaggacgtgaatgcatacaagtgcacaatccctgtacactggccagaaccggtccatggtcggtcttcttatcatgaaaaagttcctgaaatcagcccagtgaaagctgtagttctggctggtgcaacaggggttcagctggtcagcatctgtgaactgattaagttgtaattgttttaatattgcttatctcaagccagtgcttgtttagcctctagaggaaaagaaaacctttgtggcagttagaccatagtttatttcttaagtgtaggagtgtgtgacttaggtcctttttataatttgatgtcttattgctacaaagagtctgttctgtccgccttatgatttctattttaaacattaatgctagtcagctgttgagtctaaattccaaaatggagggggtagacttcccttccggctgtagctagaaactcagctttaaggtttttctggggtctgcttggccaaggaggtccattcagtcagtgaggggcttaggattttatttttagtttacaccaccttacaggttcctccttaacaccctttgatgtcagagacagccaattctccagcactgtggctaaggaggcttcgttagtagttaaaagcacacacataaccctacccaacggatccctctcttctcttaaccaagagggcgcaccactgccctactcaacctccccacaaataaggacgagacacgggaagtgttaaaagcaagtggtgagtataaaatcctcggaattttctctttgagcaactaactaggtctgttactgaagccctctgcgagcttggatgctggacgagggagagggtgaggccaccaggcaatgagcgccctcggcggccgcgtgatcccgggggtggggcccatttctgagttggggccagctccccacccccaagaggccccacattccgggccagcagcccagaaagtccctccccgcaggcggagacagccccaagaagtcgacgccccggtcccgccgcccggccactacccagagggctgccgccgcctctccaagttcttgtggcccccgcggtgcggagtatggggcgctgatggccatggagggctactggcgcttcctggcgctgctggggtcggcactgctcgtcggcttcctgtcggtgatcttcgccctcgtctgggtcctccactaccgagaggggcttggctgggatgggagcgcactagagtttaactggcacccagtgctcatggtcaccggcttcgtcttcatccagggcatcggtactggcacctcctgggggggtgcggggaggaaagcggggagaacggcgggggcagagggtcctccgtgaagccccttccagctgaggaagtgctggaggatcgcggggcccggaggagtgcggtgaggagcgcgcgggaagccaagtcggctgggcgggagggaggctggctggctctggggcgggacagagctgcggttcaggaggatcgccgcgagcgcggggccgggggtgcgcggtggagacgcgctgctgggggcggcggagcggggccggccccacttggttaactctttgcggcgactggctaggacgcactggaggggcctccaagacccagaaacttgagcccgggcgcgatgccggagcgccgcgcagtcgggccgctgcagcccacgcgccccggaaagtcgcccctgtggaccgagcctgcgcgatcgggggcgcggaaacactttcgcctcagccttttgctgaacttgcttccaggctgcagatgaggaggggaaggcagcggggaaaagattgccggagcgagaatttgcccgtatttgtaacatcctcggccctgggtaaaggggctggccaaggggggcgagtgaagcatccgccctgggttcctctcctcctagagtgttaaactcagtcgagtccgggaagctgccaggacttccaagtgtgtttcgccgccctgcccagtcattggacggtcttgagcccgacttgtttatgtggcagaagagtggcgaaagttcccccgcggggcttcctattgggcactggcccagc

SEQ ID NO: 8516 - DNA, 6000 bp, Homo sapiens
caccccagccttatgactcagttttagatttaacttgattcatttaaggttggagtttatttctggctggcaaaatatggcttcctggcttagaaaaattccctcaaaacaaacttgaaaaaagtttgcccacctaaaatggcaacgtgaaacactctacattttaatgagctcattgtaagtgaattagaaacattcaaatgcaatttacttcaaaatagatctaggtgttaaaataaggaacagctggcagtatggagtctcctgatcccaaccaaaggcaggtttgcccctattaaatggtctgtgacttagagcgaataaaatgtcacttttttttttaaacacaaaagcattaagtttcagtgtcgaagagaaaactctgaacactaatataaaaagacaaataaaaaaacagtatgggaaaactctgtttctttctctggaacaaaaaatctgccattgaatagtagaatccctagtcagaacagtttattaagtttagttcacgaaactatattgtggtcaatgcatagctcataaaagccgtatcttgaaagactgtacacaggtgggagctctggttttgatgcaacattctaagtgctttagataacatcaactctactaattcttaagagaaagcaactactgaggggtagatgacatgttgttatttccggtttacagctgggaaaacggagacatggagagattaaatggccttgtggctagcgtggagcagaggcaggatccgtaataaggaacttgggttccagagaccatgtgctacccactctcatggatggcctcacattaaagggctccaggaaatatgtaaaactgttgggataatgtaaccacagaaagagaataaagagatgttttcattaactagtttcttgagacggagtcttgctctgttgcccaggctggagtgcagtggtgcaatctcggctcaatgcaacctctgcctcccgggttcaagcgattctcctgcctcagcatcctgagtagctgaaattacggcacctccaccacgcccggctcatttttgtatttttagtagagatggggtttcgccaagttggccaggctggtctcgaactcctgacttcaggtgatctgcctgcctcagcctccagaagtgctgggattacaggcatgagccaccacgtccggcctaataactagtttttatgttgcatgaaaaaagcaaatatattctctgctgttagtgatgatgaagtcaatataacagtgaacatgataacaaaatgattaaagtaggtctcagggaatggaaaatatattaggtatgacatggattcttcagacttctccataaatgaccaatattctaaaattatcttgaaagctcttctacagagggtgggatatagtacaaataaataattttattttgaaaagtgtactggtaaaacataagaattcaaaagctctcacctgagcaaatgcctctatgcatagctttcactgccttttaattaaaaatgttcagtttatagaagtttcttctgtgatgtgttatttcgttttctaatcggccctttttttttttttttagacacggttctgccagttaactggatttgtagggcccttcttgcactgtgcatgtcttgttttcataggcatgtgtgctagcacacacacacacatgccccatgccctatatactcagcacacctttatcaccaagctatctctctccctttggttccagacaagtatcttcctgtcccagattttgttttccccattaaaactgtgtactccctccccaggtctttaatttttagggctctgaattcttttattcctttggccccagagattgatgtgtcctcagtggatccagaatgacctctaaacctcctttttgtaagacacttttgtaaaacacccaactctgttttacaatggaaataacaactgagtcacaaaacttgattcttttttttttttgagtcagagtcttgctctgtcacctagtctggagtgcagtggtgcaatcttggcttactgcaacctctgtctccccatttcaagtgagtcttgagccttggcctcccgagtagctgggattagaggtgcccatcattagacccagctaatttttgtatttttagtagagacggggtggtggggttgggtgggggggagtctcaccattttggccaggctggtctcgaacccttgacctcaggtgatcctcccacctcgcctcccaaagtgccaggattataggcgtgagccactgtgcctggccaaaacttgatggttatagtcagaaggagctgacaatcttcaaataaattatgtcaagagtgagggtttgactcaacttcaagtatcttcggcatctatgttgagagtgagagtttgactcaacttcaagtaggtaggagacaggtggcaggtaggagcactgagctaataagttttccatttgcgatgggcacttgacatattccagaacaagactcccagccttgtttttctttatctgaacctcttcccacacaagcataatttgcttcagtagtgctatacatgtagttgtgatatttaaatttaatattatttagaatttcaatttgagcacaatctgtgtttgggataaagtaaataactctggccattcatacatcatccactaaacacatcttgggaagacaggaatcaatggtccacagaattactcttagaagcaaggggtgatattcagaatagttaacagctggtgtgacatggggatatccaagcagagggagcccttgctgcatcagggcttaagggcttaaactttcatttgccaggttgtgaggaagttgcttagtcctaggaaaatgggcagggcagggatggttgcctgtgaggaactaagggcagcagcttttatcaaccaattcagaatatttcagtaaccattacagccaaatcaccagctcctggctgagtacactctgcagtgaggttcattatactatgcctataatagtctggaccccatctctctggaatagtacatattttacacgaagggaaaaggctaacttgcaacttatttgcatgaaaaatcacgttgcaagtacttcttagtttactagattgtctccaatagtttctcaaccttatcaagatatatttgttaaaactgtgtgctctccaaaatcatctactgaatttaaaccactgcaccccactttggactataattgactggagttactgattggaaaggaagtggtacacacccctaatatactgacggacttactctgacagctgctaccacctgtggggacccttgatgatgttcacgcagcttttctgagtggcacatgctgttctcttgaatactccttgaggtgaagaagaggccacccctacccctatgcacacacagctcctgctctttcctggggctgcaccctgcttgtatttccaatgcagggatgtcagattccaaagagggctccccaaggcattccagaaggcttcaggccagcacgtcccaaccttttcatgccatgggacccctttggcaggctgctgaaaaccatggggttcttctcagaataagggttttaaatacataaaagaaaccacaagaggttacaaaaaaagccaataatattgaaatgtagctaacaaaatgtttttaaaaatttgtgctagagcaatatatatgcttcattattgacatataatatctggctgattgtctaataactactgttatttgagatacttgcaacaactgtgatgtgatgtaaaaacctatggtttctagtgattactaagtcataaatacttatcctactgctactgtagtttgttgtctacgttcataatggcaaaacgtgctaaatgtcagaggttggtgaaaattaagacgtaaattttttctcatccaagttcacagtactcttgaattaattacctctcctcgggttaagaacccctgcaggataaggttgcccctagggccaacacctcactggagccccgcctcatgtcctggaggcaggagccttcatgccacctacacagaactcggagctgtctcttggcccagcagttctccccacaactagttctgaaagtccggggctaggaaagaacggcatcgtcgcctgagctcctggcgccactttaaacaacccatccttgacttgcgtgacttcttccacaagctctcctggtcacctgggcaaaatcctaggtgatctggggacaaggcggaacttcggttttctgatctgcaaaaagaaacacctacctcataggactgttaggatgaattgaggtaatggctgggttgtgtacattatacagcactatcaaggtgtgcgctgtgatcatttttgagggttgttaggtgtttgaggacccagaacagtctacacagctgtagtccccaagtgttgggcacgccttaagcgctccataaacacctgtagaaatgaatgaatgacgtatgcatctgcacgtgggcccacatctgcaagaacaggctgctcaggccatgaggcccggtgcatcacctgcacttctctttataacgggtagtaaagtctccctcgctctgtgctactcggcaaccacaattctgtccacagagggcggcgcagtggggctgcttcgccgcgagctcgcctccggggctcccacgtcgtggcttccgggcaggtaccgggcagctggagacgccagagccggcgggtaaggtgcgggcggtgcgccgggccgcgggcgcgcaaggaggggcgagagggtggggaggggcggggccggcgtcctcgtcacttgataaaacgcctgcgagtctccagagaacaacgggctcattcagcggtcgcgagctgcccgcgagggggagcggccggacggagagcgcgacccgtcccgggggtggggccgggcgcagcggcgagaggaggcgaaggtggctgcggtagcagcagcgcggcagcctcggacccagcccggagcgcagggcggccgctgcaggtccccgctcccctccccgtgcgtccgcccatggccgccgccgggcagctgtgcttgctctacctgtcggcggggctcctgtcccggctcggcgcagccttcaacttggacactcgggaggacaacgtgatccggaaatatggagaccccgggagcctcttcggcttctcgctggccatgcactggcaactgcagcccgaggacaagcggctgtgagttcccagacccttcccacccccactggggcgccggcctgcgcgcgagttgaggcgagggcgcgccctgttcccgccggccccggggagtagttggcccgtgggtcgcgcccgggccggccgaggcgcacccagcgcccagcgcgctcggctccccgccctgacccgccccgcgcggcgcctccctccattcagctcgggaaggaggagaacccgagggctaggctgggccccgggagagtttacttttttttctgttttaaacaaagtgctttccgccggttcttccctccgggcgtgtttgctgggaccccggcaggtggcacgctttgctgagcttcacgtgtgtgtttggggctggggtggcgttcagggtcaccgcagcgctgctgtgggtttgcagggagcgtagttccaggatggtctaggcctttcccaaactcacggtgcaccccgtctcccccgcagactggcgcgccccgcacaagttggaaagccactttccatgtgtcctgcatgactttctcagcaaggcgggggcgctccttaggagatacttttacatgcctttgaaaaaaaaaaaaaaaaagatgggggtgggggcgggaattaaccaaacacctgttcgctggactagatcagctgagaaaacaagtctgagtgatgtgcccagcccccaaagtactcggccgcacccgagacccgctcggctcctgcgttgggcgggcacagccaaggggttaaa

SEQ ID NO: 8517 - DNA, 6000 bp, Homo sapiens
gtgctgctggctgctatttttcctgccatctgagagaaggcatgtcttcagttaaaaagaataaagctgaacagagatgagagatagagagctgaaggactaaggtattggttcctagaaccctccattctgttctgtgaattatttctgtatcttttcttccactatggagcaataaaattaaactttcttaagctgagttctattgtgtatttttttttataacttgcaaccagaaaagtcctaatacagttcctgtaactgtagataagacattaccaccagcagcaaagagcaggcaatagatagagtaaaaagattcagctccctacaatatggtaaagctatgaaaatgaggcaacatataggctcaaggtggaagaatattttggaaatttagcatcctaatatcttttgaaaagcagttaatatttgaataatctaggtccactacaatcaatattgcaggtatttcccaaagcatggtcaaatatgccatagtttatgtgacagtgtgctagcctaaaatagggggtaagaacagaaagcaagaaaaaggtaagaatgtaacagtcctgagttggttataatttcttaggaattataaggggaggaaaggagttgagggatataaggatgaatgactgtcacatttatctacccttttaaaaatatctttgtaaaccttatatattagattgcttatagttgtctacagtttgtttctaaagcagtaaagactattaacagaggaacttaaggcactgaagcataacattgttacagatatggtttggattcgtatccctgctcaaatctcatgtacaattggagaagaggcctggtgggaggtgatgggatcatgggggcagatttcccccttgctgttctcgtgatagtgagttttcacgagatctgatcctttaaaggtgtgtggcacttctcccttctctttctcttcctcctgctccaccatggcaagacatgcttgcttcccctttgccttccaccatgattgtaagtttcctgaggcctcccagccacgcttcctgttcagcctgcagactgtgaatcaattaaacctcttttctttatagattacccagtctcaggtagttctttatagcagtgtgagaatgaactaatacagttattttagtgtttttaactgtattaacactctatttgggttgattgatttaactatagttaattctgttgatgaggtatgagggagtaatttgataaaaaggtctgaatttatatattgttcttaagtaaatagtaattttaaaggaatcatagacaaaaatgtttccttgctgacacctttttaaaaataaaacgtttaccttaaaaatattaacattctgtcagagaaaattaaaaggtagataaaatatcttagtattttaatcttaataaagtatatattcatcataataactgcttattttcttacatttaatacagtaacataaaagtctagattagggacatgaaaatattctataatagttttgcaagaaagtgattttattagggcaaacaataagactgttaatgtcatgcattgatattttatttaaaaaattgtgtaattatttttttagtaacatatggattccccagcacttttgttttataacctcattcttaaaaattctggtggcttgttttcttgtatttccctcaattgtggtgatcttaaacagatcttcagttttaaatctgccgttcgttctaatacagatgcgtaaatatattttctccagttggctatttattacaaagacagtttatttgtgggcaccataaagacatctgcattttactgaacttaatttttagtaataaagacctcccacattacagattctttccagcctaaatgtgcctgtgtgggaagcaaaagaaccatcagtcagggggaaaaagtgaatccatatggtgctgatgattctgcttccctggctaaaatgaagaaagagttgagtatcgacaatgcccccggcacatctctgtttttttctaaaaagcatgctgctatggcttgaatatttgtgtccctcaacaactcatatgttgaaactcaattgccactatggtagtattaagaagaggtggggaatttaggaggtaattaggtcaagagggctctgcccttatgtatgggattagtgtccttataaaagaggcccaagggagtttatttgccccttttgcccttctgccatgtgaggacatgtacaaggtgctatctgtgagaactgggacccccaagacactgaatctgctggtgccttgatcatggactttccaacctccgaaagtcagggcagtatatttctgtttataaattatccagactaagatattttgttatagcagccctaatggactaaggcacttgccataataaagatgattggtgtcagtcccaaaccagtaccttccagccagctcagttcatgcatgtatcatgcatcaagccatgggtacttaacttaaattttaagggcacattctactttgcctctaatcttgctctgtttctcttgcatctgtgtccagtctctggctctttccagtctcttccactttggggctcacttctaccctttggatatgtttgattttggtttccccagttgaatcttcattactctctagggactttggctcaagttctcacacaggccctatgatatggagaaatcttaaacttcaaatctgtcaaaaagtagtcaaaatattgtgtcttcagctttataaaaatgacaaaccaaaattaataatagaacttaaagtgatgatatgtcttcttcattattacagttatacataattctccactgtgaggagaacagacagggcctgaaagcttttcttttgattgataacaaagtatctggaacagctcatttctcttggtcaataatacctatgggatgaggaggaaattggatctcatgtattctttactatcagtgttacctctctctgcacaaacaagaaaaacctattaatattatcttccctgtatttctactattcacagctgcttgtcaactctgaatttcagctatagagaagacactacttcctaagacgctgctgtgtttatgtcaatgtaaattattgggtaaatttaaatgctgtttaagaagcttccttttgctgagggagatgaaaatatgacttaaccttaaaaaaattatggggctgggcacagtggctcacgcctgtaattccagcactttgtgaagccaaggcgggcggatcatgaggtcaggagttcgagaccagcctggccaacatggtgaaacccggtctctactaaaaatacaaaaattagccgggcatggtggcacgcacctgtaatctcagctatttgggaggccaaggcaggagaatcgcttgaacctggaaggtggaggttgcagtgggccgagatcacgccactgcactccagcctaggtgacagagcaagactccatctcaaaaaaaaaaaaaaaaaaaaagaaaagaaaagaaaagaaatcatgttaagatgaggtcctgctggattagggtgggggtccctaacacaatgactggtgttatttctcaagaagagagaaatttgaacacattgacacacagggggaatgccgtgtgatgtggtggcagagattggagtgatgtatctacaagccaaagtacatggaagattgccggcaacccccttctctggagccttgcaagacagcatggccctgctgacaccttgatttcagacttctagcctccagaattgtgagaatgaatttctgttgtttagccaaccagtttgtggtaatctggcagctctaggaaaccaaccacgctagttaaggaggcagaatgaacagtaatagagatctacggatataaagaatggaaatatagctttctaaatgtcatggacagtaattcttagaatacaggtttcctctgcaaaaacctagtaagctgtctgactttttgatttactgtgtgatttaaaatgagttacctcacctctctgaacttgtttctcatcagtgaagggggctttgggttaccagctctgaagcctgtcccacttgtaataccaccaatctgtaatgcatatgatttttctttaattgtgtaatttaagaagctattaggttaagacaaagttactcagggaatttagtttctcctcttcctgccccgttcacccccgaaaggtgagaagtgtgtgaaactaaagtatcttattctccaagctgagcatcatttcgggtgtatggagttgaaggacaaattaccttctggcttaggcgctgctcaagcctcctttctgccaagcatgtttgaataaacaacaacaacaaaaaacactaatgtctatccacggactaatcaacccagcaatataatggaatagagggaattcatgcagccttgaatctggtccttggaggactgcctgggcaggcagtttaaactccttaagcctatattcttatccgtaaaatggcgataatattattactttaatgggttgttgagaagacgaagtcaaatagaatatatgtgtatatatatgtatatatgtgtatatatgtacatgtgtacatatatacgtgtatatattatatatgtgtgtatgtgtgtgtgtatatatgtatatatgtgtgtgtagatataggtatataagtgcctggtatccagtgggcgtttacaaatgttactcggttacaaaattctggcttacagaaaggacgctaaaaatctcccagattcccctgccagtcccctgggtgggagacgagtcgggtacttcgcttccacctgcgggcccccagcgcagagcctggaattggctggacggagctagccgcgccggcgccccgtaggacggcgcgggggcggggccggcggaagcgctcgagtgccgttgtcggctgcgccggaagtccctagccaggcctggcggtaaccttgggggcctcactgcagccgccgctgctgttggagtgggctttgcgagtctgaacgttggcggggctaggctcgttaactgccgagagcctccgggtttgcggtggaggacgctgaggcccgtggggggcaggcacccgggcgccgggcctcccagccgacatgtctctagtggcggaagccttcgtctcccagattgcaggtagcgcggctggccgcagacccagaaggtggcggcgcggtctcggggagccgcgtggggtacagggctggagctttcctccagccttgcggcattatacgctgaacccggcccggatggtggaggcgggcacggactaccaaccttatctcacatatgggaaaactgagaaggagacacttggccaaggtcaccccgcaggagcaggagtcccgtctccttcccttgggcggtactttgtcccacctccccattcagttgggaggtgctggagtatgagggggaggccttggattgggattgaggtggggggcgttaccacaggggcaagcatctgaacgcttcagtctaagagtggtggcagtttctgggtcttggtactcaaaaagtttaaggtgactgtcactaatcagttgttacctattgttgagggaacaccagacttcttgcttcgtctcccagcgacacagtagtgccatttgctaagactctaggagttatttatttatttatttgttgagacggagtttctcttttgtcaccgaggctggagtgcagtggcacaacctgggctcactgcaacctccgcttcccgggttcaagcgattctcctgccttagcctcccgagtagttgggattacaggcgcccgccaccacgcccgcgcggattcatggaaaatttttaaatctgcatgtactttaaagaaatacttttgagtcggtggactgaacatgactgatgtatataggtttgtaatttctcttattgaggtttttatttattgtaatgaaagaaattaaatat

SEQ ID NO: 8518 - DNA, 6000 bp, Homo sapiens
tctcatagacttaaaggccatttgtagttttttgttagtgggtgcttatttatgaatttggcccatttctagggatatgtcattttcattattggttagcaagtcttcatacatgttacaaacatttttcccgcttatttgctttacctaggttttcagatctttttgctgtaggatttttaaaatgacaagatattgaaagaataagatcatttcttgcacatttgaaggcttgtcctgtattggggtaataatgactgacagcccattatatctcagctgttccttttacaatgtgcccgtcctgtccttttactctaaacctacatgttccagtttctgagttttatgaatttaactttggtactgcttaccaaagatctgtgttataaatatttatgtaataataacatatgctgaaaacaaataaaaatgcttaaggtagagcttatagaatatatataatcatcatgagtgttgccacaatgtagaagaaagaactctggccagagatctatattcaaacaatgtcatattatccttataagcaaaaagaagggactggactgaactagatagagcttaaggtcattgggctttactgttctctttatttcatctatcattttttatttcacttttttgtttttaattgtggtaaaatacacataacataaaatttaccatcataacaattttcaagtgtgttgttcagtaaagtacgcttacactaccatgcaaccaatctccagaactcttcatctggcaaaaatgaaactctatacccattggtcaacaattccccttttccctctcacttcagcctctggcaatcacccttctactttgtctctattaatttgactactccaggtacctcacataaatggaattatacagtatttgtctttttgtgactggtttatttcatttagcataatgtcctcaaggctgatacatgttggtgcatgtctcagaattttcttcctttttaaggctgaataatattccatttcattttttttttttttttttttgtagagcagggtcttgctgttgctcaggctggtcctggcctcaagtgattctaccaccttggcctcccaaagtgttgggattacaggcatgagccactgtgcctggcttccatatatgcatgtattcattttgtttatccatttctctatgtatggacatgtggcttgcttccatctcttgtctattgtacatggctgctatgagcatggctgtacaaatatttctttgagactgtgctttcaattctttcagacctatatacccagaaatctattaatcattttttaaatataactaaaacaagaaattaaaattaaacatcttaccatagccttcctttccgtatgcaaatgaagggggtataactacttttcgcttttctccagggcacatatctgtcatagcaatgtctaggccttttatgacttgcccaacaccaagaacaaaccatttggggtggccttcattttgtgtccggctataacaaaaagcaatacttaagtaaactgatttcaagaaatcaaacttgaaaatacagctgggcatttaaaattggagtcctctctaaccatcattcccatataatcactctttctaaaacccttaatggggtgtttgactcaaacttccctataatcaccagaaagaagtatgatttgcccaaagttaatcattaacagccatctcattttttaaaattgttatctttacaaaaactattcaacagttaactttttaatgggtctccagcccctaactaggtgcatggcttgtacaaagaactcatttaactccctgggtttgttgtaaaaaaatgatagggcagttttagcctcaaaaagtcattttaatagtaatttaaaatggtatattttcttattaaattctaatgatataatttattaaattcttattaaattataaaattgtataaattcttattaaatttctctattttattctaaatggatggaactgtttttcccagtcctatctttacagggtaaagaaaagattctccctctgagtaataagccatcaattaaatcagagtaggcaccaggtggaatgagggagcagggcccaccagaagtcaccagggaagtaactgtttttcttgatagaaagtggccacaacctataaaaatcgtgcttctgaaggccagaattaaatctctttattccatgtattcctccgtaaagactcaatacttctggcaagggaaaaatgtgaacatccttataggcagaaccttgatttaattctggaggtcccaagggtaatggtggtggttgatgtgtgtgtggatgtatcgtatttttgataatttattgccacaacattttcaatactttaaataaaaatattcagtttattagagaaacactgccatataatgtgattttttttaatgaataaagggctcaacttttaccgttaaaaaataaaaccccaaccaaccaaccaatgaggcttccgcttggtggaggcaggcaagattttgtgcaactggacgcacgggcagctcgcagcatttcctacctgcagtagaatttcgagccgtctttagccaggtagccgtcataatgggcatttagtaggtctcccttcttgcttgtcttagagcagttttctggacgatgcaaaacttctattttcacttcttcggtgctctcctctttcttttgtctctgagcagtaaaaaggccccacagataaaagaaaacaatgaatctgaataagaaatgcatggtttttggcatcggctccagcagaacactgctctccctcccgcgtgtcactcgcgccccgtggatgtcccgcggccgagttccgacgcgtggcaggcgttgtcctgcgtcacaaagggccggggcggggccatagatgcggccccgccctctcatggccccaacccctccgcctcccgcagcgggctcagcgcggttaacgctgtttctaggccctcgggctggctgtcctcagtctttaagatcgcaacgcacactcgctccgcttcttctcgctaaacccgcgtattttacagcaggtttcctcagggttcggtgacaacattcgcattttctaaaatgaaactggcataagacgaaataaacagcctgggatgtcgtagagtcagggaatatggttgtcatttctggaagcaaaaggcttctaagacccctagggaacgagcagatagatactggggggagggagaggcatgctggaaaaggagcgtaaaaaataggctggcggtggctttctgggtgcttcggaggtgtccttgaagcgcattctcaggtcggaatcttgcattcagaggttccaggctgagtcgcacaacctgaaggccagcccgatgcaacgaaactgcggtaccgcaactcctctgcctggctgcaggcgtttccgagagccgacctccacaattcagcatcctccgctggcttgcatttcttttccccgccactcggggccgcccttgattcgagggcctctggtagtgcggggaatgttcttttgacttttttgtaccatcccatgggatacgtaattgtccacatcagtcaagaaaacttgagtattgggcatgttgtcccaatctcacagctaatacgcagcagggatttggtcaaatctgtgtgacaacaccacttcaccaccaattttagtatgaaaacctttaaaatacacagaaagttgaattctacagtaaactctcctacacccaccatctggatcctgtcattgaactatattatatttattacatatccatccatcactctatccatccatcaattcgccttgtttccaagtgaatacccaaagactacccaaaccagaaaaccagcaaaggccttctgcattcgcctggattaagttctgggagtagaggtgctattctacctcggtgatgcgaagaaaagccgcagcactgagcctgattgatgtgctttgcttaaagtttgcaaaattccataaacctgaaaattactgtcgattatgcaagatgacaattgcgtccaagcaggagtttcaaaaatcataaaagctagggggaagtccccatttctagactaaaattccgaagtcgagttccatgttttatattctaaataaaattgtggctatccaaggttatcggcgtgatgacagttccttgggggccctcgccattccttgtcagaggaccccgtctgctgcacattgccttcctaggagataatttcagaccccttgaatatgaggaaaatacgaagcaaacagaaataggaaggcttttatgtatttttgaagaaaaaacaggattttatgtaaaataaaaacaggatttcatgaagaaacaggatattatgtatttctgaagaaaacccaggaaaacccgagagaactaagtgcccgcgggatgagtgtgcgggcagctcctccttaggtaggcaccggggctgcgcgcgcagcggagctcgaaggtcttgtcccccgggggcggtcagcctgggccttggcggccaaggggaaacttgggagcctcgggactgttggccaccggcccgtgggaggagtaaaggcggccctggctggcaggccgagggtgtgacgcgccggcccgccctcctcgcgcagcctccggctaggcggcgaggccgcaggccgcgcccgctccttcagccccgccgccggggaggggtttcccgggacgatccggcccctttcatccaggaagtgaaatcgacgtcggggtcaatgaaaacaaacggggagcccagggggaaggaaggcaggcgaggaagaggcagcgccggggcgccggagggagcagccgggctgcggaagcgcgagcaggaggccggtcgcgggcgcatttttgccgttgtcgcggccgccgccgccgaggcttacccgggaatgtctgggcccgcgcctcgcggcccccaagctccacgctgcgcccgctgtcccggcctctaaaggccgccacgtccctgcggcgcgcgcaggcagaaagcggcttcgtgccggcggagggggcccgggcgggccgggaggggctgccccaggccctgcgcctaccccatcaccgcggccggcgccgggccgggaggatgcgcggtgtggggctctgaagcatggagggggtgttgtacaagtggaccaactatctcacaggtatgggggctcgtgtgatgagggaagaggggagaggcggggggctgctgagaaggcgggtcggggctcctcttcctccgtctggcctccgcggaccctcagagcgaattcgctctactcgattccagggcttgttgagtccttctggcctcttcaggggagggtttgaggctgcgcaccttctagagggtgggaagtgcacctgccacttctttgctagtgtaataatactaatccttgcctcctgtagcctcaggaacaattctcagtcaccctacatgtgttgttgcgatctccgtccttattcacacttagtattcatactttaagagcattttgttaataactgagttgtcggagtattggactggaatggaccctttaattgtttcaactacaagatttaattttaattcttttttgtatttcttttaatttccttaacattttatttaaaacgttgtcttgttgaggttgttcaagcttagcgagcatgattttggaagctgtccccagataatattctcttagggattgtcattgaagtatccttacgttggggaattctgttaactgagaaatagtggaagaaagtgtcaatacacagaaggggaacaggcaagtcactttcacctgtgaagtgggttggaaggaaaaactttgaagaaatgagagaccagcaggaaagggccccttaccatgacattggcagcctgtaggcttatttaaaagctccttaaatttgagttgtagtccaatctctgccatcaaccaacaatgaaggcaag

SEQ ID NO: 8519 - DNA, 6000 bp, Homo sapiens
tatctgtcgagatcttttgccaattttgaaattacattctttgttaggttttagttttgttgctattgagttgtttgagctccttatatattctggttattaatccctcatcagatagtgtgccaatgttttctctcattatgtgggttctctctacatttagttgatgttttctttgctgtgcagaagctttttagcttgatgtaatctcatttgtctatttttgttcaggttgcctgtgctttttaggtcttacacaaaaaaatctttgcccagaccaatatcttagagcatttccccaatgttttcttttagtaatttcataatttcaggtctataattcattttgatttggttttggtgtattggttatttcaatagatgctgagatagcatttgataaaattcaacattcctttatgataaaaattctcaccaaaatggatatagaaggaacatacttcaaaataatgaaggccatatatgacaaacctacagtcaacatcatactgaacacagaaaaaatgaaggcctttcctccaaggactgaaacagacaaggataccccctcttaccactgttattctacatagtgcagaaagtcctggccagagctatcaggcaagaggaagaaaggaagggtatccaaactggaaaggaagaagtggtgagaaagttttaattttatttttttgcatgtagttattaagttttcctagcaccatttattaaagagactgtttttttccattgtatgttctttacagctttgtcacagattagttggttgtaagtgcatggatttatatgtggattctctattctgctccattggtctatgtgtctgtttctatgccaatactgtgctgttttggttactatagctttgtagtaaattttgaagttaggtagtgtgatgcctccagctttgttctttttgctcaggattgctttggctattcagggtcttttgtggtttcttataaattttaggaatttttctgtttcgtgaagaatgtcatttgtattttgataggaattgcattgaatctgtaaattgctttaggtagtattgtaattttaacaatattagttcttccagtctatcacggagtatatttctgggtttttgtgtcctcttcgatttcttttatcagagttttatttatagtttttccttgcatagatattttacttttttagttaaattgattcctaggtattgtacatttttgtagctattgtaaaaggaactgctttcttgatttttattcagattgttcactgttgtcatataaatgctattgatttttgtatgttgattttgcatcctgcaactttactgaatcagatctaacagcttttaggtggactctttagatttttctaggtataagatcatgtagtctgcaaacaaacctaatttgacttcttcctttccaatttggatacccttcctttcttcctcttgcctgatagctctggccaggactttctgtactacgtagaataacagtggtgagagggggtatccttgtctgtttcagcccttggaggaaaggccttcattttttctgtgttcagtatgatgttgactgtaggtttgtcatatatggccttcattattttgaagtatgttccttctatatccattttggtgagaatttttatcataaaggaatgttgaattttatcaaatgctatctcagcatctattgaaataagtataccgtttctgtttttgattctgttaatgacttatatttagatggtatttaaagacataggaaatgggttagatctcctaaagagggaagatggaaagagaatgaaagagtttccagaatatagccctgggggtttcccgcacttatggcggagggaagggagccatcagaggaaactcagagtggccagatagaaaggcaggaaaaagcttaataaggtggtatcatgagaagagagtcttcctagaaggagaaatgcttactcttgataaaaactgaaaaatagggtgagtccacattagaattctcgctactggggaggactttctacacaaggttagagatcacttgtattttgtctactataattttagtgcataatgcatttttttggcatatagtgggcacttatatacatattaatctgatgacatttaataattgagtgcccaaatatttatgtcgagttgagagctagggataggcatgagtctttcttaaacatccttctcttctccttcctccaccccctcacttgccttcagaagcattgatcagagagatagcagtatcttcagttttttttaaagcaacatgaaacacactttattcctgctaacattaggaaaagcgagctgttttccaagccctggaggaaggaaattcagctaactaacgtgaggtaatgtagggtggctatttcttgaaaggtagtgaatcataactataaccatactatggaaaaaagtcctgccttaccaaccactccactgactgcttgtcaccaaaactacgctatgaaacgaattgtgttgagtggctttcattgtaaaagattttggtgaagggagggaaagaaactggtaggggttcagatcagaagatctggctttgccagtttctggagggtgtcagaatggcttcaacatacctacttccttggcctcaactggaggttttgtagctgtaaacaagaaggattgcatagttcagaataacgacactgtaagctcattgtggaactgggttaaaatcagcatgtagatctactaagaaagaaacacactcagcactactacagaaagaaacagccatgggccctgattgttagctttctggaagccatttcatttttacaatagatttatcacacactgtattgactttttccagtatagagtaagagaaagttaatattcctcatgttttgtctgttgacagactgaaaataattgcattgagtttggctagaatatcctgtcattccataaacatctcaaactccacatggctaaaacttaacccatccatgcccccatctgcatgcacacatacatgcatataacttcatttctcagtgtttttttctccatgaatggtagcaccattctctttcaagaaagagaaatacttccccttgggattatcctatctctacttattgctgcaggggcttccaaaattaggttttctgtgttcagtcttgcattcacacttctgaaacccagagctgaccgagacaaattcttcaacttcctgtcagtcccaacatagatttaaaattcctaacctggctcatgaggttcaccatgtattcctgcttccctaagtcagcctcatatcacaccaacctgtgtgtggagtggctaaatactctagccaggcaagctctctcagttcttctacctggctcctctggagccctccttattgctcatcccattcttagcctgattcaagattcctggtccttcaaatctctctttaagtgtccttacctggatctttctctagttagtacaaatttttctatctaccattggagcgaacattttttgaaactttgtatcagtcctgccttactcttggtggaatcctgtggtcctagtcaagtgcctgctccatgaatgtgctgaataaatgaataagcattttaattgtgtatctgtcattagtgtcagatgtgttatttattccagcatggttttagcacacagacacactctttgatgcagacttttcttttctttttacatatagcaacaataaaaaactagactttcatctcctgaaaatatcagtctaataatcacctatggctgtctctctggttgctgaaggaaaaaaaaaaaaaaggcagggcacacctggattgcattagaatgagactcactacccagttcaggtgtgttgcgttgtgggtctccggcacatttcagaggctcattaggaccctgaccccacactggggtttacacccctaaaagcaggtgtgtcccgtggcaactgagtgggtgcgtgaaaaggggggatcatcaattaccagctggagcaatccgaatcggttaaagtgaatcaagtcacagtgcttccttaacccaacctctctgttggggtcagccacagcctaaaccgcctgccgttcagcctgagaggctgctgctagcctgctcacgcatgcagcccgggctgcagaggaagtgtggggaggaaggaagtgggtatagaagggtgctgagatgtgggtcttgaagagaatagccataacgtctttgtcactaaaatgttccccaggggccttcggcgagtctttttgtttggttttttgtttttaatctgtggctcttgataatttatctagtggttgcctacacctgaaaaacaagacacagtgtttaactatcaacgaaagaactggacggctccccgccgcagtcccactccccgagtttgtggctggcatttgggccacgccgggctgggcggtcacagcgaggggcgcgcagtttggggtcacacagctccgcttctaggccccaaccaccgttaaaaggggaagcccgtgccccatcaggtccgctcttgctgagcccagagccatcccgcgctctgcgggctgggaggcccgggccaggacgcgagtcctgcgcagccgaggttccccagcgccccctgcagccgcgcgtaggcagagacggagcccggccctgcgcctccgcaccacgcccgggaccccacccagcggcccgtacccggagaagcagcgcgagcacccgaagctcccggctggcggcagaaaccgggagtggggccgggcgagtgcgcggcatcccaggccggcccgaacgctccgcccgcggtgggccgacttcccctcctcttccctctctccttcctttagcccgctggcgccggacacgctgcgcctcatctcttggggcgttcttccccgttggccaaccgtcgcatcccgtgcaactttggggtagtggccgtttagtgttgaatgttccccaccgagagcgcatggcttgggaagcgaggcgcgaacccggcccccgaagggccgccgtccgggagacggtgatgctgttgctgtgcctgggggtcccgaccggccgcccctacaacgtggacactgagagcgcgctgctttaccagggcccccacaacacgctgttcggctactcggtcgtgctgcacagccacggggcgaaccgatggtgagtagagttggactgatgcgccctcagcagctcagagcggcgtgagaatggcgccctagggattccctgcccgattcaaactttcctccctcccaaggaggcaggagggaaacgctgcgagagccagctcgctggaaatctgccagggaaactaacttatcttggggcggcagcgccccgggtgcgttatggtgcaaggtcttggagcttcgagtcgggggtggtgggcggaggaggaggtggggaagctgccctgctgcggactgcacatctgtggcgacagggagctcagtgggcagcacagctcacgtctgagcgcacgtgcacgtgtctcgctttaggctcctagtgggtgcgcccactgccaactggctcgccaacgcttcagtgatcaatcccggggcgatttacagatgcaggatcggaaagaatcccggccagacgtgcgaacagctccagctgggtgagttgggtatgggaccaggagttagtgacctcccgaccccccatgtggaccccaccatagggcaagtcctggaaagattcacgttgcctgttacttctggtttaaagagcataaagttttcagtttcaactccatctcatcttgcctccttaatataaaagggattccctttctgttaatatcgttctcccttttccttatggcaatgattgcagtactctgacaactatgctagagaaatttcttatgataccttctcttcatctctccccgtctctccgtgtgtaaagcacattttaga

SEQ ID NO: 8520 - DNA, 6000 bp, Homo sapiens
ggtttcactgagaaaagagtaaatttagcattatgtggcaaactgaataaattgtgatctgagaatgagtgataaaacgacaagcttttaacatgcacaaaatcagaaagtatataaactggtaatttacccagactgtataaataatttgcaaggcaaaattctagtggtattaacacctgcttctccttcttatctgtacttgggaaaataagagaaatcaaaataacggactattctacatattaatgcttccttatgaggaaaagaaactaatctaaaaatccttgaatttttgctaatatggaagaactctaagatcaaaggtttataggctttaaacatgtaattctattgctttaacatatatacaataaccagaaatactaaaatcagaaatactttaataattaataatggtctcaaaaatagaggaatatatcaataacccaatctaagtcagactaaccagcattcctcatagttcaattacatgatttgtaaataaatctctgaaaatttttgaagtgtttactcttatttattaatattttttcttttattctcttttatgctattgcaaattatttcactggtatccctggaaatgttaatggatacattgaggggccaaaaagatttactgttgaaataaattttataactattgggtttaaaaaattaaagttttaaaaaacaagttttgaagacgtctcaagtctttaacattcattgtgactgggctggggtggaggaagaggagggggtataatatgcagtgttttccattcttattttatatagaatttttttctccaggcaatactatcaaaatataaaatgctactttgttcatttaacctgatattctacttaaccttatacctctgaggccccttttgtcttaacaaaagatgagaatttgaagaaataactgcaactctaccactctctaatcagattctaaataattaagattttgatgcacaaaatacaatttttgagcatataaatattattaaagaaacaataccataactacaaccaaaatggcttagcctacccaatagtaaatcttgttttgcaattttaaatatctaattaaaccaagaacaatgtttcccttatgattcatgctttcccatataaaactgcctgatttaaccaaagtatacgttttctatctttgcctgaacttatgccaattttaaaatacagctgcataagcatgatgatagatgccatttgctaatatgagaattattcccccatatgaaattgatttattttttgctttctgcaatataatcattctaatagctatactgagcacctacattatttcttgtgagattcacatcaatttgggaaggtagttatcatgattgctatttcaaagatgagaaaagtcatggccttgggatattagctgtcttgccttataccatacagctagaaaaagagggaaacatttcaaacttcagtctaacaccaaagaccacgttgcttccactatgtcatgctggatggaattatccacatttaatatacatttctttctttttccaccttgcaaacatcattgattcagacaatactcttttttttttttttttttgagacagcgtttcactctttttgcccaggctggagtgcaatggcacaatctcagctcaccgcaacctctgcctcctgggttcaagctattctcctgccttagcctcccaagttggtggaattacaggcattcgccaccatgcatggctaattttgtatttttagtagagacagggtttctccatgttggtcaggctggtctcaaactcctgacctcaggtgatctgccccgcctcagcctcccaaagtgctgggattacaggtgtgagccaccatgcctggcccagacaatactctttatgtagagcttcgcaatgtatatttgcagttggtgtacaagatagtacttgtttgggagaaaatcctcgaagaagcaaacatgcagactttcttcatgtgtagtattcattatcgaataaatgaaataccttgggcattttaaaacatctgtaaaagttgagaatacaatgaaaaaaccttacttttcaaggcaatagcatactacttcaaggatttccttctctattacttctataccctcaacatatttcattaaaaaatgccatgtagaagaaagcacacatttgtgctaccggaaactgaataatgtatatattctactttgttacctgctggtaatttttcccccttattacttgactctggttgtttgatttttttttaaactatggttaattattgcctttcacaagaattctttgttgttgtcatctgaaagtgtatttaaacaactgcaaacctaaataaaatataagcattatagaaataacatgaagcaaattttaaaataatcaatttaggtgtctctttgaagaacacagaaaacagaaactacctcaagaagacccattatcccttgtgggatcagcatttaaaagtgtaaggggtgcaagaatactgaagaatgttctatcatctctcacaatttacaatctggctagtaagccaaacataccttccagggccagtcatattatttactctacaatccagtccccaaataaatgacatagacatgctgttgtatatcagatccctgtgggaggggtgtgatcaggagtggtggaatggtggagtcaaaaagttctggcttagctagattttgaaagtcatgaaggtagtggacagaaagaacaggaatgaattaattagcaaagacagagtaggcaacagcacttagatatgatagaattgaagctgggagcagcagaggaacagggtggatacgtaagaaccctggataaaactttgaaggcagcatattttgtggcacttgaccagccctttcaatgcttcttcttaggtaccttctttattcattctctttttcatcttccacacaggcagcgagactctgacctattttggagagccattaaactgttagctgcatcctactacaggacccttgaaggctgagaaagtcttataggttcaaagaaaagattttctagtagtgaaatttcaagccatagagatattaatatcactgttctaactcccctgacatttggcagtacatagatgagactcaggagaatattatgatggttctggaaagctagtctggattttggatttgatcttggggatattagtaaaccattagaagatgtcttggaattgtaaatctagagcaatgcgctagaaaggagataggaaagaatgaaggcaggaaaatcagtgtgctattttagtagtctatgacttatgtgtaaatgcctggacaaaaactaggcactatttcatctccagagcattcttcattccaaattctccaaaagttatggtttcctgtagctatcaatgacaatgcacttaattaccttgtaattcgaatgcttccattaggaattttactatgctctggattttaatttcaaatgaaaaataattccttccttaaaatattttgtctacgcaaaatattcttttcaatcacgttaagattttaaaaagtgttctaacttgttcttcagagcatagccaagtacaataaaatattggaagccttacttatatgtatagttcagatgtaacatttaggggaacaatgctgcttgataggtctgtcacattgtgtctggttttggatagaatttgagtatttttgctaatgagaatttaaacataacaaaacggaatgccaaagctggctttaaaaagttttgaaccctgacatcatttgtttcttgtatcatgctgtctcaccaaaatccaagcaactatctccacattgtcccaattgtttcctctattctccctcaccaaagtccaacttcaatgtgaaatttccagattaaatatcctttcacaattcattttcattcataacataaacacgataaataactttaagtatgaaagtagcactccaggaagcttagtcttttgcagtttttacattttggcaacaccaatcaagcacctctttccgtccttaccccaattccttggacactaaagagtctatattcaggcgactctttcaagtgtatgtttcagggtgcccaagcagacacttgttttctcgcgggggatgttttgtgagacttggcctccccacttacgttctatttttaggtgagggaggaggaggaggagaggaggaaagattattaacaaactaatcttgcccattccgcgggcagtagtcgggggctggcctgctccgcgtcgcgccgggcgcgccccgccctaccgcgccccgcgcggccccggccggaagggggcgtgggccgccgccgagggaaggcgcgcagacgcgcagcggccggcctgctccgggcgcgtcaggcagggggtggggagcaggggccgggcgggcgctcggctcccagccgcgctccctcgggccactagcgctcccgcgcgcgcccggccgccttcatgtgaagcgccggccctccgccccttccctccccttccttccctccctccctccctgtcccctcctcctcctcctcctcctccggcgcccgcttcagctccccggggccccctgcccggccgggcgctgacagcaagggcgggggtccctgccgccgccttgtctcgcgcagggtccggctggggtagcggagcccccagtgcggccatggaccggcccctgtcgtcgtcggcggaggcggaggaggaactggagtggcaagtggcgagtcgcaggaggaaggcctgggccaagtgccgcagctcctggcaagcgtcggagacggaggatctgtccacagaagcgacgacgcaggacgaggaggaggacgaggaggaggacctccccggcgcgcagctgccggcagcggggggaagaggtcggtgctcccggccgggctccggggggaggctggtgggctggggagagtctcgtgcgccctgggcgcctgccacgagttctgggagagcctcgggcacggtaggccgaggggagaggggacacttccgaccttcaaacgcgcgcgctgaacgaggcgcccccagcgtcaacacagacaactgggtgccatccgatttccctgccaagggacactgagacgtgtcgcttaggctgcatttgccgtggtagattttcctacttgggagggtccagggtgactccgccgtcgtagtgctcctgggtggtaacgtgctgtcccctctctctacccccaggaaacgtgcccaacgagaagatcgcgatatggctcaaggactgccggtgagtgctccctggtccgcccgcgtcccgggggagatccgtgcggacgggacgccggagcagagccactcgggccgcgtccctgtgggtcccgcgaccgttgtaagctacaaaccggaaagtgagccggcggatagcttcctcctctaagcgattagaaatggaagtgctgtgaccgctgattatttggtgaccgtgttgactttacagttaggacttgagctactcacgcatcgtgttagcatcagagatcagaaatccagaacagataatcatgccatatttgttctgtttttatttgaaagaattctcacatctcgaacaggatattttgttttgctttagttttggcatctgtacaactggcacggaatcattttcctttcaaatgtgttttagacgagtttaatttacctaactacactaaatgggctttaattttgtttctgtttggggagctattaaaactagctaactttgtacttatagtttacttcttgaacatggaattgtcagatggcactggaattctcagggaatagaacttttaaaagcattcagactgcataaatctgtttaattacatgctttggcaactggtacaaaaatgtttgataaaatacagaggagatgaatcatgttgcacgtaaatctgactacagcaaaatgta

SEQ ID NO: 8521 - DNA, 6000 bp, Homo sapiens
ggaattaatttctaaggtcctgtaagctccgagaatacaaagacagtaaggtatggttcccaatgagtcttcctaggagacatgggtttttgctatgctgcccaggctggtcccagtctcctgggctcaggtgattctcccacttcagccttgcaaaacagtggggatatgttagttattattaagttcgtggacaatggaattaattcctaaggtctgtaagctctgaggatacaaagacaataaggtgtagttcctaagagaagtctttcttggagacaggctgacgcctaatacaagcaatgaaagaagaataggaaacagccactttaaggacattgtgtatgtttgtatataacagaaggatggaggcttgtggaaaatggttacaggcagaactaatgttgcccaggaagatggagccctttgagcaaagatagcactctggagaaaagttaagttatttaatatggctaaagctcctttgtgaggtgggaagtgttaagaaatgagagttgagagcatgacaatgcataagatcaccctgaggagaactgcagtgattcaagaacagagacttagggaatcctagcattgaaggggtagtttaggaaacatggcccagaaaggtaacaagtttactgcctgccttctcttctttcccattcacccaaagagcagaagtgctggccagaatcttttctgatacagatcagataggaaagggcagcactgggagtggaagtggttatgggggtgaagagagaacaagtcagtctccctaataaacagccaagagaggagtgacaggagtgagttagacaagcaaacagcaacaaaaattccagggcagggtttagtgggttaaagtctccagagaaattgagagtagaagaagcagatttctgaagttcccatgggttattaactgaatctcctttgaggttctttgagagagataaaatttgaaattcctcttaaattatggactaagttcctttgtttgcagagacagagctgcgtgaagccctggtttgattatggttattgaaggacctgttggacagacactaggggaactaagagagtgaaataatagtcataaaaatttacggcaggagaattgcttgaacccaggacgcggaggttgcagtgagctgacatggcgccactgcactccagcctggtgacagagtgacactttgtttcaaaaaaaaaaatttattattgctaccatgctaaactattagtcttaaaagtattaatggcaacaagaactgttcaattctaagagatagacatagtattactcccctttccctttcatagataagaaaactgaggcacagattggttggattgatttccccagggtcatacaactagtagttggcaaagccaggaatggaacccaggtgctttattttacagaaaccactggaatcaagatttttactaaagtatagggtagtagaggataaaattcaaagtacaaattctttttactatctaatattttattttctaagaaaaggattatattcaatgaatacttaatgtatacacagaagttctccttttaagttggaaaactgttataatgtagttcaaagagtagtgtcatgggggtaggggaggggcaccaccattctttcgtagactaaaacattcttttctctgtcccatgcacatagtaccaggtgcaatgtggattttgaatcagcactagctgaattgacatgttctacaatacaatttgcaaggcactgtgtgagtggctgctcgagcatggtcacacaaagagatgcctgcatttataaccccaagtttctaaagccactgggttagtctgcttcatagtttcctaattgaaatgtatgtttgcttttttttgttgttagacagtctcgctctgtcacccaggctggagcacagtggcccacaataccacaatatctcggctcactgtagcctctgccttccgggttcaagcaattctcctgcctcagtctcctgagtagctgagattacaggcacacaccaccatgcctggctactgttttttcttttttgagatggagtctcattctgtcatccaggctgaagtgcagtggcacgatcttggctcactgaaacctctgcttcccaggttcaagtgattctcctgcctcagcctcccaagtagctgggattacaggtgcctgccactgcacccagctaatttttgtatttttagtagagataggctttcaccatcttggccaggctggtcttgaactcctgacatcgtgatccacccactttggactcccaaagtgctgggattacaggtgtgagtgagccactgcgcccggccaatttttgtatttttagtagagacggggtttcactgtgttggccaggctggtcttgaactcctgacctcaggtgatccacccacctcggcctcccaaaatgctgggattacaggcatgagccacagtgcctggactatttgcttttttaaaaaaaacaaattccttgattttcaagactgctcattcaaaataaactcataaagaatggctcaacagtaagtgctttcagtaagttgtagccctatttgggggtgtgttgttcacccaagttttggtgggtgtacatgtgttgtcatttcgtgggcttcttcttttccctggtcctctcacatttcttcactccaccttggtctgtcggacccctgtcctgcgatcagaagttgaggagtgggagacttactggatctagccagagtttaaactcttctgtcttccttacctggatggatttccaggtagactggttgtcatgtttttaagatataaaagaccctttgggtttatgcatacatatcaatagcctctttggtgtattaggaaagaaggtgagaaataagctgtatttgcatttatgtgtaaggatttgtgtaggatttcttctctcaatcagtaatttctttcaggcagatgctagaccatgccttgtaaaacatgccaaaggttttgctgcatatcttttagtcaaatttaaaaatggaaatatttaatgcattttttttttgagatggagtctcactctgtggcccaggctggagtgcagtggcaccatctcagcttactgcagcctccgccttccgggttcaagcaattctcctgcctcagcctcctgagtagctgggactgcaggcgcatgccgccacgcccggctaattttttgtattttagtagagacgggatttcactgtgttgcccaggctggtctcgaactcccgagctcaggcaatttgccggcctcagcctcccaaagtgctaggactacaggcatgagccacctcgcccggccttttttttttttaaacacagggtcttgttctgtcactcaggctggagtgcagtggcaggctcatgacttatcataacctggaactcctgagcctaagcgatctatctacctgccttagcctccggcatagctgggactacaggcatgcaccacactcccagctaatttttaaatttttgtagagatgaggtctccctatgttcccctggaactcccggtctcaagcaatcctcctgcctcagtctcccaaagtgctgagattgccagcatgagcacctggacctggtccaataaatattacaaattcgaattaggcatttcactttcatttatatacatatcctttcacaggattatttgatagttattaatgtatattatgattgagttttaatagttactttgggaaaacagaaattactgttccagtacttacttgtaagttgtaagtccacacaatgcacttaaacttcaccttgttcaacagattctgtagcacatgaaacacttgaaatatggaagagtcacttctctgggcactttgctcatttcgtctgctattcattcactgattggacattttattgatcgactactatctgcttggcaaggtgctagaaataagaacactaagaaaaaggtcaaggttcctgtcctcaaggccctctctctcagtccagtgttgtcaaggcttgatgaaacacaccagtggcaaacaagcacgcggggccttatttcaccggtgtgcggtccttcttccagctctgaaattatgtctatccaaacatcctaaatcaacaaatcagtgtttctaaatcatacaaccgcagctaacaaactgggaataaggcttcgattattctgacttgatttaaaacgatcactgccaattctttgccctgcgaatcctttctttgactactaagttaagctttacatacctcacttgcaagaggctatgctggctttctggaaatccgtaattaagttcagtgtttgtggaatggagtgtaattaacgaccattaattaacagggtttcgttcgtgagagcctgccaggctaagcagcagaaacacgagaaactgataaaaagctttcctcatttttaaacaacagtcgcacggaagttcccggcgggacaagggaacgtgggtgcccttgctactcccgtggacgcgggtagattgggacgctggaccgtatctccccgcccccgcccccacgcctcctcaggtgctcagcctgaggccttcgtccaggagcgctgccgctgacccaggctcaggagctgggggcccctgcacagacgcccaggtctcgggacaggcggcgactgcactcacggaagtacgctgagctctcccctgtagaagggcgcctctcctcccccacttcctcctccagctccacagcagcctcccgggccggctcctcctccttccaggtctcctcccagtgccgccgcggctctcaggcctgaggtgcggcgctcaccccggcagtccccagcctcagacgctgcgtggagcggcggagccggagggaagcaaaggaccgtctgcgctgctgtccccgccccgcgcgctctgcgcccctcgtccctggcggtcgctccgaagctcagccctcttgcctgccccggagctgtcccgggctagccgagaagagagcggccggcaagtttgggcgcgcgcaggcggcgggccgcgggcactgggcgcctcgctggggcggggggaggtggctaccgctcccggcttggcgtcccgcgcgcacttcggcgatggcttttccgccgcggcgacggctgcgcctcggtccccgcggcctcccgcttcttctctcgggactcctgctacctctgtgccgcgccttcaacctagacgtggacagtcctgccgagtactctggccccgagggaagttacttcggcttcgccgtggatttcttcgtgcccagcgcgtcttcgtaagtggccgcacttggaactggagccggccccctcccccaccgcgcgcacccacccagcgtttctccattgggattgatttccgagagatcccggcgtctgtctgtctcacccatcctacctctcagagtggtttatatcctgggtggaggaaatatttggggaaatgaactccctttggtacccatcacccagttacaccccgcttctcacctcttaaaattggttaggggcagcgggagagctttgaagcagacctgtgcttaaaaatcggggaaagtgggaaatcaacaaaggctggtcttgccggactccccgcctcctgtgccagtgtcgaggatttggtcaatatcatccccgaacttctttttctcctctaccagttaggcttcttggtagcctttttctgctttacaggcttaacgcccgtccttttcagtctccctaaacaagccctcccccactctttccgcctctgtctgattctgtttctccttactccttttgcagacattctgatgacttaaaatgaccatactgtcctattgaattcattgtgtcttatctctgggactgtcagacatttgcacatttgaggttgaacagatgaattgaatgtgtcatctgttctttttatagtgattcactatttaggtcattgttcagaag

SEQ ID NO: 8522 - DNA, 6000 bp, Homo sapiens
tcttatagattaagcctaagtctttaagacacttaaaatttcgcttgcgaaatgccctttcagtctcatttagcctgaagacatgacttggaaaaacatcaatggttatttacttacctggcttgaatgtcagttcaaaaggctagtttattatagtatttttaagtcacgcattttttgaatatgggctaggcactgttctaggcactggatatacagggatgaataagatcggggaagcacacagtaaacaactaaattaatagcatgattttagatacagattggtgttatcaagaaaataaagacagactgggcacagtggctcacacctgtaatcccagcactttaggaggctgaagtgaggatcacttgagcctaggaggttgaggctgtagtgagtggtgatcatgccactacactccagcctgggtgagagcataagacactgtctcaaaggggaagaaaaagggtgaagcccagtgtctcacacctgtaataccagcattttgagaggccaaggcaggaggatcctttgaggccagacgtttgagaccagcctgggcaacaaagtgagacaatctcttaaaaaaaaaaaaaaaaagctgggcgtggtggctcacgcctgtaatcccaacacttgggaggccgaggcgggtggatcacaaggtcaggaaatcgagaccatcctggccaacgtggtgaaaccccgtctctactaaaatataatggtgcacgcctgtagtcccagctactctggaggctgaggcaggggaattgcttgaacccgggaggtggaggttgcagtgagctaagatcacgccactgcactccaacctggcgatagagtgagactctgtctcaagaaaaaaaaaaaacaaaaaaacagacagagaataatgttcaaataatacgttgaagatgtatgaaaccatacataggcactgacttgttcaactgtgaatatacattcccatgcttccctgctgcctcaactttgctcggcttgtaatgaaatctcctgtagctctgcacataaatgctatccacactttaagacacatgacaactacatacatcattcacagtgtgccaactttgcttttagactggcttcctttaagccagaatggctgctgcaggcccatattgggtgatgtccattggcagaaaaaagagagcatctcttttggtatcttctgaagagcaagtaaatctttctccaaagtgcttcattacatcgtttcacatttcttttctttgttttatttttttttgagacaggatctcactctgtcacacaggctggagtgcagtggtgcaatcatggctcactgcagccttgaactcccagcgtcaagcaatcctcccatctcagcctcctgagtagctgggactacaggtgtgtgccaccatgcccagctaatttttgtatttttttgtagagatgggggtgtatgtggggggggttatactatgtttcccaggcaggtcttgaactcctgggctcaagcaatcttctcacctcaggctcccaaagtgctggaattacaggtgtgaaccacagaggctggccctttcacacttaggccaacaggaatttatccctcagctagatatgggtttacctttccctggtcatagcatgagagaagaacactgagcaagatcagaggctgtttgcaaagagcatgtgaaaggggctgcttcaatacttaaggcgttcagccttgtactgtagtaatctacataagatgctttcccattaatttcaaggctctttgaggaaagcttgtcttatatatcttcatgtttttcagcacttagcccagtgccttgcacataatatgcattaactcttttttttttttttttttggagatggagtctcactctgttgcccagactggagtgcagtggctcaatctcggctgactgcaatctccgcttcccgggttcaagtgattctcctgcctcagtctcctgagtagctgggactataggcgcacaccactgtgcccagctaatttttgtattttttttttttttagaaaagacgggggtttcaccatgttgggcacattggactcaaacccctgacctcgtgatccgcccacctcggcctcccaaagtgctgggattacaggcttgagccaccgcacatggcctgcattaactcttttatttggatttaaaaattccccaaagtgaatttttattggataattttttttaatgtgtcaatgatttgaagctcatggataatttgaaattacttatgatactttggctttataaaatattttcttctaaagcttcaaggttccatatttaattttatgcttgctttcatactttatggggcagagggaaagaactgctatgcacaatcttcattacacatgaagaaacatttatttgatagcttgttcaatgtcttaacagttaacaggcaagagaatctagattttccgaatcccagtccagagctattcctactggtgcatattgcctttaaacagatcactccactcctcctttacctgaaatattcaagtatttcatgtaactgttattgttgatcatgctttttgtttttcttttctctctcctcctaccccggacaaattaaccctagttataaaatttgtcttgtttggaggtacgtaatctacaggctgacagaggaatgaaaatgtgaaggttatgagctagaaacattctatccctaaagaacaaggtccttcctatgaacaaggccagggttgacatcagaatgcaactttattggacttttcaaaaacaacgaatgtgcattttgttcccgaatttaacacctactcattcacgttttttgttggtttcagatgggttgaaacagtttaacaaatctggaattaagagaaagtgaagatgattccattcaactataggtgactatttacagctcagggaaatatcacacaatctgggaaatgtaaacgtaatccttgcagtaagtgaggcgagttatctatagaccaagaggcctccctgggactctgctatctcatagacccaacccatctctctaagggaggcaacatttacgtgtcacttgtcctaggctctcgttgcatttaatacaagttgagcatccataatctgaaaagtccagaatctgaaatgctcccaaatctgaaactttgaacatccacatgatgccacaggtggaaaattccatacctgaccttctgtgaccggttgcagtcaaaactttgtttcacgcacaaaattatttgaagttttataggcgcctgccgccacgcctggctaatttttgtatttttagtagtgatgggatttcaccatgttggccaggctggtctggaactcctgacctcaagtgatctgcccccctcagcctcccaaagtgctgggattacaggtgtgagccaccgctcccggcctatttaaagtattgtataaaagtaacttcaggctatgtgtgtaaggtgtataggaaacaaatgcatttcacatttaaacttaggttccatccccaagaaatctcattatgtatatgcaaatattctaaaatccaaaataatcagaaatctgaaagtgttttggtcccaaactttaagatgaggggtacttaacctgtataagaatttgtgatttgcacgtctctgttgctggagtcaaggcaatttgtagtgaaggactgagccttatcatacttgtacattagtgcctaccatatagtggggcttaatgagtatctgttgaacgaataatcttttcatatgtagacgctggttctgggagggcaaaattaagtccctattcttgaagagttaccagtcaatacatcttccagagagaaccaacttcctgttgttaaacccttcaatgcctagttctaagtcactgacaattactcagctagagacccactcaacctctcctctcctctcaaattccatttctggaagctgttacatggcccttccctcagcattctcaatacaccttctatctagggacacttgatgttttcttcttttggaaatcatgctactgtatgcgttttttactttttgaactgtcttcccatctgctatcccaaggcctccctcaccccagataaaagattcaaggtttctaagcaggaaaaaaagtttgcgaaaatgctgtggtttcttaagagagaacacttaaaatttgcaacaaaggaaatgtggaatcctgtaagatgtaaaaccctcaccacctgtcaaggactactaatttcctcctcctgcttctgacttgaaaaacacgagctaaatctgtctgcctaacgcacaaaaccagatgtccactcttcatctcacataattgacatctgcgtcttttatctacgtaaacaaacttgtcattgaaaaagtccttggctttgaagtcgccggatggcgtaaataacactgacactcaaatcccccgtctgatttcagattgggtcgatttcacgcaggttctatagaatttgccaagactgctggcctgttttctaccctgattccttaggtggcttctgggacagaattacggttctctaagtatttgcttgcaggtgggtttactgaaacggtcgccactatacgaagttcgttcttcccgtgtaactaacgagagcccataccaacgtgcaacgcagccgtgcacactgccgcagcggtcgctgcgatcacgacctttcaaaccgccccgcagccctcgcaaagaggctcgtggcgcccgccttccggtgcctcagtccctgccagtagccacccgacgccgtccggctgttcctcgttcgccctctccctccgcctagcccgcttctacccggacggctcccggcgcaggctgcagctgttccgtcagctgccgctcctcctcccagacgcagagcgccgctctgccccgccccccgcgcaggctgccgtccctacatccgggtaccgactccagccgcctagacgctggcactatggtcatggcggaggggacggcagtgctgaggcggaacaggccgggcaccaaggcgcaggtaccatgtctgcacttttcttgtcgggcaactaggtgccgagcagtgctgcgcccggaagctggccgccactgcggggaggttgggccgaggcggcaggcgggcgggctggggcactggtgcccggcctgctcttccggagctgcagcccctcaatttggctgaggcggtggcggccgccgtgaggcctgcggagctccgacccaggggtaggcgtgaggggcgggtggggtctgctggtggtacctgcctgccgaagccctgggctgcgagcctgtcagcagcaacggcttcttctcgccttgcccctgagccccagctgactagcattggaggggcgcgaccagcctggtggagacccccggggtttcctgaaggtcggggccgctgaggtgggagggggtgtaaacacagcctacctcgacccggcgtccagttcctacctggcctgggaagtacctacccgtttcctgccatccagcttgtctagccggatccgggtgccgatattctcctccttgtttccctttgaccacctctccctgccgctttccctggagctgttctctggtccagcaagttttcatcactaagttgtgacttgttagatgtcattccttgctaatatgcgtgaagcatagtcagagaatgaactgattataattttgtcagcttttttgtagggcattatgtgtggtaaattggtgcttgattaggcattgtttcttagggtttggaaaagatgggatgcctcacattaaaaataaataaataaaattggcatccagacttgaactgattaattgctagccgaaatggcttgctatagactagatgctctgaaatcggaagagatgtgtttataaaatgttaaaaagtgatgcaaatgaaaattgaaacaaaacaatcgtggagctatgattgtatgtctgagaatagat

SEQ ID NO: 8523 - DNA, 6000 bp, Homo sapiens
gaggctaaggcaggagaattgcttgaacgcgggaggcggaggttgcagtgagccaagatcgtgccaatgcactccagcctgggctacaagagcgaaactccgtctttaaaaaaaaaaaaaaatttactggttttacccaacttggctaggcagtctgtctaatgctggatttcctactccaaggcagcattcaaggagcctaaattatcagtatacttgagggactttttccctagatgtactccactgaaggaatcttgaatgaaaagcttgctgggtttggggggtcttttaggtgtaccttaaagtgttagcagacacagattaggacaatgctgaaaggccagcccagctccagaattcctgcaggattgattgatgcctcagttgcaaatgtgttgcaattcaacttctccctctgcccagtcttgcatccctcaatccccacagaggttgctcttgccatcattaggtaataacctcctgcatacaaatttcagagtttcagtgtctatttcctgtgaactcaagttgcgatgggtcccctgatgacttatatcaaacatgtaacatgtgtgagaaataaacctttattgcaataagatgctgagatttggtgaatgttactgtaatttagcccatcctaattagtacagatgccaaacctcacctgcatcaccagtcctttgttctcagctgagcttgacttacattgtctgccttttgtcgtggacaggtttcttgccaagtcttaattctgttctttgatgttctttctcactgtgagtgaacagccatgtcccaactgaaatatcacaagaaggaacagaaaagggaagagggtacatatctagttgtctacctaccaagtcagcggcatgtgttttttcttgtgaatttcctaagaccttttctttatgttctatataatttatcatacatttataacatgtacggtagtcctccctgccccttatccacaaggaacttgttccaagacctccagtggatgcctgaaactgcagacagtactgaacccaattgctataaactggaatacatttctattatgtcttctacccacaaatttaatgccttttccatcttaactaagcacttattacacattgtggccatcacttttgcagtttgaggtatggcagcaaaactagcatgaatttattttttcttcacaattcagtttcacagatagatttttttttttttttttgccagagtctctatcgcccgggctagagtgcaatgggcaacctccacctcctgcgttcaagtgattctcttgcttcagcctccggagtagctgctgggattacaggcacgtgccaccactcccagctaatttttgtatttttggtatagacggggtttcaccatgttggccaggcaggtcttgaactcttgacctcaagtgatcctcctgccttggtcccccaaagtgctgggattacagacgtgagccactgcaccctgccaaagattcattgttaccagcaatcttagcaacctcagcctataatttttttccctccttattaagtcaagaactctgactttttttttttttttttttttttttttttttttttttttgagacagagtcttgctctgtcgcccaggctggagtccagtggcatgatctcggctcactgcaagccccacctcccgggttcatgccattcattcactgcctcagcctcccgagtggctgggactacaggcgcctgccaccacgcctggctaatttttttgtattttcagtagagacagggtttcaccgtgttagccaggatggtctcgatcatcctgaccttgtgatctgcctgcctcggcctcccaaagtgctgagattacaggcaagaactctgacgttttaacttacaggaagcactttacagcttctgtatggctgaattgccagcatcactactcttgtgctttggggccattattaagtaaaacgagggttagttgaacacaagcacttggatattgcatactgccacagtcagtctgataagagactgctactaagtgattaaggaggttatagcggatacactgtacaaaccatgattcacatcccagaaggacagtgtgggatggcagcgatttcctcacagctagttagtaacagtactcaatttaaaatttatgaggccaggcgcagtggctcacgcctctaatcctatcattttgggaggccagaagggcggatcacctgaggtcaggagttcgagaccaggctgaccaacatggtgaaactccatctctactaaaaatacaaaactagccgggtgtggtggcgcatgcctgtaatcccagctactcagggggctgaggcaggagaatcgcttgagtctgggaggcggaggttgctgtgagctgagatcgtgccattgtgctccagcttgggcaacaaaagagaaactacgtctcaaaaaaaacaaaaacaacaacaacaaaaaaaaacaccacttattatttctggaactttccatgtaatattttcagaccgtggttgactgcaggtaactgaaacggtggataagggggaactacaaaaaggacacttaatgtttcttggaaaaaatcttaagcaaataaaaattgaatgatgaagtacttgatctcaatttgaggaagataaaagtgtactacgaattaataaactttaaactttctgcacctctaacatactaaaatccaatttctctgagtgctagaaactctcagttcttgaaagacaaatggtaaaacaataccgtttctaatttagaccttttgggcaaaacaaaatacagtaataaagctataaagaatcggtcgggggcggtggctcacgtctgtaatcccagcactttgggaggtcgagacgggcggatcacgtgaggtcaggagttcgagaccagcctggcaaacatggtgaaaccctgtctccactaaaaatacaaaaattagccgggcgtgatggcgccgcctgtaatctcagctactcgggaggttcaggccggagaattgcttgaacctgggaggtggaggttgcagtgagtcgagatcgcgccactgcaccgcagcctggtcgacagagcaagactccgcctcaataaataaataaataaataaataaaacctaaataaataaagctaatgaatcaaagcatatgctcttcgtctttttaagggattttactaggtagaatttttttttctctgtctaaagggtaaacagcataaacatatttcaactaaaaagagtcttagaatccggggttggtattgctacaacccctaattatggaagatgtttagtataacagaaccagtttaaggaatgtggagatttatttacatcaaattcagataaagaggtaacagcggactagaagaagcaagcagagcatgacttaaggagtctatctatgactgtatctgtggaactgcccttagccacaatgaaagaccagcaaaaccagccttcagcataaccctcctgcctggtaggagatgggaaggccagacttcacccctcaagatcgccctcccacgcgcattttccacctcgcagctaagaattcagtccagacttccgatcatggcgccacgcacgtcaccttctcccctcgccgccagcaaaatcccacccacgtcggctgaccccgcagcggggtgtaagggcgggagggatcccgtctcctatactggtcgcttgtacaaaccagatccaaaaaacgcactacacaaatccttggaaactgcggtaccaacgggatcttctcaattccttgagtgcaaaatgatcccactctctatcccgacacaactctaactccattttcctttcacgtgccctaaaaagccctcaaggcccccagccttggtgaatccaggccctctctcggggtgggcaccgcgctgtacggacagacgcgcgcacgcagcgggacgatttatagaattaaaagtcttttttttttttctggcttcgcatccttgcaaatactcaatattcctgtcaactaagaaggctaagggaatgggcggttgaggaaagcaggacgtcgattacagcgaacacatcaaaggggtggtctttccaattccggcttttgtttgagtcagaggggagcctgaggaggccaaggtctccggttctgggaaaggcgggtccatccggattctttgggctgcggagagggaggttccagccccgtgaaacaacagagggcagttctgcccctcgaggctttcctccgagagtactgagacggagacgcctcagtcgggagaaatcccggaactcggaggagtctgctgaacgccgaacaaaaggatgtggccgtcgtctcttaaacaaatacgcgaatcccaagccatgcacatttggaaggcatgtgtatgtgtgtgaaggagaaaggccaccgctgcccaccgcagccccacccagccctcggccattcaccggagagacgcgctgcggtggggcctcggagccctcagccagccccgaacgaggggcggggccgggcggggccgtgagcgcgcaggcgcagtgcgggcttcatcccgccgccggcgccgccgccgccgccgcccgctctgcaccacaggctagagacagacagggccgggaagagccggagactgaggaggaggcggaggcggcggcggaggcggggcgactccggtgaccgggagcgccgcagactggcagctgcggcgactcccccctttgtgtctggtctgctcggagccactggaagtgcctcccggagggacgcagggtgtctcgccgcctccctgcccacccccttccccggctaccttcatccgccctcccgccgccccccgccctcggtccgcgacgcccgagttccgtcaggagcccagagctgcgggagaacgaggcggcggcggcggcggcggcggcggcggcggcggcagcagcagcggcttcctcggggggttgtgattcgctcacaggagccattgacgggagaagaggaggctttcttggtggaatttacctcaggcaagatcgagccgcaggaataaaaagcgaggaagggaagggagcgccgccgggaggactagaaggggcagcctctcacacccactccgcctgccgtctcggggagcccggaccggggccgcgaccgcgacccctcccctcccccgctcctacctctcctcagccttcgccagggcctccccaaccctctcacggttgttctgcgaaggcgtggggactgtgagcttgtccatggaggcaggcaccttttttgatccagtcaaggaagaggatttgttgttttcgaaatcagagtgaaggaagcaccgaagcgaaacttaaggaatcctgccttcccggagccgcgggcgatgcgactagggctgccgggcgccgccgccgcccgtccggcttcgtccttcccggcagtcgggaactagttctgaccctcgccccccgaccccggatcgaatccccgccctccgcaccctggatatgttttctcccagacctggatatttttttgatatcgtgaaactacgagggaaataatttgggggatttcttcttggctccctgctttccccacagacatgccttccgtttggagggccgcggcaccccgtccgaggcgaaggaacccccccagccgcgagggagagaaatgaagggaatttctgcagcggcatgaaagctctgcagctaggtcctctcatcagccatttgtcctttcaaactgtattgtgatacgggcaggatcagtccacgggagagaagacgagcctcccggctgtttctccgccggtctacttcccatatttcttttctttgccctcctgattcttggctggcccagggatgacttcctcgctgcagcggccctggcgggtgccctggctaccatggaccatcctgctggtcagcactgcggctggtgagtagctccggccggcacgtcccggccactgcc

SEQ ID NO: 8524 - DNA, 6000 bp, Homo sapiens; identical to SEQ ID NO: 936

SEQ ID NO: 8525 - DNA, 6000 bp, Homo sapiens
ttgccacataccaaatgtagcactagatcaatgagggtctcaacaggcaacagggggttcaaataaaagattcaatgaaagaactactttgagaaatattaagaagggttaggggtggaggttcgtaatgcacccagacactagcaacagtggaagctgatagcacccctaggatggaaagattcttactctttttttaagattctttaagattctttaagaatctagggtaagattcttactcttaccctaggggaggtaagagtaagaatgggcatcatagaacaagggccaccaaacaagagctgtacttgtggagaggtactgttactaccagacacatggccctgaacctgggagagggcagggaagaaagacctggacttccaccttgtgctttctgatgtgctgggaacttccaatgctaagccctcagaagccaccctgacagggaactaatgagacattttctacaggggtctgtcccaggtggagcttggatctgaggaaaggggatggagaatcaccttcggcaagtcacttttcctctctaaatttcagtttgctcatccctcgtttattgcctaccatattatcaataatataaatagttggccttataatttttacttcgaatttttttgaaaaacctcaaatttacaaagaatttgtaagaatagtaccatgaatacacacatattcttcacctagattcaccaattgttaaaattccatcactgctgtttaattctttttatctttctctgctaacacagacacatatttttgctgaaccttctgagagtacttgctgacattctgacacttaaacctcgaatacctaagtattatctataaacaaggatggttctctacataaccccagtacgatgatcacattcaggaaattaaacattaaggcaatgctattatgaaatataggctatactcaaatttcccccagtttctcagtaatctgctttgtattatttttttcaatcaataataacacattaaattctgtcatcatgtctctattttctcctttaatctagaatggttttccaggcttttccctttttaatcttttgtgatgttaacatttttgaagaatctaggccagttattttgcagaatatggatttgtctgattatttcttcatgcttagattcagttaaaacaattttggcaataactacacaaagttgttgtgtccttctcagtgtattgtatctggaggtaccctatgtcagaacactccatcacagtaatcttcagttgggatcacttggttaaagcagtatctgctagatttatcaattatcttttccctattgtaattatcaagtaatctgtggggtggtatatgtgaatatatcttttctcaccaagattcttttacccagcattttttttacaaccatttgaattttcttgctatgacagaattagtttcataagagcataattaaggaatctggtaagacgtctttgaaagttctaattacaaccctcatctcttcttatgttaaactgtcttcattcatttacctacctatttaacaaatgtttaaagaatgctcgttttgtggcttggcctgtgacattttcatcagtggcttcatagttgcctaaactaatgtctcttcctgtgctccagaatcctattggcaactattttccatggatgccataaactcaacatactcagatgaaagctgtcatttcactttctcacctgctcttcctgttatttattccagtaaattgcacctctgtcttctcattgaccctataataagaaaggcctatttattgagtggctatctgttacaataggccttttatacatgttacatgcattatctcatttaatcttttcaataatcttgagaattagatgccattatctggaggacattgggctttgagccccaggtcaacagtaagcaagtccccatgctaggatacaaatccagttatcttgggcttcaaaatctttgctttagcatagtgataaaggtatcactggcttcaaatcctggctctgccacttcctacgggtgattgggtaagtcaccttaactttcaatgccttgatttccttctttataaaatgggaaaaatggtaactcttgtcttgtagggttgttatggacttgaaagaaacaaaacttgctgggcgcggtggctcacgcctgtaatcccagcgctttgggaggccgaggcgggtagatcacctgaggtcaggaatttgagactagcctggtcaacatggcgaaaccccatctctactaaaataatacaaaaaattagctgggcgtggtggtgggtgcctgcaatcccagctacttgggaggctgaggcaggagaatcacttgaacccaggaggcagaggttgcagtgagccgagatcgcgccactgcactccaacctgggaaacaagagtgaaactctgtctcaaaaaaataaaaaagaaaagaaagaaaacttgacatttgaataatttctgcagcaccacagtacttctcaaaccataattctggtgtcattcattctaaacttctccttccactcactgattgtggactagtcccatagggacctcgtcttcacagctgtcattaccttagtttagaccaggggttggcaaaccatggcccacaggccaaatccagacttcacctattttcgtaaatgaagttttattggaatgcacacacacccatttgtttacatataatatatggcttctttcattctaaaatgacagagttgagtagtggcaacagagaccccaccgtttgcaaatcataacatatttactattttgcccccttcagaaagctttccaaatcctggtgcctggcgtattccaatagtcttcttcccagtcttcctggttacatttctccctgaacccatcctccccatccctaaaatttcccccaaatgtgaactcagtcataccagtttgctccttatgtttcattggcccttgctgctaagagcatccgcttgcaccttctgctcatccccagacaagctttgtcctgtgaccataatgaactcttcatgccgtttccaactttagcccatgttattcttcttgtctgaatatccacccttttctctgttctcaataataagttcaggcttttcgtcttctgagaagccctttctgacttccacaggctgaaccactggcttctgctcctctacataatacttcaattccagcattgatctcactctatcatgatcatgggtttagctgtctgtccctgccactgctgtgtgttcctcttgagggcaggaacatttgtttttcactttttaaaaaacctctgttgcccagtctggcattaggaagtgcccattaggttgttattgcttgttggcgcttgagctggggcttgaaggtttctataatgtgtagcagtgtatagaaaacaggcaggtcagaaaaggcttctgtgcatcacaccaacatggcacatgtatacatatgtaacaaatctgcatgttgtgcacatgtaccctaaaacttaaagtataataataataaaattttaaaaaaaaaaagaagaggcttcctggaggagatgacagctgagctaagtcctggaggatgagaaggagtataaaataagataataggagaaaaaaggcagtaggaacagcatgggtaaaggtgatgaggcctgaaagaggcacgtggaaggaaagacaaatgcaggaagggggaatgggagggaatgctggggtacaggccaaagagggaggcatttggtgagtattctgcagagtctcctctgctgtgctgaggtgtggacaatgggaaaccatggacggactggagtaggcaaatgtcatattccctgttacaactgtctgtttgcatgtcagccttctagaagccccttaaggtatcaactatgtttttgttttgtcatcattcaatcctaagtgcacagaattccgggcatattacaggttccccatgaatgtttctttctttattaaaatgtatgaaaactctccagatttaaggaaggtcctcaatgtttcaaattctttttgttagatcattggtcctgtctacagctgtcacaaatttaaggactctggttatatttaatcttcacttttgaattttctgcttgaaaaatttgtattagaaaaaaaagtctatccttttatggacggctctaatctcttgaatcatttgggttggcttttctttggaccttcttcaactctgttttgtctctgttgagttaaggcttttaagaacacctgaattctttccttctgcaaaaccagaggcagcttcttttccgcctattttcagtttatttcttgtgattttagtttttttctcttaaccaaatgctaaatggatttaggagaaataaacttatttgtaaagctgtcaagggaccattagaaggatggtgcttcacagatagaatacagtttttattaatgatgcctagacaaatcctgccattagcccaagggctcagaaagttagcagcctagtagttttggagttgtcaatgaaatgaattggactggatggttaaggatgcccagaagattgaataaaattgggatttaggaggacccttgtactccaggaaattctccaagtctccacttagttatccagatcctcaaagtgaacatgaagcttcagtttcaaattgaatacattttccatccatggattggcttgttttgttcagttgagtgcttgaggttgtcttttcgacgtaacagctaaacccacggcttcctttctcgtaaaaccaaaacaaaaaggctttctattcaagtgccttctgtgtgtgcacatgtgtaatacatatctgggatcaaagctatctatataaagtccttgattctgtgtgggttcaaacacatttcaaagcttcaggatcctgaaaggttttgctctacttcctgaagacctgaacaccgctcccataaagccatggcttgccttggatttcagcggcacaaggctcagctgaacctggctaccaggacctggccctgcactctcctgttttttcttctcttcatccctgtcttctgcaaaggtgagtgagacttttggagcatgaagatggaggaggtgtttctcctacctgggtttcatttgtttcagcagtcaaaggcagtgatttatagcaaagccagaagttaaaggtaaaactccaatctggcttggctggctctgtattccagggccagcagggagcagttgggcggcagcaaataaggcaaagagatagctcagaacagagcgccaggtatttagtaggggcttcatgaatgcatgtgagttggtttagtagagagacacaggcaatttcagacccttctatgagactggaagtgatttaagagggaaaggatagccatagtcctgaatacatttgagctgggtttcaggatgagctcacaagttcctttaaaaaaaattgacttaagcaaatcctgggaagagtttttttgctatacaattcaaggttttaaggtcctcggattcatatactttataaatgaattagccagcttgtttaaaatgtagggaaattgtgggaagaatgccttctttacttaattcaaggttttaaggttctcttaatcaattctactagctaattagccaattatttaaaaataaaagtttgaaattgccaaaaaaaaaagacaaggaaaaggaaagaaagaaagccaccagtctgtttggcatacaatacttaattgttgcctgacctacgtgtgggtttcagatgcagatcctcagttttcagctcttcagagactgacaccaggtttgttacacggcttaaaatgatgagtatatccattgaatctcaaccttatctctctctagaccttcttggttaagaaaccatgtagtttgtatgaagtaggtactcaaaagatatttgatgatttaatttttactggagaagaaatat

SEQ ID NO: 8526 - DNA, 6000 bp, Homo sapiens
ataccatttggcagtcacatctcatgctgatttttttcacccctcatggaaatatataatcagttttctgggctttatggattaattaataactttaaatgagaaaatatttggctgtcaaaatggaatatacttttgttttatgattagagatgggcaagtgatgagagatgaatcaggatgatgaattatatatttattcaattaatttcaatgtgaaatacaaacatgttttgataattttctgctctcacattatgattcagagtgaaaaattgtcattggtgagcattcccaaggtcatatggttcctccaaaagtcaaggattcttcaaacacttgttcattcaataaatagttgtggagcattgcaaacatacttgcaaagaaggcatctttaggctgaggcgggcagatcacaaggtcaagagatcgagactatcctggccaacatggtgaaaccccgtctctactaaaaatacagaaattagctgggcatgatggcatgcacctgtagccccagctactcgggaggctgaggcaggagaatcgcttgaactcgggaggtggaggttgcagcgagctgagaggttgccaccgcagtccagcgtggtgacagagtgagactccgtctcaaacaaacagtaacaaaaaaacccgaagacatcttcagttcttgttctgatgtttctcacagtttagtagaagctgttggaaagcaaacaggccattacagtggtataattgttacaattgttacaggtagctagacaagcatgagctgggcaggagagggctcttcccccactcataggaatgctgggtgatggtttggcaattatcacattgcctctctaaaagtgataaattggcagctggtgccagggagaggtcatttcctgatggtccacacctgttgcactaaagtgttaattgaatgcgggtaccaggtagaagcaacttcctgggcctgcgcattaagagacaaaatggcctctggaggcacaccaccagaaaagggaagaaagcctcagatgagcacacgtacagtttcctaaacacactgcatgtgctcacctcctaagggtaaggagggcactgcacatgcgggcagcccaccctaagggaagaatcctgtgaaagaggccagcctataaagtcctaaaatcaaggttaaacaccacacttgaccttgggcctcttccaagcacatgctccttttttctgttctaaagctttttaaaataaacttctattcctgctctgaaacttgcctcggtctgtatttctgccttatgcttctcagtcaaattctttgttctgaagaggcaagaaatgaggttgctgcagacctgtacagattttctgctggtaactaagataccttccaccgataacataatgatttctaggatgggggacacagaggagcattgggaggttgcagaaaagccactaaatggacactagttatgggggtggttgggagtgaatgacattggtttgatgtctttgatgaatcgatgggtatggaagcaaaggcctgaagaatggtggaatatctgccaaagaaggtaggctagagtggtgaggaggggaagcacagacaaaatgatggctcctggcagtagaaggaagagttagtttggggaatttggagaacttcatgtcattcaacgtgatggaaacatttggtacagaaggaagaaagaacaaatgtggcaagagatgaggccgaactggggaaggagttgcccttcataaggaatcttgaaggggtgtgggccttacctaagagaggaagccagtggaggatcctgggtggggcggggacacagatgaattctatttacattttacaaagattactctggttgtagcatgaagacagaccaaaatgggacaagggtgggaatagaaatgacagaggcctgatctaagtcagtgaccttggcaagcgaggaggaaaaaatacttgagagacagttaggaagtagagtaattggggtttatcggtgaatcagcaggaaaagggagaaggctggttggtggtaccactcaacagtataggcaaggtaggagttgaagcaattgtgattaggaaggacctctcacttttgatgcttgtccctttcagaatggcaaaccaagcttaggtgaagcctagatatttgggggttactttctaaccctattgcttggactcaaccatgctggtgtctgagctcctctactcagacaaatgttgctttcagtaagttgcaagcaaagcaaaagaaagacattcacctacggcccttcagaaaagcaagcatgctgcatgatgaactctggtgcccaggaggcaagaaataaaaaacacttttaatgtaaccaactttccatgccccaccctcaccccaggcgtctgcatacacaaatcaaaaccatcttaagtcatggaatgaaaaaaaattaaaagcaaactaaaagcacttcctgtgaggtgaatggaaatttttgcccagttaattttccaggcacgtgaaagcagttctgaatattttaaaccacaagtacttgtattcttgaccaagatttttgagaaggcgaggcatgggaaggatcattgaaacaggactttgacataaaacattgtttacatagaagtgagctcttctccactatcggatcaatttaccacccagtgtctgacaaactgagaagcgagagggttgggaaaaagcaaagagatacatatcaaacaaaaccacacatatccagttgaactaaagctgaatttaaccataacttgtgcaacttttctccccttgaggtagaaacattacacctccaattgaccaggacatctttttttgcattcaaattatcttggaatttcctctaggacctaagtatccttccaccatgaaaataggagaccaaaaaaagtaatgcttccagtaatttctagccaaataaatgaggataagtgtgtgagtgtggtggggtagttaagagtttggaatccagagtttcactgtctggatttgaacaggctccgttgctcatcagctctgtgactccgggcaaatgactgaatctctctaactctcagttttctcatctatgaaatgagaataagtaacagactctccctcgctgagttgtttgagaacgggatcagacaatgcacgtggagccccgtgtctggcacacactatgtcctcattgcatatttattattaggtttctgctttgtatttttctctgtgcaacagccctgagctctagaacttatgacagcttttctcaagtgaagttaaagttccccatactcagttccagagctaggcctcacctaggttggaagaagtcaattgttctccactgcctgcctgtgtgctgggaaaggactctagcacagtgccggtggggctggaagcctttcctcatgatgctacggggagtacagtgaaaagggaggagattggggtagcaaggtcccaggggtcctggcagcccaggctctacttctcaggctagctcagtccctcaaacagcttccttcacacccactgctgagacccaggagccctacagaaggtagctaggggaagcttcagcagctagggggatccctgcaggatcagcctcctccttaccttgcagaccccttggctgtggtctggcattcctagtggctggcctaaagccccaaacctggaatctgtttcagagcctggaccttttggactcacaccttggtttccctggccagctgatttcagcttctcatctaaatgtcatttctgcaggctaagggaagtccagcctggatctagcatcttggaagcgcgttcagacttctggatggagggatcagcaggccttggtattggtggttctacctgcttcggttaagagtgaggactctggagccagactctctaaatcatagcactgacacttactatatgacttgggccaggttcgttacctgtctgtgcctcagttttcctcatctgtaaaatgggagattagtggtcaccattgggatgattaagaagattaaatgagttaatgtatgtataaactatagttataatgtaaatatatatacaaacagtaaccatttacatgcatataaaacataatataaatgtaatattagctatattcatatataaaaataggtatattttatatataaaatatattacatttaattttttacattttgcattaagatatattatttcatataaaacatttaagtacatatacatataattatctatgtaattattattgttattgttgttattgtctactttacctccctgcagggatggggagaccacggcaggcttttaaacattcttggtctcactgagccgtaggtgaggaatccctggttcctacagactctgctgtaatatgaggagcagggtttaagttagtttaaaactgaccccatcatttgaaacattgcaatctacaatgaatgccacataaatatcatttctcagattcctatgatgctcttctttcagatcttttcacttcaatttctataataattttgtttgtttcttgtcctatttcaaaggctttcttatctctggagcacctagcataagatagaaatgtgtcaaaatatatgttttattcatcatgtgagtatttttaggtcctgttaacccccataactattgattcagagaagtagggtggttctgaaaaatacaggcataatctctttaacttgttttataggaaccagaataagggtaatgttttcctctgtcttcaaaatcatcaataatccatgcattgtttaactcatgtcataagcaataatgcctttcatatagccattggcatcaaagaagaaacacccccttgatttgatggtaagcgtgacactacataaactcccagaaaacccacttcctttccagcaaatagaaaacaaccgagagcctgaattcactgtcagctttgaacactgaacgcgaggactgttaactgtttctggcaaacatgaagtcaggcctctggtatttctttctcttctgcttgcgcattaaagttttaacaggtaagtggtgtattgaatatttcttattaagttataattcaagtaaacattaagaaaaagcaaaggtagaaaaattacgcacccaaaagacagtggttttggtttttgaaagtaggaatagtttcaggatatggccaagggcaccatgtcactcatgtcactgtggatggcattgagtttgcattgctgcctttgatactgtgtcttgagatgaaaaacatgtttcatcagaccattaaatttttaaattacctgcttggagttacctgtcagtggataaactagcagagtggcttactgttcttagagaaagatgaaaggcaaaatgacttgtgtcaacagaatgaaaattaaatagctctggcatttggactgggaattctttctgtggtagaaaataaaatgggaagtctttgaaaagaaggattttgattttaatcttacctggatgatctgttatctgaaatgtccagggcaccatagagtttttattgacactaagtatcagagttcaccctaaaaagccaaggaggaaaggataatgtaaaaatacttcctagcccctgtagaccttacaaaaaagatcattctggagtccctgattccttctcttgaatggcatatagcagactctatatggacaatttaaataatgctacatacaatgtaagttaatacacgtgtttctgctgctttttactgtatataatttgtactacttttgttttctctttcacactgagccctattcttgaggttgaaaaaaggaaagttaagtaatattaaataacttaaataatcaaataaactaaaagtgaaggcagaacttttagtaggtatgatcctatctagggatacattttttcagtggcaaaaaaatagaccttactgttcttacaaaaaatgaaaaaaaaatg

SEQ ID NO: 8527 - DNA, 6000 bp, Homo sapiens; identical to SEQ ID NO: 2111

SEQ ID NO: 8528 - DNA, 6000 bp, Homo sapiens
acctacagttcagtgactcactcacactagccacatttccagtgcgcagtagccatgtgaacagcacagagaccaccgtccttgcagaagatttaatggagagtgctgttttaagggagagggttgactgggtctttttgatacgcttattgcctcaaaggtagaaaaattaatgtagcataggaagatcagactcatgctaaagccaggcagactggaagaagcaatagggcttctttaggttctttttccaaggattccagggaggtctgaatgaattttgcacattttgctgctgctttttaaattttgtttcataagggcccctcctaccagatccagtgtttgtgtctgaggaagaaatgagatatacacccagtatggagtgaaggagatttcaatactttatggaaatctgtaaggattccagaaacccaccaaatagaatatactagaaatatcaatttagaatagaaatgtcaaatagaaactactgggcaatattcaagtgtgctggaaaaaaaaaaagttgattgtttaaaaggcgagtaagaaaaaaaaaaaaacccttagtgaccagaaacctggactttgacatcaaacaaaagagagaataataaattaggacctattccattttaactgaagctttgcttctgagacagatgtagctaaaccttaactagggcagtgtgttaaattacagattaagatgcaattatgccttagatctttccttttcagggtgagagcttattgatgttagggctccgataaggggaagcaccatgtgacacgtgatatctattgtggaagcatgaaacttctggagcttttagatcctgtgttcccgagaggcaagacctaaatctctgtcttgctcgcatacctctggcatagtcatgcatccatgaacatttcgtaagtacagtgggatgaacacagatggaaaagcatacctgaaacgaacctctagtaaccaccaatggttgagtgggctggtgatgaaaggtctggctccagctcataaacccatcagccgctactttgaacatgtccctgcaaagctcctgcctgcatgaggcgaggcttttggtgttttcaaattggctctctgcagttgctgctaaaggtcacaggtaaatctgggaattccaccactgcagcattttcgagaacttgttcttggtggtttttccaagaaacctgaaacatctgccccatattgaaaagtacccagagaggaaatgtgaaggaatgcttgtccaggtttccttcaacggaagagcatttatggaaggctgtgtgtaaatagaacacatcagatcagaagttcccaactactggtctgtggaggctttgcatcagaatcacctaagatgtgtgttaaaaatacagattcccaaagaccactccagacccaaggaatttcacctgcaggaaaatggttcccaggaatcagaatttttaacacttcctccaggtgatgctgatataccctaaggtttgggactgtctagctgggaacacttaactttccacaggggtgtggcttggtaacagctttctcttagcatcatttaccaacctgtttcatgttcccccacatcccttcccgtcaaaggaatggaatgtggagtggattatctagtattattttacaactaaggataatgacatgaaacatcctaggtgagtcagtgatgtggccaggaatctcagcttcgctaattagctgttatctagtcagctcagtgtttttgatcacaaacccgatttttgacactggcctttaggtaggcaggcttccctatgggccagggatgtggactcacaaaatactgaaaagcacggtgcctacctagctctttaccactatacctctggtggaaaccagaccaactgcagtcaaaccctgagatcccagtctagagggaaacaagactggcaggtctgagccagtcccagtgtgaagaatttccctaaagatttgttttccatgtggcacatgtgagatttgtgtttagttcccaagagtccttggaagtcttaggttaaaacaattctaagccctctctgggccggtggggtcttgttcagagtaggctggggagagatcggcctcactctgaatcttccctggtctgataaagcactttgaactccttggaattaaaagcaccaccagaagtgtgaccctgggtggtgttaccattatttattgagtgctgccccctagaggattgaaaaatggtctggccgcttgagtccccagggatggaaacctgagactcactctctgtccaactgcaggaaatgaggccttcactcaaggggagtgggaagtcttgcagccctggtacagaggactcccaggaagtaagtgagcgtcccctgtaggacaccgctgaaaaatgaaaagttacagtgtaggcaaccaggccaggaacaaaactgattcttacttttctctactctggaagcagcctgatggggaccttcatccctgagaccccaagaccagaagtccagggttgtcattcttatggttctccagtgggcttaggtttaccttttctctcttctttccccctttcacagtgcccttcacctaaaccctggctacattattctcacaaacaggagtctcccacattgggcactggcaaaaatggtttggcatgcctggtgagtggtggggagaggtgatattaaatggccctctctattcagggactgtcactacagatagcgttctttgtccttagattagcatcttggcaatgacataaaccgggatctctgcttaaggttaataatccaaactgctcttttactttgttaaatatttaaggcttggagtcattctttacaattgagctttaaagaggagaaatgtaaatctggagtttttaataatgtggatgtgctctcaagcctagaaaggaaggaagaaggaaggaaaggagggaggaagaggaaggagggaggcaaagagggaatgaaaggtagcatttaggctagccaagagacatgctccctggaagaactcagaggcctctgtgctgtgcctttcccaaccaggcatctgagattaacagtgtgatactcagcctgtggatttccactctaaaatcccgcgccaccccccaacacagcttggctcaactatttgcaaatcacttctgattcaattttgttttggttatctcagtgtaaataacagttaagtgggagttacagatttttcaaacactaaaagtgataaagctaatgggcaagtccagataaggagggaaaccacccagaagaatccacaagtacaagccaagaagaaaatgggtagtcaggtgtgtgtttctcgtcaccgaaactgtatttttcttaatctacagaaaattttactttcttaatttaaaaaaaatcttaatctgtaaatatttttctgaattttcttatttttcatatacctcttttgtggcagaaaaggtgtacatgtgcagggtgtaatttaggctgtttctgttgcagtctttatgataatgtagtaataggtgtctggtgaagcaagacagtttggaatccacaaagccatcctcagaaacaaagatacaagtgtttccccaactgttagcttgcagttccctctaaacagttttcacgcctccatttaaaaatagttggcataatgatgttttctttctctaggctttgtgaccacgtttccatgggggaaaatgtgaatagacgtagttacagtagcatttggatgagacgccttcaagcacctatactttttcgggggaacttgatggaatccaatttaattacctgaagaaattatttgctgaagaaagtctttcctctttttagggtagttacagttaaaggcgcaggggtaacgaaatcctaacccagagaggagcagagcatgtttgggacataacaaaggatctgagtagtaaacgcagcgagtgtttggggttttattcagaccgggctgacggtgtgtgtcgccgccacgcaccgctgcctgttcgaacgcatggctgagctgccgaccggctcgctaccccaaacaccgtacgccacccaactcctcttgtaacgccatcgcgcgtggcattgtgttgggttctgcgtgtgtggcatcggagtcgtggaatttagggggaacaaggcttttccccccgtccccccggggtctcccttgggtgggggcgacacggccaaggcggcgcgccctgggggtgcccgggggcgcttcttccccagggcgttacgcaccggcggcccggcgcggaggtgcgcgggggcgatcgggagatgcggggcgggcgaggggtggtgggatgggcgccgccttaacttcgatcctgcggcggcccgagagaagccgtcgccgccccgcccgagctgggtgccgcggcactctgctctgcgccgcgcgtctccgcggctgcctctttaatcaggaacacagaaggggcgggccctgagccggcgcgtaatcggatagctctgccgcggctctgacatccacatgctgctcggcctgaaaaggcagtggggagccggaggggaggcagagatcgcgagcgaggcaccagcctgcagccggcccccagcacatcctcagccgcacagacactcggcgaggtggaggtgagggcgggcgccagcgaactcggagaggggctcgctcactcccaggcgatcccagccgccaccgccgccgcaccagcagcagcaacagcagcagcagcttccttcctcagactcccctcgagaggctggccaagcgggtgtagccgttgggggaggctcccgccgggggaacccggcgaggacaagagcagggcggccgccttccactcgggctgtccggcggcggctgcctccgcccgtgtgtccgtcaagggtgccgcgggatgtgtgtcagtttacgcctctgagatcacacagctgcctgggggccgtgtgatgcccaaggcaagtcttggttttaattattattattatcattattgttacgcttggctttcgggaaatactcgtgatatttgtaggataaaggaaatgacactttgaggaactggagagaacatatatgcgttttgtttttaagaggaaaaccgtgttctcttcccggcttgttccctctttgctgatttcaggagctactctcctcctggtgaggtggaaattccagcaagaatagaggtgaagacaagccaccaggactcaggagggaaacgctgaccattagaaacctctgcataagacgttgtaaggaggaaaataaaagagagaaaaacacaaagatttaaacaagaaacctacgaacccagctctggaaagagccaccttctccaaaatggatatgtttcctctcacctgggttttcttagccctctacttttcaagacaccaagtgagaggccaaccaggtaagccactgaaagtttttctatttattgcaacatggtttcccctttaaaagtgaccgctaaagcaggaaggccacgcagaacggcacagaagaaggctccctcagtactcaataatttaaagagagatcccagccggcccttcctacaccaccacggctgctaaaacccaactttcctctcctgctaggagtgtgtgtgtgtgtgtgtgtgtgtgtgtgtgagtgtgttttgaaacagaatttggcggtgttcatatgtcacatatggactgaatcaaaggtttaaaaatactacaaagcctttgcattacagtttttgggaattttttttccctgtcttgaagcagaacacatctcccttgagtttctccaactagccagtgaaatataaatcatttgcattccctccacttagctacattgagcaatgttaactgaagggcttgggaaagacaagagtttagttttggttttcagatgctgtagattctttggagaatgactggttatgcttcagaatcataaggctcaggctggtggagcaagtt

SEQ ID NO: 8529 - DNA, 6000 bp, Homo sapiens
tttaacataatttcctttaagaactcaattttaggtttcttctgtggttacctttcttcggatattttcatgctcgacattgtaacacatttttgtctgttccactactcccctagaaatgtccgttgccattggtcttttggtattgaatactttttcttttcccagtcgtgttgaaattagtcacacagtgacttttgaaattgtcccactttgtcctggtcttcagaatgagcagtggtgtaattaacacagacctgcagacttgcagactaattttcatgaacttgaaggttgcctgtgacatggggtgtggctctgtgtcaggagtgtgtatcccctgccgcatggccgctctacaggattgagtttgaggaacacaggcagatcccagatggtgacaggctctgggaaggactagagtgcatgtattactccattctctgaccactcatggctgtagcatccattcagcatcccctactcacaagaaagtatagcttggaaaaacaaaagaaatgtctagaatctttttgacatctgtatttttttttttggtgaatgatttctgacttttctcccattatcatcatctgagaattggcttcaaaaggagaaatacttctttcctaagggatcccttcaaatgatgaacatcttttgagaatttagtgactacttactgattaaacaactatctaaattacaatggagagcaatcttttctagaattagagccctctatattgtggcacacgcttccttcgctttttctgcttatatgcacaggacataatacagttgatgaaaaaaatttaaccttacatatatatatatttaaggtgtatatatatagtatatattataaggtatatatatttaaggtaaatatatatatatatatatatatatatagagagagagagagagagagagagagagagagagagatttaaaaatggctagctgacaaaccaggtcctgtaggctgcatggttttcacattcttagaggtttgtaaagaaaaaaaaatgcagcagagaccatatggcccacaaaacccaaaatgtttattatctggccttgtacagaaaatgtttgctgactcctgaaccacgtggcaagtaccaataacgaagcacactcgctttttactttcatgaagaaatgcattgtcttttctcctttgaagtatccacttccgctggtaaaatcagtcttcacagctattctaaaaggaggctgagaaaccttctctagctggctctgtaacacaggctgtcccagcgagctcctgggtataagctgctcttgagccagagctgctgtttgaggcttgttcatgctcttgctttcactccctagatctctcttagtatcagcaccatccactaatttgctgcacaccttctttgaccttgactttttgggcaaatgcttattccattccaattgctcttgtaagtctgctttgctaccttcccctgcttttttacttattttaccctctggacctctcttctgtcatccccttcttctactttctcccctagcatctcagccctcttgaggccaaggcctgctacatctaatatttctatttctgtcctttgcttgctcctgtccagacccagtcttctcactggttgcaaagtgggtccagttctaccactggaaacagattttggcaaatagagaccttctgatctcctccctcaccagaccaatggaccatttttgtgaacagtatgacgacccttcctgggtattgctcacatgcacccctcatggtgcttacctagggtccatattgcctggtgtaatttccttcccatggaccttctggccacctgccttcacctacgactgcagcatttctccatgtctgccactgtgactagatcactccagtgatcctctgatggccttaggatccaacacacattggtaaccagggccattatagcactcaagcttctggtatatttctttattccagtccatcttgctgaatccctctgtttcctacctgtgagtgcccctctatgaatgctgatttgattccaggtactatactaggctgtggagtcagagatgaccaagatacagccttgctctcagtattttttgatggaagaatgatgatatgcacatacacgaatacagagcaaagcagtaggtggcaagtgattaagcaagtcactaaatcttatgaaagcacagaggggaatatttagaagtaaactctataaaaataaaaattctgaactacctaataagaatattactaactctaccaagttgaccaattaaattatttaatcagttaatatttgattctgtttttaaccttcccttaaatatatggcttaaagactaaacttccagtaaattttttctaagtaatgtactctttctctgactcattatttcatttattgatatcttattttgactctagcaatgtctgtaaccattaaagttctgtaaataaatgcagtcttttgactatagtacataagacaacatccctctttgtaaataccccaaccccttattagaaactatattgaggccaggtgcggtggatcacgcctgtaatcccagcactttgggaagctgaggtgggtggatcacctgaggtcaggagtttgagaacagcctggccaacatggtgaaaccccgtctctactaaaactacaaaaattagccgggtgtagtggcacgtgcctgtaatcccagctaatcccagctacttgggaggctgaggcaggagaatcgcttgaacctgggaggcagaggttgcagtgagctgagatcgcactactgcattccagcctgggtgacacagcaagacaccatctcaaaaaaaaaaaaaaaaaaagaaaaaaagaaactatattgaatcctcattccataccccaagtgcatgaaatgatgtgttgtaactggtgggtgggtttggtcagtccaggttggctgataggtttatttatcagaacagactttaagaggttgtcactgaattgcaagagatgcctttcaagtaacttgcatctgggtgctttgcacctttcatttccctctcccttctcattgcttgtacatctcctttctggcttgctttctctcaggccctttttcaggatgcatattgtgtcaaatataaatttggaaaacctagccagagaatacttgacttgagggagacaaccctaagaacattgacctgcagtgggcactccggtggggctagagtgttcactagcctgccccaagtgtgacttctgcttgtgtgtatcacccatttctttattcatttagtacatattttccaagcgatttctctgtgcctcagacactgtgtgaggtcctagggacacaatggtgtgcagaagggaaaactgttgttgccctcacatgggggaggtagcaacaattacaaatttacaggaataaatatgtgataataatatcctagctcaacatagaaaggaagttatctcagtatttacctaacagttttgtaatgtgtgtgtgcgcgcgcgtatatgtcttcttcttttctctttgttaagtgtgagtggagaagatgatggctaacactgagttctgtcatggccatggcacttttatacccacattctttcttttaatcatggaattctccaccccagccctcaccccgtggatgtcggagtaagacaacattgttatcactcagattgtcattgggagggtgaataaatgaatgcttgcattatgagagtttgggggcagaaatatgccacagactcttatctgaagccatcagatttagtggctgcgaacccaccgaagtcagggatttacattttttacagcaacgagagaaaacttcccctttcctctgcagaagtcaggactggatctcaaaaatagaaatgtgtcctcctaaatgtgtgcccatccccgtggttgacaaacaacggatttcccaagatagctgccacacacttggtttctaatctctgtattgcttccccgccagaatgtcgaagtccttcccgaatatgcccagtcatactttctgaacttttgagcaaacaccgtccggcttcttgtgctttcctcaaagaccccaggcaccggcagggaggacacaggccggggcagagcgcccctgcgcgggggattcctgccactccgcgccagcctgcggcgcaaacgctcttctcagccgcagtcccacccgctgctggcaatctgaatgaggagccgcgctatttttacctccccggctgcaatcctttatatttacatgcaggaagcaaatatataagggattaagaaggagatgcgtggccttagtttatccagagcaggaagaggttggaataggagagggtatgtgaagtctggggtggtggaaaaggcaggtggacttcggctggttgttttctcccgatcatccctgtctctggcctggaaacccccgtactctctttcttctggcttatccgtgactgccggctccccctccaccgcccccatcttttgaggtaccacccgtcacctccgatgctgcttgggctgctgcatcactctgctgctttacccccttccccgccccccaacaaagcatgcgcagtgcgttccgggccaggcaacagcagcagcacagcatccagcaacagcatcagcacccgaagccccgctcgggcgcgctctcggggggcggggcgcacgcccgctccgcgcgtccccgcgccgctcgctcccgcgcgtccccgcgccgctcgctcccgcgcgccgcctcagcatcctcaggcccggcggcagcccccgcagtcgctgaagcggccgcgcccgccgggggagggagtagccgctggggaggctccaagttggcggagcggcgaggacccctggactcctctgcgtcccgccccgggagtggctgcgaggctaggcgagccgggaaagggggcgccgcccagccccgagccccgcgccccgtgccccgagcccggagccccctgcccgccgcggcaccatgcgcgccgagccggcgtgaccggctccgcccgcggccgccccgcagctagcccggcgctctcgccggccacacggagcggcgcccgggagctatgagccatgaagccgcccggcagcagctcgcggcagccgcccctggcgggctgcagccttgccggcgcttcctgcggcccccaacgcggccccgccggctcggtgcctgccagcgccccggcccgcacgccgccctgccgcctgcttctcgtccttctcctgctgcctccgctcgccgcctcgtcccggccccgcgcctggggggctgctgcgcccagcggtgggtatggccccgtgccctttgcgttggctttcccgcggggccctgcagaggaaagcgaagggcgcgcgggtccgtgtgctccgggcttgtccccggctcggcctttccttccctccctgcctgtctttccacccttctcgttcccaaacccccattcatcccagttcacttttggaagtccatttctgttgcattcgcgaaaaacccattccaattcttgttggttccactgggaggtgtttagtggatcctgggtccctcagcgatctctgtgcaacttgcggaggggcaaccagtggatgggaaatacagcgagggagcaagttgctacttgcgtggtggaaccttaatgtgaatgcggggaggatgtagtgataatagtggtaatgggctgtttcctcaaatttcgtatccggcgcattcagtgcggttggaattaaggtgggggaggcacacttcggggaccaaagaattaaggtgctgaagacatacttcatgcacgacctttggttctgatttctcaaagtgcttgtcattataatgaacaattaatataataccatcttctatatattgatgattggaagtcactgaaagcagaaagctggctttgtcaggaaaataaaaagaaattgggaagctgccag

SEQ ID NO: 8530 - DNA, 6000 bp, Homo sapiens
cacgcccagcctagctgttgagttttaagagattcttatatttctagatactagacctttgtcagacatgtggtttgcaaatatgtcatccaagtctgtatcctgtctttttatcttcgtagcagggtctttcaccaagcaaaagcttttaatttttttttttttttttttttgagactgagttttacttttgttgcccaggctggagggcaatgtcgccatctcggctcactgcaacctcccctccctttgtatttttagtagagatggggtttctccatgttggtcaggctggttttgaactccagacctcaggtgatccacccgcgtcggcctcccaaagtgctgggattacaggcgtgagccaccgcgcctggcctttaattagtttttaattttgatgaggttcaatttatcaaattttccctttatggatcatggtcttcatatcaagtctatgaagtctttgtctagtcctagatcctaaagattttctcctaggttttttttctaaacattctatagctttatatttagctatatatggaatcttgagtgaattagacttcatgaactaacaccccacccatgcaaggtttagtattcagcaacagctccagacccaaagagatgcccttgcagatttctgtaactcttcacatagcttcctgctctctgatacgtagcctaggacctctgttcttaactattacactatattgcctcttaagttagaggttgtgcagcatattaatcaatggctgatcaattacaattactgagtttctaactataggaaaggtcccacaaaagatgcaaaaaaggaagacatcccagcctcaaccccagtcatccccacatgagcccaaagcagtgattaggaaatacgtgcaaacctctgaggcaagggatggtgacagtaccgtgagcaataggattgcacagtgagtgacaagccatgatgctgctgtctcctctctggacccatcattcatccctcttcccacacctctctagttcctccagcctcgtccatcaatgaggagccagaaaattggctgcctctcccaccctagcctcccaaacttcatctaagtttttgacggggtcaggcacggtggctcaagcctgtaatcccagcactttgggaggctgaggcaggcggatcacttcagcccaggagttcgagaccagcgtaggcaacatggcaaaaccctgcctctacaaaaaatacaaaaattagccagtcttggtggcatgcacctgtagtcccagctactcgggaggctgagcatgggagttcaaggctacggtactgcactctagactgggtgacagagtgagactctgtctcaaaaaaaaaatagtttttgactcaacatggggataaattataacccaggtcaattctgggcctgtaaacctctctagaaggaaaaactctctttctctactctcaacagttctaacaccaaatgtgtgaattttccacaccagcaaaattatccaattctctgtggacaacaactgggtttcctacaattaactcaattctgacatgaactacctggagccagcacaggccccacaggtgaagagctcagtcccacaagactgcccccacttcaggtgccagttgcaggtagtgggttcccagattacccactctcctctccaatttagctacaaacaggaggtccctatgaccctcaggtttggtaacttgtagctcatagaactcaaagaaacactttgctctttctggtttattattaaggatacacccaagaacagcctaatggacaagggatggagggagtgcccagagcttttctgccctttccagacatgccaccctccccgaatctcaacgtgttcaccaacccggaagctccctgaaacccacaatttaggatttacatggaggttccattatgtaggcatgagtgattaaatcattggccattggccaagcctgggggcctgtaatcctcgtgactctgtatcctggcaatttgagaggctgagatgggaagatcaccagaggccaggagttcaagaccagcctgggcaacatagtgagacctgtctctaaaaaatttagaaagaaaaagtaaaataaaaaatcagccaggtgcagtggttcatgcctgtaatcccagcactttgggaggttgaggtgggtggatcacttgagtgggactgcaggtgagtaccaccatgcccggctaattttattttttgtagagacaaggtttcactatgttgcccacgctggtctcaaactcctggactcaaacaatcctcccacctcagcctcccaaagtgctaggattaacaggagtgagccaccactcactccagtgggcatgagtcaagctggatttcatagtattttcttgttttttttgtttgtttgtttgtttttgttgttgttttttgtggtggggggtgagacagagtcttgctctgtctcccaggctggagtgcagtggcttgatctcagctcactgaaacctctgcttcctgggttccagcaattctcctgcctcagcctccagagtagctgagattacaggcatgtgccaccacgcccagttaattttttgtatttttagtagagacggggtttcactatgttgtccaggctggtctcgaactcctgacctcaagtgatctgcccgcctcggcctcccaaagttctgggatgacagcgtgagccaccacacccggcctctttttctttctttcatttttttctcccttcccatgcagtttttcttactcccaacctctctcatagtttatcttacctgcttgccatccttgggcagctacatttttgacctcttagccagtttgagtctttctttttttttttttttcactcagtctcactctgtcaccaaagctgaagtgcaggggcatgatcacggctcactgatcatgccagccccaacctcctgggctcaagcaaacctcccacctcagccctgccccaagtaatggagactacaggtgtgggccatcactcccagcaaattttttttttttgagacggagtctcgctctgtcacccaggctggagtgcagtggcgcgatctcggctctctgcaagctccacctcccgggttcacaccattctcctgcctcagcctcctgagtagctgggactacaggagcccgccaccacgcccggctaattgttttttgtttgtttgtttgtttattgggtttttttttgtatttttagtagagacagggtttcaccatgttaaccaggatggtctcgatctcctgacctcgtgatccaccctcctcagcctcccaaagtgctgggattacaggcatgagccaccacacccggtcatgcccagctaatttttaaattttttgtagagatgagatctcactatgttgcccaggctggtctcaaactcctgtgagcccctcagttaatagaagaaacagtcaagcatggtggcataggtctgtattcccagctacccgagaggctgagaagggaggctctcttgagctcaagagtttaaggctatatgccaggcatggtggctcacacctgtaatcccagcactttgggaggttgaggtgggtggatcacttgagaccaggagttcgagaccagcctggccaacatagtgaaaccccgtctctactaaaaaaaatacaaaaattggctgggcacagtggctcacacctgtaatcccagcactttgggagactgaggcgggcggatcacaaggtcaggagtttgagaccagcctggccaacatggtgaaatcccatctctactaaaaatacaaaaattagccaggtgtggttggcaggtgcctgtaatcccagctactcaggaggctgaggaagaagaattacttgaacccaagaggcagaggtttcggtgagccaaggtcgcgccattgcacttcagcctgggtgacagagcaagacgccatctcaaagtaaataaatacatacatacatacatacatacaaaaagtagccgggtgtggtggtgcatgcctgtagtcccagctactcaggaggctgaggcaggagaattgcttaaacatggaggacagaggttgcagtgagctgagattatgccactgcactccagtctgggcaacagagtaagactctgtctcaaaaaaaaaaaaaaaaggagtttgaggctgcagtaaactaagatggcaccactgcacttcacacctcactctagcctgggtgacagagcgagaccttgtctctaaaaaaaaaaacaaaaaacgaaaaaccaaaaaaaaaaagggtgggggtggaatagaataaacaactctgagaagggacatgatctggtgacaatctcaagtgaatcagtggttgaaccaggaccagatcccagtgccccatcttctggggacgtcctgggtctgaatcttcaatgcatgtcccttctgcagtgccttcctctgtggccctcaaagggaaactgaagcctttgaggacatgaagactcgcattaggccaacgaggggtcttggaactccagatcaaagagaataagaaagacctgactctgtgtgtgtgtacgtgtgtgtgtacgtgtgtgtgtgtgtgtgtggcagaggggggtgtggtcatggggtattgacatgaatacgcaaggggcaggaagcatctgaaatcagagctaacttgggaggcacagaacacggggtgcctggaaggggaacagatgtgttgtggggcacagggcaggctgggaggggaacaaaggtccactccatgggtaaccagacccttccgccagggctggccacttctgcctttggaaaatgtttcacaacgccccatgttgtgtgtgtgtgtgaatcggccgatgtgaaccgaatgttgatgtaagaggcagggcactcggctgcggatgggtaacagggcgtgggctggcacacttacttgcaccagtgcccagagagggggtgcaggctgaggagctgcccagagcaccgctcacactcccagagtacctgaagtcggcatttcaatgacaggtgagtagtggcccctagggacagagcctgattggggggtggagtggaggagatcactaggctggtggagacttgaggaagcaagaaagcccttggtcccctgtggaagcctctggtcccccgtgggagtcctagtctagaacacagttctggacaccagactcaatctcactgggtggagtccttcacacccctaagcggtctacctttcctttgtctgaagtccgtggatcaaagcccctggagctttctgggctgccggagaaggtgaggggtccagccaaggggcagacatgtggcctcagcttgcccttcttagagcctagggtctctctgcattctctgtggcaggagatctgcctctgggcatctgtcctcacatgagaggacagtaattctgaagctgccatgtcccacacatctggaatgtttgtttgagaggtggaggtgatggacccaagatgggggccagggaccttagtttctccacttttccgggaggaggagggaaaggatcaggcggctttaactctgggccaccagaaagaggcaggacactcaccatgcttcatgggcccccacaggtgacaagggtccccaaaggctaagcgggtccagctatggttccatctccagcccgaccagcccgaccagcccagggccacagcaagcacctcccagagagacctacctgagtgagaagatccccatcccagacacaaaaccggtgggatgctggaaacttcctgggggcttgcaagattgacaggatcctgaaggatcccatgggctggagaatggggtctccttatgatcatgggtggcaagtcccttccaggtctgagcagcagtggtggacagtggcaactgccccttcctgcttccgtccccagtgcttagctggggtgcttcagtatttgtctaaaagcgattaaatgactttctcaat

SEQ ID NO: 8531 - DNA, 6000 bp, Homo sapiens
attgcacatagatttctttttcccatttaaaaaaaaaaaaaggtttctgctgggtgcgatggctcatgtctgtaatcccaaaactttaggaggccgaggtgggaagattgcttgagcccaggagttcaagactagcctgggcaacaaggtgagacctcgtttctaccaaagaaaatttaaaaactagctgagtgtgggtggtatacacctgtggccccagctacatgggaagctgaggcaagaggattgcttaagcccaggaggtcaaggctgcagtgagccgtaactgtgccactgcactctagcctgggtggcagagcaagaccctgtctcaacaaaacccccaaaaccaaaagaaaacaaaaaaagcaaagcaaacaacaaaaaagatggtttctttttcttactgtggctctttgaattttaaagatattaactctttcttacatattgcgaatgtttttcctaggctttttatttttttaaatttctttcaccatatggaagtttggaaatattatatggtcaaattagctaatctttcccaatattctttgtcactatactacagtgccaactgaagtggtgacaactatggctggaggacggtaattaaaaaacagggaagcttcctaaaaataagaggtgaggataatgggatgaataaagggagaatctttcatctgagataaatacaaatgctcaactcctacttttttgttttgttttgtttttttaaagagatgggggtctcactatattgcccaggctggagtgcagtggctattcacaggtatgatcataacatacggcagcctctaactcctgggctcaagcaatcttcctgcctcagcctcccaagtagctgagactacaggtgcatgccactgtaccaggcctcaactcttattcttaacaacatgcctcggatgagtaaagtatgttatacacaaaaaactagggcagggaaataccagatcacttctggaaagccctgccaagcccagggtggtagagacagggtttttgcttaatccctggctgcagttcctgggtaggagggtcaatatggaggaaagaatctccaaggactgtaagagtagggacaagccaggattgggcggaggtgtcagaaaggtcttactttctggattactgcctagcacacatgaagcccttgcaggacagactgccaaaagcttggtagaaggctgtgcaccacttcgccagccttcaatcaacatgcaccaactgcaaaccaaatgacaacatctccaagtataaaaataggatgctaccttgtgttctcatcatatttatacagaatcaaaaataacccagacaaaacctcagagctgcttgtcccactggcctgcttgcaactgtgtttgtacctggggtctctccaggagcacctggggtcagggttccagctactgtctccacaatgatctccatgttccctggtccctcttcagttgctgtggcctctaccagcaggcagcctggctcagtaggtataggtgcagggtcccgggaaggacaggggctctggacaggccccaggattccacggttagagagaggcggggggatcagcaatagctcagggcacagtccatccatctccccggtgctactggctggctgtgagtccaaaagggggtctgtcatcaccaccgacttgtgtgttttggcttcttaaatgctgacaagccaaccagaagaaaaacaaagtaaggttagagttcttactttcttcctggctggcgtgggtacacagcccagtgcccacccacttaggcattttcttgcatggcaatatgccatatataccatatgagactaaatagaggctttcttttatgataatgttcagaacaaaaagtataaaaatgataacagaatattaggagacagccaacaagtattggccaatatattaatgactgcaggttgtcttctgctagctaagtgcccttagccaagtcattaagcaatttgggtctcagatttcttatctgcaacaaaattaggtggggcccaaatatctcagaagtccttttttttttttttttttgagacagagtctcgctctgtcacccaggctggagtgcagtggcgtgatcttggctcactgcaacctccgcctcctgggttcaagcaattctcctgtctcagcctccccaatagctggactacaggcatgtgccacacacgcccaggtaaattttgtatttttaacagcgatggagtttcaccatgttggccaggctggtctcgaacttctgaccttgggtgatctgcccgttttggcctcccaaagtgctgggattataggcgtgagccaccttgcctggtccctttccctcttaacctttgataatctcactattcctcagcatggattataaggaaggcccttccttcatcatctggctcctgctgacctcccctgactcatctcccacttctcccctcagcagatctctgaaccagatgatgtgccattctccagacccaccacattctcttttgctttcataccctcacagccttttgcgtctcttggcttgatatgccttttccccttctcaatctctctctcttatctggctaaccaattaactatccttgaagaagctgcacaaatgtcacttccaccatgaaggcctcctgacattcttttttttgagacagtcttagtctgtcacctaggctggagggcagtggcacgatctcagctcactacaacctctgcctcctgggttcaagcgattctcctgcctcagcctcctgagtagctgggattacaggcatgtaccaccacgcctggctactattttgtatttttagtagagatggggtttctccatgttggttgggctggtcttgaactccagaactcaggtgatccacctgcctcggcctcccaaagtgctgggattacaggcgtgaggcaccgcgccgggcctggcttcccgaaactcttatcttctctcttctggcgtcctaagggcactctgtacacagccctatcagaaacgaggtcacactgcactgttgtttacctgtcagtctctctccctagatgtatagcttttttagtaatttgttgacattatcacttcaatgatattactttgtgatactgacattatcacttcaacgaacacaaatcacccacaatcgaagattccagtgaagaaccacagatatggagctgcattggagtaaagctaggtatcttgtacaaaaccagtggttcctcacctataacgtaacacatttggagaaatttcaaactcattaactgactatggcctcaaactaaatatgggaacataactgaggaatgaatgacaattgaattgcataccctgttatacatggctaaaatgagtttaagctgaataattagtaattaataagaatgatgggaatcacttcatgaaattgagtcacagacaagatgcaaaaagaaaaaaagaagaagaaaccaggccgggcgcggtggctcaggcctgtaatcccagcactttgggaggccaaggcgggccgatcacctgaggtcagaagttcgagaccagcctggcgaacattgtgaaaccctgtttctactaaaaatacaaaaaatcagcagggtgtggtggcacacgcctgtaatcccagctactcgggaggctgaggcaggagaatcgctggaacccgggaggcggaggttgcagtgagccgagatcgcaccattgcaccccagcttgggcaacaagagcgaaactccgtctcaaaaaaaaaacaaacaaaaaccaagatcctgcaatctgatagtccctatttccagaatcccatggactcaaaacaacagatcacagggattcacaaggtggctggaaagtgcactcccgtggtcagagggattctctggaaactgcagcctccacttactgaatattatcgctgttctggggaatcttcaagcttgaccatacatggcctccggggggagccaaggaggacgctgagccgtcaagattaagaaccttcacctgcgggagggcagggtgaggtaggagacaggtgggcaccagagaagaaatacgcttatcttccgggcaggagggctgaggaagagaaaggacagactaaggcagagagaaggcctggagaaacaacgggccccggcctagcgacccaggttcccacctgcctctggctctgactcaccgcgtggtcttggacagacacagtcgcttcgcttctctgggcctcagctttcctatctgtaaaatggaggtgatgacagtgtccacatcgtcgggcaggagctggatcataagagccagcgaactggaaaggcggtttgtaacctggaaggcttgggatggagcatcgtcatgattttgtcctgagagcagcaggtacccgggcggggtccagaaccgtgacgcgactgcagcgccggggcccagctcgtctgggtgctcccttcagtacctccttccgagagttcccagcgcccaggcccaccctgatcccggggctcgaaaaactttgcctccagctcgctccacccgcattcccttcccagttccgccccgcagccgctcactcacctccagacccagagccggcgggagccgcatctctatggtcggccgcggctggaacggcccccggggcccgctttgtgcgaccgcctccggctcagccgcctctaggatattggggatgtggaagccactctctcttcctcttgccggctgccggggtactctatgttttgtctctgtggtttttcccgccctccacccccactccagccctgaagccggagaagcaccatcgagagctctggggtagagtggcgtgggcttctctgtgggtgtggcgggaagtagatgaaaggacccggggcggggccgaacgcagcttccccaaggtgcaggcgcggtgaaaccatcgagacggagggccagagagtcacggcggtgagagggctgagtgacgggttaccccaaaccatgtggctggaggcgcgagctggggtgtgggcgaggttcaggagggggttcctgggtgtcgcggaggggccggggacgggagagctttgtctgtggccttccatgcataggtgttttggaattctggatcccagttctgaggctcagccgaggtcactgctgtcagctcacctccctgcatgccaggcgcagggcaaagtggccggggttcggggttggaggagaggtgtactagaaacaactttgctcttgtccctcaggatcttattgtctacgatgtgacgatccgtggagaaagtagcagatgggcagattttcatttggggagaatgagggagaaaagaacgggcattccgagccaagagcactgcatgagcaaggagttgggaggttgcttacttgttgaacatatttgttgcgtatttgcatatttgctaaacaggtagtgttaggagctaatccatgaaaggtaggtgggcgccgtattgtagagagccttgagtaccaggctgagtttatacccaattcaggggtctgctgggagccagccattgaaggtgctggagcagagagagatatggtattggagctgatccctatgatgaaagatctggacccttgtgtagatgttccgtgaagcaggaggtgaagacctattaaaatgccatttcaagaactacgattttaaagacagtttaggtgggaggtaataaaggtctaaacaagacgttaaatattggggacgtaagggggaggatatttgaaggacattactcataacaagacatagggttactgacaagtcaacggacgcttctcccttgctgactgcagccaatggacccctttttatcatagctggtcccagggaccacaaaaatcctgtccatccattaccctgatgtgaagcctgtttatatagctctttttggtttaaggcatctccagacatggtcctctggtaggaaacaggtatgag

SEQ ID NO: 8532 - DNA, 6000 bp, Homo sapiens
cacaagtcagagtggcggggtgagtagtttggtgggaacaggtgactcaagatgactcaggtcagagtaggtgaccaggagtgactcaggacggagcaggtgatagaggctaggaggtggttgtttactggaactaggggcaaggagacgaaaactttaaaatgaagagctgaacataactgatacattgattctttggagaggatctcagaactcattgtacttaacaatttacaggctaaaacctttgaagaggaatttattatatcctacaccaggaagcagaagttgtagtgacccgagatcgtgccactgcactccacctgtcagggaaacatctcaagcatgaggtcatgaaagtcaaggcccccagctgctgcccttgggcaacatgggagaggtgaaatttaacgtttgcttctcctcgtagtgattcccctctgaaaatgtcctagctttttggtaaaggaacgtgcactgtctggtgtgtgggtcttgtgaaccctgaggaggtggagtggcaggagatgggggctttcttctttcccatttcctcctggtgtccagggaagatgcccgttcaccttgggaggactgagactcggagctccaggtaaaactggtgggctaggggaggtccccaaatgttggtgagaccttgaccctggccagtatccaggttcttgacaccactgcaagaaggaattcaaggatgagtcagaaaatagtgaaaatatggagatttattgcagtgaaaagtacacattaaagaaaggggagtgtgggccggctcaagagaggcagttgcaccaagagacagttgcaccatagggtttagagttaccatctttatgggtttctttaaccaaggggtgaatattcatgaagatttctggaaaaaggtaaagatttcttggaactatggtatcatcctttttttttttttttttttttttttttttttttttttttttttttttgtgacagagtctctctctgtagcccagactacaacctctgcctcccagtcccggttcaagcaattctcctgcctcagcctcctgagtagctggaattacaggcacgtgccaccatgcccagctaatttttgtatttttagtagagatggggttttaccatgttggccaggctggtcttgaactcctgacctggtgatccgcccacctcggcctcccaaagtgctgggatcacaagtgtgagccactgtgcccagctggtgccactcatgtttgcaccaaatatgggtgctcctagaactgtcacagcgctggtgggtgtgtaatttaatatgttaatgagtgtataatgaggtcctaggtgaaacctaggtcaaatccagtgctgtgttggttcccatcagtcttagccagcttggcccacatcttgattttcggggtcttcttggcccttgcagctattttaacagtttccttttgctagttgtgtgaagctgctgcctggaattgtttatttccctgcaaccaccgtgtattattcctgcctaatttgactgcccgcagagatttttattctttatttttaagggttgatgagggagggaggaggtcagtgttttatatttactttttgttgattagggtcattggccatgtctagttagggcatggaaattcctagctgcctgttttaagggtcccaagggtgggttattaggagagtctgaatccgaggcagggattggttggaatttttgtatgaccattattttgacatggaactgccataatccagaagacacaaactttataaggaggttaaacaagcaaggaccaaagattagtagaaattagagttattaaaggttccaggaaaggtaggaactgtgtcacacttagtaggtatttttttgatgaggtcccagatggtttgagcagtgtgcttattgaaattatgtagccaggtagcatgttggtaaatctttttgtttgtttgtttgagacggagtcttgctctgtcacccaggctggagtgcagtggcgtgatctcggctcactgcaagttccgcctcccaggttcacgccattctcctgcctcagcctcccgagtagctgggaccacaggcgcccgccaccacgcccggctaattttttgtatttttaatagagacagggtttcaccgtgttagccaggatggtctcgatctcccgacctcgtgatccgccctcctcggcctcccaaagtgctgggattacaggcttgagccaccatgcccggccgcgtgttggtaaatcttttgagctggcagtctaattaatcctgagttgttaatataaagaacaggtgtggtttattactgtgtaaacccctttgtttagctagaagataaagccttctgctttttgatcatttgaatggcttatgttttggccctgttagggcctcatacaatggcttagcaattctgcaaaatcctgctatacccaggaaagttcttaggttttttttttgttgttgttgttgtttatagaggttttacttctaagtaaacttttgtttgatggacaaggtccagtttcctgagtttagaatatactacaggtatttcacttttggtagagaaatttgggcttggatggagagaactgattttttttaaggaagtttaggacttgaatggcatttttatttgagtcttctttagtggggctgtatacaaagatgttatttacatactggagtgtggctctcctttttagctctggctttcttaacttttgtgtcaaggcatttttgaacaagcaagggctatccctaaagtcatgaggcagtattgtcctggtgtaccattgggtaatagtagtttcaggattagtctacttgaaaggaaataagttctgagagtcgaagtgcaaaggaatacaaaagaaagcattcttatgatctaacactgtgaactaattggtgttttctggtatttggttaagtatagtataaggatttggcactataggatgtaagagaattatgacctcgttaatggctcctaagtcttgaactagatcatatatatatatatatatatataattttttttttttgagatggagtctcactctgttgtccaggttggagtgcatggcacaatctcagctcactgcaatctccgcctcccgggttcaagcgattctcctgcctcagtctccccaagtagctgggatcacgtgtgccaccacgtttttaaagcatggcctcctgtccttcctgtccaaaaaccaaatgaaaaatatggtctaggttgggtgctgtggctcacacctgtaattccagcactttgggaggccgaggtaggtagatcatctgaggtcaggagtttgagaccagcctggccaacatggcaaaaccctatctctactaaaaatacaaaaattagccgggcgtggtggcgggcacctctaattccagctactctggaggctgagaccggagaattgcttgaaccgggaggcggaggttgcagcgagccaggattgcaccactgcactccagcctggacgacagggtgagactctggggagtggggaggagagaattaacaaactatatgacacaaaggaacaaaaatacacaagacaggataagagagaggaaggatacagggagagctaacatacatatagcagtttgaagtcccgggaaaggagaaaaaaatggggaggagcaatatttgaacagataatatctgagaaactccccagactgatcaaagacatccagtcacagagtcaagaaactaggagtcctagaataaataagtagaaagccacacctagcaactcagctgtcagcctaattgaacttaatatgccctttcttctctggctgcctgtaaatcaccaatttttcaaatgctgttagaaccagctgtaccatcctgctgggtccttcattcctggcttgaatgtgatctttgaccctgtatttattttatacttgcgtgagttatgtttttaaactttttgacaactatactttgaatatacatgaaacataggattcataagacaatactttttttttcttcttgctgtacgttttccgtactatgttactctttccattttattaaaaataattctggccatcatctacgaaatctggtctcaacctgcagtttgaaatatcctgccttggcagacgcggcagggaggtgcgtggagggagaattgaattaaaaaaaaaaacaacaaaacacgaatatttagatttctttgttcagcggcccccctccagggatcagatgactggcccccctcgctccgaactgactccgggatcaatccggaaggccattgggagaagccgagggcagcttagccacggccggttcccgttccctccaggacgcgagggtcgccttgggtggggaaccgcgaccgggcgaggacctatcccggtgtggggcttcccgatttcgaaagaatctcgctgcacccccgcccagagttcagaccaagcgaaaagttatttgagaggcctcgggggcgcggggtgaggagtcgtggcggaggccttggtcggggcgccgtggatatccccgagtcaccgcgtccctctcctgcagctcccgcgtcgctgggaggagcgagggagcgagcgggaaggggtctagctggcctttgctcggccctccccagcgcccggctttgaacccgccctgcactgctgtctgggcgggtccggggactcagcactcgacccaaaggtgcaggcgcgcgagcacaacccatggctgcgctgggctgcgcgaggctgaggtgggcgctgcgaggggccggccgtggcctctgcccccacggggccagagccaaggccgcgatccctgccgccctcccctcggacaaggccaccggagctcccggagccgggcctggtgtccggcggcggcaacggagcttagaggagattccacgtctaggacagctgcgcttcttctttcagctgttcgttcaaggctatgccctgcaactgcaccagttacaggtaacccgcgggggcatcgcgtcctggggatgggagtgggcaccggaacagagaggctagaggtgagaagacgttggacagaaagtgaaggctgcaggaactcagctggggacccactgaggctatggtcataaactggaaatcagtagggagaatgggcaaagtgcagacagagccctttgagctgagataaacaggacgaggaagggcttaaatcaggacggcaccagtaagggggggatctggacgccggacttacagtgagcagaggttgaggagggagctgtcttgggaagagagtggcagaggcaaatgtgtaagctaacggatattatggaatcactaattctgggctgatattggctaccacagacttcttccaaacgaaataacttcaggaggattatagaaacctcttggttatttgcaaggtaaatttcctcttaggggaaaacacaatgctgcatctcagatcgtggaagcaaactcacagacagtaaggaaaaggtactttttgttattaagaaatcagtctgaggccgggtgcagtggctcacacctgtaatctcagcaccttgggaggctgaggtgggcagattacctgaagtcaggagtttgagaccagcctggccaacatggtgaaaccccatctctactaaaaatacaaacattagccgggcatggtggcacatgcctgtaatcccagctactagggaggctgaggtaggagaatcgcttgaaccagggaggtagaggttgtggtgagccaagattacgccattgcactccagtctgggcaacaagagcgaaactctgtctcaaaaaaaaaaaaaaaaaaagaaaaaaagaaaaaagaaatcagcctgtagtctgtgttcaggttagtggtgttgggggagaaaaccaatgtctaataagaaagttttatacagcagaacacagaaatgaggcagggatgaacagctcactgctcactga

SEQ ID NO: 8533 - DNA, 6000 bp, Homo sapiens
actgggtgctctgctgtggggagtggggagatacttttggcaagagtctaagtgaaactggggctagctcaacccataccctgctctattccagaaactctccagcctgccaagttaggttttccaaggcaaagattggtccatgaccaaagagtgtcacaatctaccctggtggggataaaagtcattctggatgtccccaccttcttagagtttgcaattgtcatatttaatatggctcttagaattattgctctggtaaggacaagcttttgcttattttacgtgtgtacatttcaccattttttcacagtgcaagttatttgaggactttttggtatttttgtctcttagatttgtagtagtattgaaactagctaacagtgttgagcacttactataggccagtcacccttttatacaaatgaactcatttcatcctctcaacaaccctgttattattgccattttacagataggcaatctgagacccagagagggcaaataacttgatcaaagtcacacaactgtcaagtggcagaactgtgctatgaactcaggcggcttggctctagaggtctcacatttaactattcccctatacagacgctagtcacaaagatgcagtctccttgaaaagtcgatctgggaagttagtggtctatttcagtttgtgcccatggcatggaaggtctaacagttgtgggagggcatcaagacatggtgggggaggctgggcatggtggctcatgcctgtaatcacagcactctgagaggtcgaaatgggtggatcacttgaggtcaggagctcgagaccagcctggccaacatggtgaaaccccatctctactaaaattgcaaaaattatctgggtgtggtgcccgtctatagtcccagatacttgggaggctgaagcaggagaatcgcttgagcccgggaggcagaggttgcagtgagccaagattgtgccattgcactccagcctgggtgacagagcgagactctgtctcaaaaaaaaaaaaaaaaaaaaaaaagacatggtgcggggaggtactgtggtatgtgatatatgaggataaatataggacataaagccagaagcccttgcatctgcttctggccatgttgcctatgagccttagaccttgggcaagccaattaaacttaccaagcctcatttttctcacttgtcaaatggggttaagatgctctaccacagagggttgttgtgaggaaccaatgagaatatgaatattaaagtggcttgtaagctggaaagcactacctgcatttaaaataatgaagttatcattgttgttatccttaagagcactggatggagatgatggcgaatgacacagtaatcataagacaggcaggggctacccaggcctgttaacaggagggccattccctcacatcctctctgccagctccttgatgttggcatcactaatgtctggtgcctgctcatcccatgacctagacttagagcccattcccctgattctagcagtcaggatgactagttggaaataacagccactttaagctggaagggaatttactaaaaaataatgaggattagagggtattctcgggaggaatagagagcaaggacttaatgaccagctataacatgagaacttctctgccttccatgcctgcagaagtctgagtctcctgtgcacaatgctcacttctaaattcaggtcttgcacaggtgagtctgactggtggaaccgaggtcagtatctgtgccctggctgcaatggttttctggcttctatcttggcaagagaagacttatgagaaatgaccaaaatgtaaaagtgggttttcaaagatctgggtggccacagatgacagatatctgccatactggtctagttcccagcacgctggacccgcagagtgatttcagggaacagaatcagaggaatccacccgagggcttctggcccattcatggggagcccagagaacggtgtgctttgcctccaaatctgggtggtgtggcgggatggctcctgctccttcggacctaagggacaggctgtggtgctgctgcatgtgcagacaagtgtcctatgctgccagcatgcagggtggggacattcctgtgagactggactgtgaggaagggtgtgacagttggctactgctctaagctggcctgtcgctggcttcagcctttgctgtcacctttcctgtcaccatttcagtgtctacaggctgtaagctagaagctgacacatacccagagtggccatcctttgtgcatgcaaggagtgctcttttgtcacagaaatgaagaccccatcgggaacacactgtaggggactgacaattacaggtgcgccgcaggcaggatgtcaaagacgagagcgggcctaatgaaagcatgcgtttatgtctaataggatgagttggtgggtgtcagcatcatcttactccccccagcctggaaagaaagagataaacatgggtgtctaaaggctcttcaaggggagattttactccatcatctcagaggggtggaggagagaggaaggtctgtaagggtagagaacgaagcctcagactctgggtggggtgcgggtctccaactgaaagaatgggggtctggggctaccaaaagttgagggcctgtgctcagcatcctctctggggtggatggaacctcagagggacaagtcctgtgacacccttatggcatcttggtgtgcaggatgtacatggcctggtacaccaggggtccctggttggcaagacccttctcaggctgtctcagtattaaagtaactgctgtctgactttacagactagaggagcggggctgggaacacaatgtcgaggtggattgaagaccagagcccctgtgcaatgccgaccaggaaaggttccaaggctcttgagtgtctctaaggacgtgaaggccctaccaaaacaaaattcaaggtagggacttggaaccacattgcctggctcagaggaataaagaattgggatagctctggtttgctagggctactgtaacacagtatcataaacccagtggcttaaacaatggaaatctactgtcttacagatctggaggctagaagccagacatcgaggtgtctgcagggctaggctctctctgaagggactagggaaggatctgttccaggcctctctcctagctttggtagttccttggcttgtggcagcataactccagtcttcacaaagcgttctctgaatgcacgtctctttgtccaaatttcccccatatatatatatacatatattttttttttttgagatggagtcttgctctgtcacccaggctggagtgcactggcacgatccctgctcactgcaacctctgcctcctgggttcaagcaattctcctgcctcagcctcctgagtagctgggattacaggcgtgtgccaccacgcccagctaattcttagtagagacagggttttaccatgttggccaggctggtctcgaactcctgatctcacgtgatccacccgccttggcctcccaaagtgctgggattacaggtgtgagccaccgcacctggccaatttccccttttcactggaacaccagtcataatggatgagtccacccttatcttaacatctgcaagaacgttattgccaaataagggcacactctgatgtaccaggggttaggacttcaacgtataaattttgggggacactactcaactcccaacagctgggtctcccattctgagttttggggcacagctgtgctctgcctaggcatagctgattcccaccctaggaattcccaccttgggactcaccatgtgagacttaggaggacagttcatctctttcagttaaaaattttgtttgtggcttggagagtcacttcaatacatggataatgatgcccaaacctgtcggcagcctgctttccagctgtgaccatggcaggtaacgagcctccctgagtctccactgtcctctgccgaccaaatgggaatcataacagctcctcttattattatgcctgagacgaggcagccagtctggagagggccaacctagcacaggactgtgagcacacacaagacaatgtgggcgtccaacagatcctagctcccttccccttggaaggctatgcacacagaaaatctttccttgggttgagctgagatctagatgaggccaggggtcagacgcggtgaagtaccaaggtcacagggctgttatggcatcgcactgtgtagaagtccagtttcattgatctcgggataggggccgattggggtccagtggctccttcgaaagaccttttgcccttggaaaatgagatgtgacctcagggatagggggagaagggagaggaaatgtggaaacggagccacacagtcttagagttgcatagaactttggaacacccctattgcaggcccctctcgctacagctggggaagctgaggcgggaggaggggaggtactgtgtcaaggtcaaacgttgggtggtgccaggcgacagaagccaggcctttgagaggcaaggctgtggtagaaatgaaaggggaggtggtgggtgcttccaggggtctgtgagctccgttcccaagactggaggggcctgtgtctgcggagggggtggcttcctgggctctggaggggaggggaggctaaaagcagggttggggagcgaatctgggggattgtgggaatatcgggccgcgccccagcccccagcgatgcgtggggcgcctggagaaggggcgcacgggcaggtggggtgctgcggggcccgcgcgtgggggccgcgccggccggggcggggtgagtcacggcccgcccgctcccattgtgcggcccggcggcggcggcggcggcggcggcggcggcggaggtgcggagcggagcgcgaggaggtggagccgcgggctgcgggctccggcgcctgcgtccgcccggccagcccggctctgcgctgcgagaggccggacggcagtcgcggctgcgctcgggagagagcgcgggggacatggggcgcggcggcccgcctgggcctcgcaggctccggagccccgaggtaccgcggggcggggcacgccgggcagggcgggggacccgggctgtcccgggcgtggctgggcctcggaggggcgcttgggccgggagcgtgcatccggctcccgggtggggggcgccagcgcaaggaacctgaccccgccctcctcccccagggctccccgctaggccccctcagtggcccctccttctcacctgggtctcgggtcccctagtgagcgagagcgtccccagccgcctacctggccatggccaacggagtgatcccgccgcccgggggcgcctcccccctaccccaggtgatcggcgcgcgcgggggcgggggagagatgggggaggagaggggagggaccttagggtgggcagaggagtcctctggccgaccccgggaccccccagatccagggatgagctgggctgggggttacggagaaagaggggggtttttgatattttccagatccgtagccctctctctttacaagctctgggagcccagagagggtggtttctgggatgctgacacaggcctgggagcaaggggagggggcccgatggtgtgagagcctgctgagctcccccaactagggcttggagttggggtgggtgtggggccttcatgggtcaggggtccttagcagaggccgtctgggcctgcaggtccgggtgcccttggaggagccccctctaagtccagacgtggaggaggaggacgatgacttgggcaagaccttggctgtgagcaggtttggggacctcatcagcaagcccccggcctgggaccccgagaagcccagccgcagctacagcgagcgggactttgagtgtgggtagcctggggacccctagtgcggccgccctcgccaccatcaccttcatcgccaccatcaccgcgctcacctccggcttggtcacccagt

SEQ ID NO: 8534 - DNA, 6000 bp, Homo sapiens
ttaattagcattgtgattacccattttttaaatgattgatagaatgtttttgtgaagccagctaggcctggtgctttccatagaggagtattttaaccccctttctctagctgttttatgataattagtctggttagactttcttttctgggatcaattttagtaagttgtgttttccttaaataatatctatttcatctatttttaaaacttattttcatagaggtgtacaaagtagcctctaaggcttttaaaatttttcctctgcttttaatgattatttttccttcagtatttaaaattttgtgcttttgtttttcctcttgttctttctttattagattagctaatggtttgtctattttgttgcattttttcccaataactctattttgcatttgttagtttcattgtttttctcttttctaatttaaggatttatactttctttgaagaggtccataattttggcagatttttgggataattctgattccagatttgagaattacagctgtgatacgtgtagtttttaatagaaattgtcatctggtgctccatttttttccctttagtattgtttttatattattgcacgcgtttttctctgtgtatgcatcttatatgtgtgcaacagatggaagctccttgaggccaagactatgcattgtatttcttagggacaataaatattgatattgtggctatgaaattagagaattaatgtaaacatgaagaacttgtagtatgcagcttctgaaaaggctcccaagaatccctaccatttactactcatattcttgtctcactccctctgtccttcagtgtgggctagatctagggccttgcttctatgaagtagaataggataaaactattggaatgttacctccaagattgggctataaaatacttctattttgtcctgttcagacactctgtatgtcttgatttcctcatttgcttgttttggtgaagtaaagggctgtataatgagctattctatgaagaggctgtataatgagctattctatgaaatggcccatgtgttgaaaaagagggaatggcctgtggccaacagtctgcagctaattgaatctaccaaccatcgtctgagtgatcttggaagcaaatccacctccagttgagccttgagatgatgtagcctcaaccagcaccttgactgtgaccctgtgagaaaccagagccaggggacccagctaaaaccacttggattcctgctctgcaaaaactttgagatgataaatgttgttgttttaagctactatttttatgtgataatttgttatgcagcaatagataatcaatacagaacccaaattctgtatacttgtcttgatccaggaagcattgcccaattgaaaactgaacagtctagttgtaatttggaagtaacgtgctttgcagagaaataactctaaatcagaacttaaaatgcaataatgtaattaataccaaaatttttcatttataatgaaggtattttgacaacacttaaaaaattactttaacttattaaaggttaccaggtgtccctgcccccatttttttttttttttgagataagatctcactctgttatccaggctggagtgcagtggtgtggtcatggctcactgcagcctcaacctcctggcctcaagcaatccttctgcctcagcctcctgagtagctagggctacaagttcatgctaccatgcctgactaacttttacaatttttttgtagcaatggagtctccctgtgttgcccaggctggtcttgaactcctggcctcaagcaatcctccgcctcagcctcccaacgtgctgggattacaggcatgtatgcctggccaattgtcttttggaataacttatttttagtgtggcttcttttaaaaaattctatctgcacatgagtatttataacatgccaagtgaatgacaagctgcctagataaaatgtgtagattatggctgaattataacatggatttttactgtacaacattttaaccaacattagtttcctaatactggtggagactgctggttgcccacaaaaaaattctgtcctccacttcttccacaggaatatagcttaagcttgacataaggttgccctgctagagataacatttccaattgtttctcactgatggaatgttagtgaaagtgatgtgtgaacttctgcctcacttgcttaataagacattgctgctcagaacactctctctcttcaccctttcaggagctgaacttcagatgttcagccctaacccagattcaaccatgcaaaagaggacgatgacctaaggctcagtttcagggcatggtggagcaataagatgaaaagaaccagagtcatggagtagggccatggagcagagcttcctactaacctcaactgcttgccttagaaccattctatgaaagagaaatacatgtctgtgttccttaagccactctattttggggtctctttgttatagtagcttaacctttatccgaactagtattaatatatccatcattgattccttttaaatatgtcattttgtaattgttacatatatacaagtgagcaaagtacaaataactggatttctgccctggcaaaaaaaaaaaaaaaaaaaaaaaaaaaaggtcggggggcgggatgtgaaatgtatttcccacaggtatgactagtgttcagtgatcaaagaactacagggtgtttctctggtatcaagaaaaaaaaattttttgcatgactgcaagctactatttgatatctctgcaccattacagcagtctttcagtcctaccacttctcaaagatgttgatttttgttaggttggttgggaaattcatgttcagaataatcagactgggccttagaaaaaaaaggttctggggaaatggactttaccactgcccaggaggctcaagatgtcctactcaagatgttcagagccaaattctcttgaggattccttcctagattgaatgactccagcacaatacaccttcttatcatgatctcactaggccttatagagcttgtctcaaggttatttttacaagagccttataagaaagacaagaagtgaggattatcatttcattacagggataaactgcgacatatggtgacttacatcaggtgacttggtgagccactagaagctggaatcagtaactgatcctccatggagataaaatgctctgtctacaaatacaattctttggcaattaacttaatgctgcgtgtgccatgttttgctttgcctatttttcctaactggtagaaagaaaaatcgaagcactaaattcgggagacacatgatgcaagtgccttcacaggaaaacatatttctttaacacataagcagaacaggtccccaacgatcacagctccagcttctaaaaccaaaccacagggttttgcctcacacctgtaaatgacagccagaagcattgtggagagatgcttccacctcctgggccggacatttctgtgtgtgatcccgccagacatgacaataactctgcgtgtcttctgtaagaggaaaatggtttcccttaagagcttcagcattctctcagtccccttgactttgctctccagacaggactgagaagcaagaaaagtagaaactagggcatgaaggggactacatcatcctggaaagtcacatcccaaagacattcaggcctaaaaggacaactgaataaataaggcattgacaggtgttcattaatcatttgtgcaaccaaattcttagtaggctttgcatggacaatcaggaaacatgcaggtttctgctgcaaacgaaagacggggttgaattgcacttttgttgcagactgatcacctgggcctaatttgattgttgcctcccaagggatctctgagcccaggagggaaatgtaggagggaggagggaaaaccaaggccggcctgcaggatgtttcctttgctatcttctgctgagtgctctaaagcaggtgcaggtgcaatgagatacctaatcctgtccccagtcctccagcactttgttctcttctcgtttaaactccctaaatggtctggtggggttttcccagtgtcattgcttaaagagaggcagagcggaaagaaagaagtaggagaaagcggtaagcatctttgttctcaatgcggaaaacccagaagggactttccttcccacccacctgaaaatgttccccagttgccaaatcagaagggcaggggcagcgacgcggaagatgactcagggcccactttgaacctcctgggtacttgagcaagctcaagggtgttcggacctctagggagacgttgcatcacgcagtttggaaagaacttgggaattctccctggggggctcgctgtatttactgggaactagtcttgcaggaaggtgagagtacgtggctggctgtggggagctggcgtgggaggaaatccgacttcaccttgggctcagagttgcaaggaaggtcactgtgggatcagcctgagcccaaaaggatgggctaatgggagcggccgcaggtgcacgcgcgctcggccgctcccattagtgttacgtctgccgggggaagaaggtggggtggggggttgggggcgccgggagaagagaggcgcagttcggagatcggcactcctccgtccagttacaggcggtcctgcccccgtggccgcccggggccgcccaagccctccgggacggagagaaagggggacgcgttgcgcaaggtggaggcagacacctgggcgggcgctaggacccgggcggcgcacctgttggctgggcccggggccccgcccgcccggcctccgcccggagtgcgggatcggcgggggcgaggcgggagtggcggtgccagcggagggcaccggcccggcgtggcagcggcggcggagcgcggccccgggcacaccatggccgagctgctgcggagcctgcaggattcccagctcgtcgcccgcttccagcgccgctgcgggctcttccccgctccggatgaaggcccccgggagaacggcgcggaccccacggagcgcgcggcgcgggtccccggggtcgagcatctccccgcagccaacggcaagggcggcgaggctccggccaacgggctgcgcagagccgcggcgccggaggtaaccatgggcaggtgttcgccgggtacggggagggggcggctgcggacgtgcgggtccctgcgactccgccacgcggggccggccgggccgagagggcgccgtccccggcagtgacccggctcccgccgctgcgagcggacggggaggcctggccttccagtaaccaggatgccaccctccaacgctgccaggggcaaccgggtctattgagatatccccagacgctttcaatgcagtccatttagagacttcccactttcaaaagtagttaaattcacgtagatgccagcaaatatgtaagagttacgtaatggaacggaggagcggggatgtccttggcacttccccggggagacgttcttagactcccccccacccccgtattcttgcatttccgcccatcccccttccctgatgcgcacaaatgcgggtgcagccgggctcagcgcgctcctcaccgcgctgcaccgccagctctgggcacagaacttggggctcacacagctcctagagagatttacaacctccctgcactacccccggcgatgatgtcttaacagcaactctcgcttgccctcccccagagtctgggggtccctcctgcctggtgggtcttttatggaccgacaccagtgacttctaacagatgcttctgggagggaagctcgctacgctcccgctaggtgttcaaagcgtggttatacaacccactgcggcttggggggaaccagcgtgcgtcgtcgtcgcagtgcacagggactttaggcagcagggaccagacgggctgcacttggcttctggggacgcatgtctaccgggagcactggcagcacctgcctttt

SEQ ID NO: 8535 - DNA, 6000 bp, Homo sapiens
aaagaactgaaagatttctgttaaaattttaaacatcagctggtcttggtattgtactgtaatgactatggaaagtgcttatagtattttattatatagtcacagactatttctgccacccttcacatgaaacagatcattaggtattcatgagaattatgaagacatctcttctcaatgtccctgttatttggacaaataacaaaactataaaaggaactgctgtactcctacagatgttttcattcatttggacataatagtttctgaatttaatttttataaaaaggaaaatatagccaaattctataattctcaaaagctgtcaataaaaatatattgaaaacttttcaagagaaaatcaattatacacatgatttttttaattaaaaaaataaaaaatgtagaaagtagaaatactacaggcatacctgcttttgttgcactttgctttattgtgttttttacaaattggaggtgtatttgtctgttctcacactgctaataaagatatacccaagactgggtaatttatgaagaagaagagttggccgggcacggtggctcacacctgtaatcccagcactttgggagactgaggcaggtggatcacgaggtcaggagttcgagaccagtctgaccaacatgatgaaaccctgtctctactaaaaatacaaaaattacctgggtgtggtggcgtgcacctgtaatctcagctacacagaggctgaggcaggaaaatcgcttgagccctggaggcagagattgcagtgagctgagatcacatcccaaccccagtccccagcctctccctctccttgggcctccctatcccctgagacacagggatattgaaattaggccagttaataaccctacaatggcctctaggtgttcaaatgaaaggaagagtcacacgtctctcactttaaatcaaaagctagaaatgattatgcctagtgaggaaagcatgttcaaaagcccagacagtctgaaagctaggcttcttgtgccgagccgttagccaaggtgtgtatgcaaaggaaaagttcttgaggaaaattaaaagtgctactctagtgaatgcataagaaagctaattagccttaatgatgatatggagatacttttagtggtctgggtataagatctaaccagctataacattctcttaaactgaagtttattccagagcaaggcggagctctcttggattctgtgaaggctgagagagatgaagaagttgcagaagaaaagtttgatgctagcagagttcggttcatgaggtttaagaaaagaagccatctctataacataaaagaagtgcgagatgaagcagcaagtgctgatgcagaagctgcagcaagttatctggaagatctagctgggattgttgatgaaggtggctatgctgaacaacggattttccaggtagacaaaacaatcttatattgcaagaagatgccatctaagactttcataggtagagaggagaagtcaatgcatggcttcaaagcttcaaaggacaggctgactttcttgtaactggctattgcagctggtgattttaagttgaagccaatgcttatttactattctgaaaatcctagggcccttaagaattacgctaaatttactctgcttgtgctctataaatgaaataacaaagcctagatgacagctcgtctgttttcagcatggtttattgaacagtttcagcacatttttgggagtattgttcagaagacgtgattactttcaaaatattattactattgacaatgcacctggtcactcaagaagtctgatgaagctgtacaaggagattaatgttattttcacgcctgctaacacaacattcattctgcagcccatggatcaaggagtagttttgattttcaagtcatttaagaaatttcatggggctgtggctgccatagtgattcctctgatagacctgggcaaagtaaattgaaaactttatggaaaggattcaccattctagatcccactatggacattcacaattcatgggaggatgtaaaaatattgacataacaggagtttggaagaagctgattccaaccctcatggtttactttgaagggtttgagacttcagtggaggaaatacctgcagatatgttagaaatagcaagagaactagaattagaagtggaaactgaagatatgtctgaattgctgtgtctcatgataaaacttgaacggatgaagagttgcttcatatggataaacaaagtggtctttggagatggaatctcttcctggtgtagatgctgtgaacactgttaaaatatcaagaaaggatgtagaatattacataaacttagtggataaagcagtggcaaggtttgagaggatttttttattttttatttttttgagatggagtctcgctctgttgcccaggctggagggcagtgatgcgatctcagctcactacaacctctgcctcccaggttcaagcgattctgcctcagcctcctgagtagctgggactccaggtgcgtgccactatgcccagctaatttttgtagttttagtagagatggggtttcactatgttggcgaggctggtctcgaactcctgacctcgtgatctgcctgcctcggcctcccaaagtgctgggattacaggcttgagccatcacgctcggcgatttgagataattgactccaattctgaaagaagtttaacagtgggcaaaatgctatgaagcagcattacatgctacagagaaattgtgaaaggaagagtcaacctatggtgcaaacttcattgttgtctattttaaggaattgttacagccatccccaccttcagcaaccatcaccttgatcagttagcagccatcaaccctgaggtgagaccctcctccagcaaaaaagattacaacttgctgaagactcaggtgattgccagcattttttttgcaataaagtatttttaaattaagatatgtacattgttttgttaaatataatgctattgcacgctttatagtatgaacataactttttttttttttttgagatgcagttcactcttgttgcccaggctggagtgcaatggcacgatctcggctcactgcaaccttcgcctcccaggttcaagcgatctcctgtctcagcctcccgagtagttgggattacaggcgcatgccaccacgcctggctaatttttgtatttttagtagagacagggtttcatcatattggtcaggctggtctcgaactcctgacctcaggtgatccgcctgccttggcttcctaaagtgctgggattacaggcgtgagccaccgctcccggcgaacataacttttatatttactgggaaaccaaacaattcatgtgactcacttaattttgatattccctttaagtgtcagtggtctggaaccaaacccacaatgtctctgaagtatctctatgtatttctacttagcttgttaaacagcaaacaagatgagaatttagaattttaattcccaggaccattttcttttaaatataggtccatatccataatatatattccataatataaagataatgaagaaagatattgttggaattcttctagtctgttttaggcttatggatagataaaaaggtgcaatattagttttcttctctcggaaaaaaaccagtattttccagaggatttcatggttctagaagtactacttctaaagcctgcttctctctgcagagctgcgaatgtcttttcagataagaaattctgcattccatttatcttcaggatgtatcctttgataagatttcaacagattaatgagcaactgaactgccatattttgaagtgggagaacagtttgcctgagtcaggtatccatccctttaggttctcgattggcccttggcccacggtgagtgagctctctttgcttggtgcatcatcgctccacctagttcaagttctggcggcttcctgattttgattctcttgggaaatgaggcctgctttagcctgaggctggctcaggaaggcaacctttcacctacttaaggaaaagttcacaggcaaactaaacaatatgttgggttaaaaaaagagaccaatcctactagtactgggtgagtgaaaatcttctctcttacagtacatgtagttctactacctgcactggatgctttctttcttatccttgtttagtgtctaaaacgagaaacaatggcaaactccttaaaatacagaaccactgtggattcctaagaacgttcaaaaacaataatttggagtaaactttattttttgaaaagaaatagcaaatttgcatggtgagtgcatttagaggaaaacgggttatatgctaggtcaagtgaggccaaaacaagagaaatgataatggataagctttgagtttttgaggctcttcttgccccaggcagttccaaaagccattttatttggcaggatttgacagcaatttctgcaagaacgggataactaatccagttaaaaacgaaaaagaatatgcatactatttcataatttatattgaaatttatacattacagcaataattgtgcgactgtaatttttttttttttttttttggtggaggggtgttttttcctggagggacggagctcctgcagaccctattgggctagccgctcctcccacgtcgctgccgcagatccccgctcccctcccccacccgcggtccgtccctcctggtcgaccccgttcccgcccccgccccgcgcagactgcagccaggtccggtccgcggcggctccgcggaatgacccgtagtaacctcgccccgccccgggccgccagcgccgcgctccccggcccgaattcgataggcccagccccgcacgcgccaccgctcgcgggccaatgggtggcagcctctctgcataggcaacgagtgccggccgggggtgagcgtcccaggcggttccgctcaacagacgctgctgtggctgcgccgggctgcgacactgcagttgtctacgcggccggggccgggacgaggaggcgttggacggggtcgcatacgttcgtcccctcgcattgcggccccgacagctgcgccaggatccccgggcggcggcgcggggcgtgaacgctctggggctcagccaggcctgcgcgggcccgaggccggaggaacccggactccggcgtagcggtgagtgcggcgccggttgtgggagcggcgggagccggttggcggcgcggcctccgcgtgcggttcggctgggcccgaggggctccccagcctcggggcctgggaccctgtcgtcggcgccgcacctgaccgctgggtgtgcgcgcgggcggcccgcggcaccaggagcagcggcgagcagggtgggaggcggcccgctggggtccgggaagcggctgacgtggggcctcggccctgagcccacgcgagccgggagctgcagcgcgaacggcgtggggcggcgctgaccaggcagggaggatgcactgcgtgcctcccggcgctgtggggcggggtggggaggccacccccttgaattaagagggctctgccgcggccccagcagtgcggtgtccgtggaaggagactcagccctgcgatttcggaaaacccttgtttggcggggcgggaggggctgttgctgcgtggggtgagaagaaactaggtgcgtgaggtgggtcgaccttggtgattggttctgggcactatcgtggtggtgggactgggattaagactgtcgtttggggtttgagagttgcagctttgcttttccccaagtgcgttttaatcatatactgttgataggttgggtaactcggggactgcttactaccagcagtcctgtggggtaggtgttatcaggctcgtttcacagatgaggagcccgaggcacaggttttcaaatggttttcgcaggaagtctgatactagaaagtgtgctctaagctgctgtataaaagatccctcgaaaatgaaaaggctggaggaatgt

SEQ ID NO: 8536 - DNA, 6000 bp, Homo sapiens
ggtgatatctaagcaggacctgctgatagccacatcctccacagcatagctggtgttacagggagggcctggggaccttactaaggacctgtcagatatccagccctgttttatttctagtgataggaatgctaaaaagtatgtgtccagggagggtgactcagggcattagaagggatgatccactgctcgagttcccagacagaacttttcagacagaatttctgggaaaagcaaaaccagtggtgggcactgaggatttcattttgcaatattctgccagacccaaagcctggtctgctcaggagggggacagcccagtggattatgggagatttctcaggatcctgagacaattaatgatgctacttttgacatgcctgagggtggctaaaactgaaacacagagcaattatgcaacccagccagtcacgtagcatcagcaaggctgagctgggtcagatttctggactccagacttacgtttaatccgatgagattcacagccatgctgttatcccagcatagactttgtttagtcacagaagctgttaacataatttcagagatgtgtggccagggactcctgggtcatctggtaaaaatgacgttaccaggaaatgaaagtactcaaagctctagagaaagtgtgtgtcaggatcaaataggaaaaaacaaacaaacaaacaaacaaaaaaacccacattaaaacaagaagaccagaacaggcttatgttagtctgttctcacatcgctaataaagacatacctgagactgggtaattcataaaggaaagaggtttcactgactcacagttctgtattgctgggaaggcctcaggaaacttacagtcatggcggaaggcaaaggagaagcaggtaccttctttacagggtggcaggatggagtgcgtgcaagcaaaggaaatgccagacgcttataaaaccatcaggtctcgtgagactcagtcactatcatgagagcagcatgggggaaacagcccccatgattcaattacctccacctggtcccacctttgacacgtgaggattacaattcgaggtgagatttgggtggggacacagagccaaaccatatcaggctgtatatgtaggcagagaaactactgtactatggacaacataggtatacggtaagagtattactgcttcactgataacttctagaacatgctgaggttggtgcagcctccagtacttaaaataatatgaattcagaaaaagacaacttgtagttccacgtgtgtatttatgtgtgagtatctagttatgtcagaattcacattttttttaaaaaaaaagttttatgaagactcaaaagaagttggaaaaatgtccatctttcacttcctactctttctcagtttctttttgttttccattcagtgagacaaaaggtagtggaaaaagaatgggttttggagttgcatagatctggggtcaagtactgactgtactgctagtgatttgacctggagcaactttgcctctttgactctttgactttcagtttccttatctatgaaatggttgtaataatacctgacctcacaggacttatgtgtacttggtatatgatagacactaagctagatttgaactgcagtgtatcttagactcatttaaaatacaagtttaaaatggatttatcaaaacagaataatatcgatgcaaagatagacagatagatcaaaggaacagaatgaagagttaagaaatagacctgcttatataaggttaattgattttcaacaaagtttccaagataattttaaataggaaaaggagtcttttcaacaaatgatgctggagcaattggacatccataagcaaaacaaaaacaaacaacccctccccaaaatccttgacctatatcttacattttagactaaaattaacttgaaatgtatcatagacctaaatgtaaggctgaaaccataaaacttctagaagcaaaacaggagaaaatcctcatgactgggttaagcaaatatttctttgataggattcaaacagcacaaccaaaaacatttaaaataaattggacttcatcagaattagatatgtttgctcctgaaaagacactgttcaggaaatggaaatgctagccgaaattgatttatttctttaacattgctgtctcctaaaactgaggcccggggtagatataattaataattcttgtgcagtcccatcctctcccgacagagtgcactttctagatgtaccctctctccctcattctttatgccattattcagtgccatcattctcgcaatccctgtcatgagtgagggctgggaagaagattgagctatgcattttgaagttggaattcccttctcttaaattccattcctgggagtgacagacaggggaaggagcagtgataaaaagtctggagttaaaagtctggagatgggcacacacatgacaggaggcaacctgaagcccttgggagcaacagcgtactcctaacaatgacaactaaacacaggcactgagcatgtgcatttggccagacatggtgctttctttgcatcatttcattgaactattttattctgttctgttctattctattctattctattctattctattctatttatttagagatctcgctctgtcacccaggctggagtgtagtggcatgttcagacctcattgcagccttgaactcctggtctcgagtgatcctcccaccccagcctcccaagtagctgggactacaggcactcgccaccaggcctagttaatttttgtatttttttgtagagatggggtctcactgtgttgcccacgctggtctcaaacacctgggttcaagtgattcatccacctcagcctcttcaagcattgggattactgaactaagacactgcagttggcctcgtttaactctagtagaaatatccatgcaggaagtatgtgggaatcggggcagcagggactccaagcaggcaccccagaatttcttctgggctgttccttccctgactcctgcaattagtcctgcttttcctttggctctgacttgcttcgtcctttggaattcattctcgatgtttccccacactcatctcttttcttggttgtattcccttgggactgttggctcaggtttggggatttattatgtttaaaacttcagcctctgtttggcttcctggcaccaggctttgtacttcctgctccttgaatctggtaactcctatccccacctcctttctgcctactcaaagcttccagtctttggtgttggacaatccctggatgatgaccaatctcgtatgtcctaaggtatacaataaaaaataccagggtcaacaatcaacaggcatctctttcttgggcccatcttgttctagtgtcccagacattccagtgtaggcttagatatagatggaagtgttctagtgtttatgatggacacctgttgaaaagaccaagtctaccatggctgaggtagctatggagggttttacgtattaacacaatggtgagggtatctttactggtgtgagcacagttccactgtatggatgatcgtgatgctggagtggtcgatggttggtacctccagtgccagctggggatttatggatgaacacaggtgagtagtcaagtgggaaaaatggcagcattcagttcatcttcctattcttcctccaggtgtcttcttagaatcaggatcaggtgcaaacccaggggggttcctgtagcagcagtgaaaattccagtgcctaagctatatatgttcaagcaggtcaggtggatgtcgcatgcgtcagtttgactacagcagaaccatgagagatgtttcctttagagttggcccacaagacagtctggctgcaatccacaggccacagacaactggagggagtggatctctcccagtttccttccacttagcatgaaagcctcagaataagcagcccagggagcagagagactgacattaaagcctgcaattcctcttccaattttgatcacagcagccatttaaacacagggtctaccgaggtttaaaaaacttgaactgtgcttagttgcactctgaaatagtcctgctcctcccctgacctacgagagacagcaaagagacgtgtcaatagcctccgcatgaggcttcagaggagcagctgtgtatggcaggacggaacaaaacctgcccatagtatcttttacgacaacatgtttccacttaatgcagaccactgaaaagaatgtgggagcttttaaaaaaaaattattataaacataggtttgtgaccttgatgtggaaggcagctagaatctctgcttttagagggctaagcaacaccaggcagccttcaatcttagaagggttaagctgaaagggtctcaaaaggtcacgtggtttatataatcctacctgcagaagacccccccccccgccaggcacaacgattttacagacgaggaatgtgaggtgcggagaggttaaggaaggatttatcttatttgcataaggagtggaagaactgaaaccgaagccccagttccttgactgtaaatcccgcacttgcttccaactgtctttcatccagattatgggattcagctgcctctgaaaacctgtagcccaataatggttattccccaggagccgcgcgaagcatgagctaattttcagtgagcgcggactttggggtaacggttccagcacagcacatccctttctcctcttttcactcatcgtcaccgctacctgaaaaccctggccgggtgctggggcttgaggagcagttcccacttcccagtctttttcacttttcacagctgcaaagttcagggagttgaactgcagtgctttcagttcactgctcactctgccacgatcaatctctgttgtaaattttcctcccagagcacgtgacgatgcacttcttgactatatatcccaactgcagcagcggagttgtcagagcgcagagccggacagagcagaagaaccctcttggactggacgatttgggaattcaaaacttgggacaaactgtcagccttggtaagtcagcaaggctacactttgctttcagaaacatttgaaagagggacatttttgccaattaatagatgaatttttttcctttattttcttcctgcttttctttgttctaaggaaacattgttttgaatttaaaatagtttggttttggaaacacaatgtaaactttgtttctgctcagttaaaatacgtttcccagttttaaagatactatttactgtatgctcctgtcttacattgattttttttttaatcaaagtaatactgctcactacaaacaggacaaatgtgtacactaaaaaaaaaaaaaaaagtccttcttacttttcccagtgaaccttcccgggcttctctcccgtgcactccaagccctcatagctcactcttgtcagctgtttggcgaaccctcttatgctatttctttcatgcacttttaagcttttttggtattgcagttccacaaacctcgtgctcccccacctccctgtgcccaggacctgggggagagttctaacctgcggctttttccccagcccctgctgtggaggcagcctcaatgctgaaaatggagcctctgaacagcacgcaccccggcaccgccgcctccagcagccccctggagtcccgtgcggccggcggcggcagcggcaatggcaacgagtacttctacattctggttgtcatgtccttctacggcattttcttgatcggaatcatgctgggctacatgaaatccaagaggcgggagaagaagtccagcctcctgctgctgtacaaagacgaggagcggctctggggggaggccatgaagccgctgcctgtggtgtcgggcctgaggtcggtgcaggtgcccctgatgctgaacatgctgcaggagagcgtggcgcccgcgctgtcctgcaccctctgttccatggaaggggacagcgtgagctccgagt

SEQ ID NO: 8537 - DNA, 6000 bp, Homo sapiens
aacccaaatgtccatgtcaggagaatggataaacaagttgtagtgtatttaaaaaatggaatattactcagcaagtaaaaagaacaaactattgtggatgaacctcataaacatattgagtgaaactagacacaaaagaatacatgttgtacagtatatgaaattcaagaacatggccaggcatggtggctaacacctgtaatcccagcactttgggaggccaaggtgggtggatcacctggggtcaggagttcaagaccagcctgaccaacatggtgaaaccctgtctctactaaaaacctcctttaaaaaaatgagccaggtgtagtggcacacacctgtagtctcagctactcgggagactgaggcaggagaattgcttgaacccaggaggcagaggttgcagtgagccaagatggtgccactgcactccagcctgggtgacagaacaagactctgtctcaaaaaaaaaaaacaaaaaaagaaagaaagaaagaaaaagaaaaagaaaataaaataaattaaagaacagataaaacttaatctatagtgatggaaaccagaacagtggttgccagtggtggtggggatttactggaaaagaatgggaagaaattttctggaattatggaaatgttctgtatcttgattggtttgttggatacatgaatatatatctttgtaaaatagtttttcattttacctaaaatttttttttaattaccttcaacacttagctttcagctagctcctcagtggaaaagaggggcctctgaagggggcaggtggaggtaggggaggtggagctgaagatagctgctgctcttgtcagaagaacaggatctcaaactcacccactcccttactcagagcatgtgattgatggagcacacttctccttgagaagaactctgaggacaatgggcacacccttgtctgagcccgttacatttccagaaagctaatctactgaccctctatggatttgttacaaccataagtcttacataaccagtgctttaaattgtaataaactagatatctttgcaaacaacattcaacttctaaattttgagaaacaggcaaatacatgtaaaagttctcatttctgattttattttaactagagacggggatctcgctatgttgcccaggttgatcttgaactcctgggctcaagcaatccgcccaccttggcctcccaaagtgctaggattacaggcaggagccaccgtgcacagcctgagattttattttcaaagtgaactgttgcaggattgattccaacagcccttcccactggagccaatcacaccagagttgatgagggaagggaagagttagtggagaggcctcagccaagaggctcaaaatcaacgcaaggaagatgaggactgaaaagcagcttggagatttcagccaggtggaggtggaggaatagaagccagattgaggtaggatgagtgtagggagtgataaggaaatggagactgaattttcaagaggtttggctaagaagaagaaaagataaacagggtatcaagtggaggaggacgtggggtcaaagaaggggtttgtttttgttttaaggctaatacgagcatgtttcagagctgacaggaagagctgaaaggttaggaggcgggggctgatggatgtctcaggtgtctgataggaggggaggggtggaatcctcatctagagagtggctggagagaaaagacagacgcctcttccgcggcgagtggcaggaggagcagtgggcagaagggcagctgtggatgggggcggatgtgctggcaggcaggagggcgttcttatgttgatagacataagccacctaaagccatggcttccagatcctcagcagctgagctgctgagaggtgtgcagcagtctggagagggcaggatgtggccgttgagagtgtggacagagtgacagagcagcagttcccaaacccgagtgtgcatcagaatcactaagggcttggtgggcacagaacacaccctgagtttcggaatagacatagaaagggtttgccttcctaacaagttcccaggtgctgctggggctgctggccgaggtccttgcttggagaatgactggttaaagaagccacagctgtcccaccctgcagctccaaggggaccgctttgcatggctgccaccatgcccctccaagaggaggtagcatgctggtcccaaggggcatgatggtatcactttcaccaacagaacttagcagtccctgagcagaacctggaaccagaaagggggacaggagaagctctgccacttgggtaagatgcaagaacagaacaaagaggattcaggtgctggcaggaatggctgttggactgagctgagggctcctggcccagagtcactctcctcactcccagtgcggactctcatttccctgtcacttgtccacaccctgtgtctttccagttcccacccaaatctcctgtcttgcatggagcctgggctgcaccacgaccgcattcaccctgctgtccttccctgagtccacaaaactcagtatgcgacatggacctcccgcagcctcctggctccccttggattattgactggctatactgtactccatcaaatataagatgctatcacttgtgaaagacattacttaatcactgccaattataattgtaaaagatatcttgattctcaagatgttaaaatgtgaagaaatgtgtttcttagaatccatggaatatggattcttgagcatctgaacaggtgatctgcagagcatggtgccccccaagacccattcaggggggtctccaaggtcaaaactattttttgcaacaatataagtcattatttgcccttttcactctcattctctcattagcgtgcagtggggttttccagagactacatgtgtgatgacatcgctttgatgcccaatggaatatatgtattcttgtgtcttaaaactttctgagttttagtttctaatatggtaaatgttgatagacataagccacctaaacaaaagctcttggggtcctgaaaccaaaaaatttaggaatcactgcactaggttgtacgcccagcacttggccggcattgagtccatggtcaagcgtaaggagaggcccgagggggatgtgcacagtgctgaaggtgcacaggaaagggacttatcccagccggtctgggaaggccttccaggggaagtggggtgctcgcctgccaatctcaggcatgtggatgcttcacccaggtggccctgtcttgctgaccagagatttgtgccaaaccagctctgcgaccctgggtttagtcatgctaccttctatcactattaacatgaggctaatgtgtaggtcacagaggctgtgatgaaaattaaataattgaatgcacgtgaaagaatgccactcatagaaggtttcacatgaccacatccttggtggctgggttgtgtcttgggcatctctgttttctgccacagagcttaacacaatgcttggcacacaggggtgcttggaaaacactgagtgaaggaatgcatgttgggggtgtggcctaagcaagacgtggagcttgccttctccagacaccaggtttcccatgggatctggagcaggtgatgagcggtagtccataacaccttcctctctggctctgtgccaaaccagattcctcctcgtctcctccaaaccatctgtcttcttccacctccccattccctccccccagttccccaggctggtggccttagcatcagttagactttcttctttccccacctgtctgtcctcaaggttgctaggttcatccaagatctgagccaagaggtccgggtctgggacgtgggcgctaagggcccaaggcagctgcaaaagacctgaaaggtgagaagagagatcagtggaggaccccggactgtcctcaagaagcggacggactcccctgccctccactggcagcccaacagcagaaccaaagcggaccactcagcacaacctgtgtgtgttgctgggcgctgtccctggcccagtctggaccaggagcaaagaggaaagattcagggcgttagtgccaagagcagccatcccagcaacagaagcccctgcttccccagtacccgtgatacttgggaggagcagagtcttgagtggaacccgagcctctgacacccgccctgggggtcttccctccactctcgccagggtcctcctggatgagtgagacaagggcagttcaggaggtcacccaataactgaggtcgcagcaacacgaaggagccagggagcaggggcggccttcccttctccactccaggcggctccagcgtgcaccccaggaccccccaggaaggttttgcaggaataaagaatgaaggcagaagcaagatggaggatgaaggaggcgtggatggcttcagaaggcaagacggaggcagcagtttggcgcctgtctcaaagcctcctccccgcgccaaggacaggtcggaggaggggggcgtggggacaggtagagcggaggctccagcgtttctaaaggggaagacctgaagtggggcaggagagacgggtgagttgtctggaagctgcatttgcctggcaaacactgggttaacaaagacttgcgttgcggggatgctggccttggacagggaatgcgaagggattatgctacggagaacggatccgagcgtgacggctgaatgaatgagtgagcgagtgagtgagtgagtgagtgagcgagcgagtgagtgactgtgcgagcgagcggcagaaggaactccgacccgccccaggtgcggagcggcgcgcccggcaggggtcactgcgggccccgcgggcgggaagggggcgcaggcgcggcgggcgccggggccctcccgcggggacggggcggggagggctgggggtggggttagagagagggacgcgagcgggatccaaacttccggtgcctgcagagctcggagcggcggaggcagagaccgaggctgcaccggcagaggctgcggggcggacgcgcgggccggcgcagccatggtgaagattagcttccagcccgccgtggctggcatcaagggcgacaaggctgacaaggcgtcggcgtcggcccctgcgccggcctcggccaccgagatcctgctgacgccggctagggtgagagggtctggggctcaggcggtggggcgggggacccaggctcacgacccaggcgcgccccgtcggccctggggactgcccgaggcgcgtcagggccccagagcccggggtggagcagggttgggaagtctcgaatggttgcttatcccagaatgaggagggggcttaagtcccgtactaaagcggcagccaaaagctgaagtccgaagagtgggaggcgtctggttctggtcttcaggtggagaagtgctcgaggtctcttccaaaagtgggggccccctcgccgccttatagggggagggggctggtccgaagaagttcgaggaatgttggtgggggggtacgcgtctggttccaatcaactgggaaagccgcgagtcgagtccccaggtgggggatgggaggagggttagacgtagtttttccaaagtagggcggtgggacctgattggctggggaattgggggtgggggggtctggtaccaacgaagagggtggggccgttgatttcctccgaaattgggggctgcgagggacagaggatgtgctgctggcctgcaccggaattgacagaccagaaagtgatgaaatggaaatcagccagaaccgacggcgctgcggcctctggacgtcgggggtccgaggccgggtgcccccttcccaccccacgccctgccgtctgggcctccctgctcccctctcttttctccattcccagcctctcgctgggctgtcccccgaccccacggggagggctcccaactgccccagtgcccttgcatcctgggtccccgggctctgtgcgcgttcccccacccctgtcatccccctcccctac

SEQ ID NO: 8538 - DNA, 6000 bp, Homo sapiens
cagcctcccaagtagctgggactacaggcatatgccaccatgcccagctaatttttacattttttggtagagacagtgtcttgccatgttgtccaggctggtctcaaagtcctgggttccagcaatcaacccacctcggcctcctataaagacgtgagccactgcaggaggctgaggcaggagaattgctgacatatccagtttcttagaaaaaaacatttaatagagacttacaaacagaagctatgtctgggtctcaggtggcagtgagacaagatggtagctttaccccccaagaccaagggccacaggggaggggtgacctcaaagggatgtgtaggacaattgaaatatgataacatcaaagttgttttgtcctaagggcaggatttatgggaagtaggtgctcccgcactagaaacacgacatgaatgggaaatctcagaggccctccgagaactggcattcatcaacctggtagatcaggccccaagatggaattgccttgacacccacaccacctgaaataatctggagtactgttggcagctgatgtgagactttggttcttgtcttcttagcttaaaataatttaaacaagagacacaacagcaaaggagatgcagcatacaataatttttgcaaaagaaaaagaacatcttgaaagtgaagtgcagaataggcagagagaagaattcagggcaggctgctcataaagatgagacagcaaaagttggcactagggaggctccctttatggaaatcttacatgattattcatgaggggttgggaagaggtgttgctagtaagcatgttctggccaaaagctattaaaagaaaaggagtgtcaaaaaatttaggccgtgctgggggtggaggctcacacctgtaatcacagcactttgggaggagaggcttaagcccaggacttccagaccagcctgggcaacatggtgaaaccccatctctaccaaaaatgcaaaaattaaatgggcaaggtggcacacacctgtagtccccactactcgggaggctgaggtggaagaatctcttgggcccaggaggttaaggctgcagtgagccgtgattgccccactgcactccatcctgggctacggagcaagactctgtctcaaaaaacaaagtcaatggttccctttggtggggaaggaagaagtggggtttgaatggggggcagggtacatatggggagatcctggctgtagtcaatttcttgatctgagtggtattactttggcgttcaattctgtaactcttctttaggccatatctttctgttttctgcagttttaatgtttgacatatctcaaaaggaaagaaagaaaaggaaggaacaagcttgccatttgatccagattagatgcaactgttccagctgcgttttccattttcatctcagccagtatttttcaaaatgtgacatgcacgtatttccaaagggcggtactgaaacaggataggtaatcaaggaagtgaccgtgttcttgggatgcagcaagcgtggtgaccgcacagtcaacacaataagcctcagcattcgaattgtaattgagctcattcaagcaaagctatcttcagtggggacttttctttctagagagcatgcgcattttgattttacctatcctcaaactgaccctttgctcattataatagtaaaaagcgcaccccgggtggagatttaagaagctaatgagacctgcgacatacgagccagcatgtacagctactcacgcctgtaatcccagcgctttgggaggccgaggtgggcagatcacttgaggtcaggagttcgagaccagcctggccgacattgtgaaaacccatctccgctaaaactacaaaaatcagccaggcgcagtggcttacgcctgtaatcccaacactgtggaaggccaaggcaggtggatagcctgaggtcaggagttcgagaccagcttggccaacatggtgaaaccccatctccgctaaaaatacaaaatgagtcaggtgtggtagcaggtgcctgtaatcccagctactcgggaggctgaggtgggagaatcccttgaacctgggaggcggagcagtgagcagagatctcaccagtgcactccaacctgggcgacagagcgagattccgtctctaaaacaagtaaataaacaaaaataaaaaaataaaaatacaaaaactagctgggcgtgctggcgggcgcctgtaatcccagctactcaagaggctgaggcaggagaatcgcttgaacctgggaggtggaggttgcagtgagctgagattgcgccactgcactccagcctgggggacagagtgggactccatctcaaaaaaataaaaataaataaataaattaattaattaattaataaaataaaatagaaacagggtcttgctatgttgctcactatgtggtgaattttttcaggtgctgagcaagactggagaccagacacacaccaatgtcacttgcagtaaacaaaggatatttgtccacattcaaagtctatggtgacaccctggccacatggggatgcttggccaccctgcctcctaccttcatgccagagtcgcctgtcataatgtctggttacagcccttcctctgaggtccagggatttcaaagcagaagcagcaggtcttccccggctggaggaagagccaaagcctccattcctgggattcttggttgctgttacctggggcaaggggaggcccaggctgtggcgtgtattctcagaggattggtcgtcttggtccttctgtttcctgggaaggaagggctggtcctgtagggccccatctagatcccttagcaccctctaccacctgatgcccttggggataccaagctctgtgcagtccagaccatgttccagctcagtgcccaccttacaggcatgcgccaccatgcctggctaattttgtattttttagtagagatggggattatccatgttggtaaggctggtcttgaactcccgacctcaggtgatccacctgtcttggcctcccaaagtggccgggcagggctgaattcgccccctcaccagctactgccaaccacggatgaatggcttctgcctgcctcctgccctccagatcttaccagggcatttcactgggaaatatggcaacagcccttgccactcaggggacagcatggcaggggctgggaacgaatgttgttgccaaacgacaagacccagctgggcccagtggctcacacttgtgatcccagtggtctgagaggctgaggcaggaggatcacttgaagccaggagtttgagagcagcctgggcaacacagtgagactctacaaaacaaaacaaaaaaaattagccaggcatggtggctggtgccaataagcccagctactggggaggctgaggctaaggctgaggcagtgagccatgatcatgccaccgcagtccagcctggtgacaaatgagaccctgcctcaaaaaaaaaaaaaaaaaaaaaagaggaaggtgagcgcagtggctcatgtctgtaaatccagacactttgggaggctgaggtggaggttcgagaccagcctgggcaacatagcaaaaccatgtctttacacaaaataaaaaatgagtcaggtgtggtggcacatgccattggtgccagctacgtgagaggctgaggtgggaagattgcttgagcctgggaggtccgaagctgcagggagccgtaactcaggcatcacactccaacctggctgacagaatgggaccctgtctccaaaaccaaaagattccagctcgaaaaataattgtggggtggcggcaaaagctcctgactggccttgactttagagtgaatcaatgaattaattaagggcctgcctgttagtgagtctcctctgaaatttagcccagaaatttcctaactcagcaagatgaagcaggaggtagaaggaactaagggggcaataagcaggaggaaggaatgtccccatgagggtgacatcttccctgagagccccaggacgaccagcaggaagccaggcggggggcaggcaggaggactccagaaagctcggcctgaggggaggcccgtgggggtggtggggagtggtgcggggaaggcagaggctgagcagcaggtgaggtcccctgggttttgggggccaagcctggggctcggggcgagcaagcatgagtggagaaggggctgctgtggttgggctggggtggactccccacctgcgtcgtccaaacattagtgtgagtgcacccacacaaacacatacacaatcacacacaacatgtgagcaatgggcaggactggtccggccccactcagtgctgtcaccattggccccacagctgcccacagccctagagctctgggcccagattcctgccagccccacctgtccaggccaaggtaagatgatggagcaagggggtgccagggcagcaaagccccccacgtgcccctttcccacagggcccaggctcctggcatcaggaggctgaacccaggccctggcccagactgtgtgcttccagcctcccctcctctcgacaccagaacacagcctggccccagcttctgggaaatatagaaaaaaatgggtgaatgatccagtgacagggtgtcttgttccacacaagacacagtgagcaggggttgggggaggggctcctggctgcgggaggcacaccacactcacccaaatggcatctgtactcaataccgcacccttccctgggggacacctggtcccaacctgagctgcctttctcaggaccccagccccagcccggcccagcccagccacaccctgccactcccttcagccagtgtggcttcaggtcaagaggctgggcagggtcaaggtggcaacgaggggagaagccgggacacagttctccctgatttaaacccgggcagcctggagtgcagctcatactccatgcccagaattcctgcctcgccactgtcctgctgccctccagacatgctggggccctgcatgctgctgctgctgctgctgctgggcctgaggctacagctctccctgggcatcatcccaggtaatgaggctccccgagctgcccctacacaacacacacacagggcaccccccagcccaggctgacctgatttttgctctccccctggccagttgaggaggagaacccggacttctggaaccgcgaggcagccgaggccctgggtgccgccaagaagctgcagcctgcacagacagccgccaagaacctcatcatcttcctgggcgatggtgagtgagccaggccttccagccctgcagccctcacagccccggcgcccggaccctcagtggttccaggagagccctggggcccaagcctcacacatttctgttccttcagggatgggggtgtctacggtgacagctgccaggatcctaaaagggcagaagaaggacaaactggggcctgagatacccctggccatggaccgcttcccatatgtggctctgtccaaggtaagtgctgggctaccttagagtcctccaagcacagaaggggaatcctggctatggagtgtggtaggagggagggaccctaaacagctggggctccagtaaggagttagaggcagttggaatcccagaggacagagatcagggtctgggtctccgtgtctgccccagagaagagctcagagtgtctctgtccccagacatacaatgtagacaaacatgtgccagacagtggagccacagccacggcctacctgtgcggggtcaagggcaacttccagaccattggcttgagtgcagccgcccgctttaaccagtgcaacacgacacgcggcaacgaggtcatctccgtgatgaatcgggccaagaaagcaggtgagctggggcccgctgctgggtcacggccaggtcacagacgttggtcacatatactgacctctgacacccttagggaagtcagtgggagtggtaaccaccacacgagtgcagcacgcctcg

SEQ ID NO: 8539 - DNA, 6000 bp, Homo sapiens
ccaccatgcccggctaattttttttgtagttttagtaaacacagggtttcactgtgttagccaggatggtctcgatctcctgaccttgtgatccgcctgcctcagcctcccaaagtgctgagattacaggcgtgagccaccgcacccggcctaaataatttattttacttaaaaaacagttttgctcaacctcgttcatgagctgtgttgtgttcttaatgtttatcaatagtacattgctcagttctggaaagcacttagccagatatttaaaaagcaacagaaattgaagggcaaaatagaagatggaacaaaaactctccaatagtgtattcaacttaacaggttttcaactcaccagggtgctattggaatacaattgtccccctggttcctgtcatacaagatcaaagttaaaccactaaacacaattgcagcatccttgacttcatacactttcctttccacacatccatatagacgcccgaagcacccttcagggcagaattgtcttttgtccctcactctcaggggacaaccattcactagggcccacctgccagccacccctgccactgtcactactgctggtattagggggcaggggtgaaggaggtggccagatcagggctcggggtgcctggctgagtgccccctccactgagcccattcctgtgcctgcagcttcccacaggctgaggccccagtgtcctgcttgtgctgctgagggggctccatggcctgttgagaggcctccccaggaagcccatagggaggaggttggggtgtctcctgccttgggggtgggacagtcccttcttgttcccaccccaggtacctgacccaagttctcctgtgcatgaggaatgcctggatgtccctccttggtaggtgggatgggccagagggaggtcctgcctacacagcccttaattaggaatttagagatttgtgctctaggaaggagctgcttccgctaccatttggccaactgtgtgctgtgcagacccgcagcttggaaacaggtttcaaggatgttcaggacttgcctcgtgttcataaaggtcaggggtcgcctcttgccccctgctcccctgctaactctgcagcaggccctggactaattaagtccccgcaacagccccgagacccaggctctgtgaaagttgtcagaatcaaaatggagccacttctgtccaaccctaagagcaacaacaaaatcatgcggccgggaggttctgaaggagggccctcccgcacacctgcctatgatcagagcccttccgaagcctctgggaagggcacagatgcctgcaacaagacctttttttattttttattttttgccgggactttgcagctcactatgtgagtcacaaggacggctagccggctgcacaagaacacttgcctaataacgctgtgtccactcataaacttatgccggttcctgggataagcccctggaatcagtgttctcttcctttcaaaacagctgtgtaggtggatgtggtggtgagtgcctgtagtcccagctactcaggaggctgaggcaggagaacccgggaggcagaggttgcagtgagctgagactgtgccactgcactccagcctgggcaacagagcaactcaagaaaaaaaaaaaaaaaaagacaaaaaccaaaaaccgaccatgcactgctcctttcgcctttcaaagcaccccttgcctcccctcctccgatgcgcccctagtttactaaggccggggctctgcatgcaatgctgctgcttattcccagttaaactccatagttttggagagcctccctctgtttcttaaggttgacaggactatcattcttttcgttcatagatgagggaattaaggcttggagaggttccgttctgaaggacactcagtaagtggtggacagagaatttcagctcagactcaaaggctatttaatttacttcttttaaatccatgcttcttagcactcagctagtcacgtatcaccttgacaactttttgccgtagccacattactgcctgtggtatgatttactgaatatttttctctacataagctcagatttgccttaagtctattagaaaaggaaacttgtaactgaaaaatggaagaccaccatctcttgccataaacagaagcaactgtgtattccacacacaccaaaagcagtgttcttacagcctccttagatgttttgagtctaaagcatgctttatcttgttaaaggggagatggcaaagttagggtggcagtgaaactaaccaaaggtggggaaactatgcaaagtccacaaggcatttcttatttttttctttttctgagatgttgtctcactctgtcacccaggttggacacatatctggttgtcaaggattagggacaggggaagaggtagaggaaagaggtggcctggttataaaagtaccctgtggggttggagctcttcagcatctcaactatggtgctgttacacaaacctacttaggtgataaattgtatacacactcccacacacatgcacacgaatacaggtaacactggggaaatctgaataataactgtggattatgccactgggggagactaagcaaagtgcacagacatctcttgtactttcttctttttttttttttgtttagacagggtcttgttctgtcacccaggctagagtgcaatgatatggtcttgactcactgcaacctccacctcccgggctcaagtgatactcccacctcagcttcccaagtaggtggagagataatttcagctcacacccaaaggctatttaatttatttcctgtggagggaccacaggagcaggccatttcgctccgctaatttttgtattttttgtagagatgaggtttttccatgttgcccaggctggtctcaaactcctgcgctcaagtgaatctcccgcctcagcctcctaaagtgctaggattgcaggggtgagccactacgtagggcctcttgtattatttcccttttttttttttttgagacagagtctcactctgccacccaggctggagtgcagtggcatgatctcagctcactgcaacctccacctcccaggttcaagtgattcttctgcctcagcctcccaagtagctgggactacaggtgcatgccaccacacccagctaattttttgtatttttagtagagatggggtttcactgtgttagccaggatggccttgatctcctgacctcatgatccacccacctcggcctcccaaagtgctgggattacaggcatgagccaccgcacccagcttgtattatttcttacaactacttgtgaatctatagttctgtcaaaaattccaacttaaacatgaaactcagggtggctataaagcctcctgactcaccttgactttggaatcaatcaatcaattaattgaggagacccattagtgagtctcctctgactttcagccaagaatgttcctaactcagcaagatgaagcaggaggtagaggaaactaagggggcaacaagcagggggcaagaaggacctatgagagcgacatcttccctgagagccccaggacgaccaccgggaagccaggagggcgcaggcaggaggacccgggaaagctcggcctgagggaggccctaggcgtggtggggagtggggcagggcaggcagaggctgggcagcaggtgaggtcccctgggttctgagggccaagcctggggtttgaggtaaacaggctcgagtggagaaggggctgctgtggttgggctggggtgggtggagctggaggagccttttcttcttgaaccagtttttgaattgtgctacaaaacacggtacatcaagtttacctccttcaccattttcaagtgtacagggcggcagtgttgagtacacgcacagtgttgtgcagctgatctccagaacattctcatcctgcaaccttgaagctctgtccctattaaactccaactctaaccctaaccccaaccctaacccattgcctcctccctcagcctcaggcaacctccattccacttctgtctctatgtatttgactcccctcgggacctcagagaagtgtgttcgtgcgtatttgttcttttgcactggtatatttcactgagcataatgtcctaaggttcatccatgttgtagcaggtgtcagggtcgcctttgttttcaaggctgcgtgatactccattgtatgtgtgcaccctgtttggtttctccatttctcttttgctggacacttgggtagcttccagctcttggctgctgtggataatgctgctgggaacatgggtgtgcagttatctgttcgagtccctagttcgcattcctttggctacacactcagagtgggatgtctggactgaagcaatacttttgaactcagcctgaggttaccaaactctctgaactccttatcagaggctacacttctgggtgttccccggggcccatggaaaacagactcaccccaggctccatctacctgtgcaagggaacaggggtcaacctcaagtgcacaggctgctctggaagacccagcccaggtctggctgacccagagcactggccccttcccagcctgcgtcctcaggacataggtgtgggcacccatatacaccaagtgggttctagggcagccaggccacccagtgtgcctcctttcacactcctctggggctcgtgacattacgagccctaacccgggccctggcctaggctgtgtgtttccagtctcacctctcttcacaccttgaatgaggtgaatgaaggagtggcaacgcgtctcccacaagacactgtgagccacacccagtcccttcccttcagcaagcttggcttcaggtcacaggactgggcggggtcaagatggacaccaggggtgtggggagggacgtggagcatttacagccaggggcaaagtcctcccctgatttaaacccaggcagcctgcgctgcagccggttcctggtgtccccacttcgcctccctcctgctgcccccaagacatgcaggggccctgggtgctgctgctgctgggcctgaggctacagctctccctgggcgtcatcccaggtaatgaggctccccaagctgttccacacacagggcaccccctcagccaggctgacctgatctctactctccccctggccagctgaggaggagaacccggccttctggaaccgccaggcagctgaggccctggatgctgccaagaagctgcagcccatccagaaggtcgccaagaacctcatcctcttcctgggcgatggtgagtgagcaaggcctgtccagccccgtagtcctcacagccccggcacccgggaccttcagtggttccaggacaaccctggggcccaggactcacacatttctgctccttcagggttgggggtgcccacggtgacagccaccaggatcctaaaggggcagaagaatggcaaactggggcctgagacgcccctggccatggaccgcttcccatacctggctctgtccaaggtaagggctgggccacctcagagtcctccaagcagaggagagggatcaaggatatggagtgtggcaggagggagggagccaggacagctggggcctaagttaggagctgggagcagttaggatcccagaggaccagaaccaggtccttggttggggtctgggtgtccgccccgaagtagagctcagggtgtctccgttcgcagacatacaatgtggacagacaggtgccagacagcgcagccacagccacggcctacctgtgcggggtcaaggccaacttccagaccatcggcttgagtgcagccgcccgctttaaccagtgcaacacgacacgcggcaatgaggtcatctccgtgatgaaccgggccaagcaagcaggtgagctggggcccgctgtggggtcaggaccaggcccaagatctcggtcaccgatcctgacctctgtcaccctcaggaaagtcagtaggagtggtgaccacca

SEQ ID NO: 8540 - DNA, 6000 bp, Homo sapiens
ttagctgggcatggtggcagatgcctgtaatcccggctactcgggaggctgaggcatgagaattgcttgaacccaggagacgaaggttgcagtgagccaagatgatgccactgcactccagcctgggtgacagagtgagaccttatctcaaaaaataaaaataaataaataaataaataaataaggtttggaaggctcagtggtgtgtctggaaacctgtgttagttggtttcttgactatcctttggtttactctagcagctatcgggtttatacagcagttaacacagtaacacagttaacttagtttattttcactttgagtaatataattttgggaagagctgaaaaggagtggaaataaagaaagactaagataattttttaaaagaataataggaaatgagattttaagaataaaagctagagaaaaaccaacagaagataattgaatccctttggtactgccatcaggccggctctttgtactttatgttccttgcacccataactgatacgtgttccaatctcccttcctagagtgaattctttgaagtcaggatgcccatccctatgcccaacccacactggaattgcactgtttttttaacctgctgagtggaaggtaaaggaaatcaggaagacccaaagggcagagaaaagagtaaataggacaatagtttgaaggttggcccttgaattcctctgaattggagcataactagaggatctcacagatgagatgtgtaggcatcaatgatggaggtgagaatctcttggaagtttttagcagtggaaatgctgccacagaggtgctgttatgttaaagctggtggaactttggttcagtgaaactagactttccacaaaaaaagtcctttgataagtgacgccttttctacttcctgtgagcaaattcgtgaggcttaacatattgctacaagaatcttgggatattttacatttatcttacatccattataggcagtcagactccatttcacagatgctgcttcccagcaaagcatgctgaatcctttagacaatcactatttaccagaacaaatataaaaactctcaagatctgttatttgtcaccagagtattcagacaacctatttcctcctccttcctattactcatcccctgtattactcaccctccagccagtcattcccctcagggcctgtgaacacacctgaagcctccccatcactgactttgctcttcaccaggttgccctccctattggctaatttaggagtgagtcacatattacttaaaaattattctgtttcatgtattctagtccagtcatactgcagtgacagccagaacagagactggatgatggagtgcagtggttaaaggcacagatgctagaattaaattgcctgtatttgaacccaggtcttgccactttactagccaggtatcctcatgcaagttacttaacctccctgtgcctcagattcctcgtctgtaaataaggatgaagatgctactgagcaggattattgtgaggaggaaatgagttataatatgtgaaatactactcagaagaatgcacagcccgtagcactgtagaagtgttcctgcttatttgtgatctcccagagtctaccatgctttgacataagtggtttcatcaataaatatgtgtttatttctataacttttttttttttttgagacagagtctcactctgtcgcccaggctggagtacaatggcacaatctcggctcactgcaacctccacctcccgggttcaagcgattctcctgcctcagcctcccaagtagctgagattacaggcgcctgacaccacgtccagctaattttttgtatttttagtagagatggggttttgccatgttagacaggccggtcatgaactcctgacctcaggtgatccacctgcctcagcctcccaaagtgctgggattacaggtgtgagccaccgcgcccggcccaactttttcatgcatatgtagtatatatatatataatgtctacctattagaaaatgcatataaaatacacatataagaaaaaaacccagcaacaccactgcctacagataatactattatcagtattttcacatattccattcattaattaaataacatttactgagcacctaatacataaagggcttcatgctcttgctggagatataatgatgtgcaaaaacagacacagctcttgtctcatggagtttacagtctactgggggagacagacctttatcaagtaatgatacaaatacatgtgaacctataactgggatcaatgctataaaggagaggtacacgcgtaacagggagataagatctgtaacaggttgtgaaggtctctcatcctactgttgcgaggaagtgactactgaaatgagaacgaacacacagaaattaatttggagaagtcagaagggaagatgtgcccaacacagtaaatccaaaggccctgcaacgagagggagcacggtaagcagaaggaagtaagaggcttcagcgtggctgtggttgtgtgctagataaagctggtgagttaggaggagggcaggactagcagagcttcatattctttctttagaaattattcttcatgtgttcaacaaatatttgtctatgatgagctagggacatactcattttacataaattatgacatatactgctgttactatcaacaatttccagcaataaatgtacagtaatttaaccaatctcttattgttggaaatgtagatttttttctccaacttctcatcattattataaaccgcaattacttttacaccaacctaaaaacaattctgcaacaaagatttttgtatgtggacatgtgtccaaatatttcttggcataaattcctgcaagtggaattgctggttaggcaaactgcaaatttgtaaacatatttttatatatatagagagagagtcagggtcttgctctgttgaccaggctgctggaacacagtggtgctatcacagctcactgcagccttgacctcctaggctcgagcgatgctcccacctcagccccatcccagtagctaggattacaggcacacgccaccacactcaactaattttttgtattgttgtagagacaggttgtgtcatgttgcccaggctggttggtctcaaattcctgagctcaagtgatcctctcaccttggcctcccaaagtgttgggattacaggtgtgagccaccatgcccaaccttggaaacatattttaatcataaatgtgggaaattaacatgctcaactgtcaagatttggtgtaatggtcttttaagggtggtgccactgctgcatttgaaggcattctcggtcactttcagaactttttcattttcttcagcgtgtgaggaagtcacttctatttctgatcccattggatccttccaacgacttcaggtccactcaatactgactaccagtgaaccatcttcaactacagtgctagaagcctgactgtcctcctctcctcagcctaagttcttcttatctgtctctgaaggaccttcctctggacttgagacacactggaagagaaggtagtttctgatattcctttcctcttttggccaactactttgtctggctccattttcatgcagtaaattcactaattgttaaaggcagatggagctccagcaactctattacagaactgggttttccattctactgagcttgttcacagacacaactttctcaggagccagtgtgtcttcatctccccctttcaacatctacagcctcagattaccttctaaggctccatttattgtcaggccacaatttctaggattctaacaatgaagacaaactctgatacacaattcacatctttcttagctcccgtttccagttctcttctccattgcaaacaaaaacaaaaaccccaaacaaaccacaaaacctgtttccaagttcagtgggacactcttcccaacgcaccctgacttcaggtatgtaagagttaagaaacaagaaagaaacacgaaaagcagcttaacaatcaaagacaggtttattttggagaataaacctgagaggggcttcttgtcgattttggtcaggagcgttttctcttacacactaagggtgtttaagggtttacgaagcggtgagcttattgcaggttcgtaatgtttctgtatgagggaaagtttattgcagggttggaaagtctctggccggaggggaggctatctctgggttggcatgtttctggttggaagtgggtttatcttagggttggaatgtttctggttatgctgacattagccattaggctgatgtttttgggttggatttaggcagtttcttaatcaaggggaacttaaaatggtggcagttgtccaagatggcaatgctcctgctgtcagggtaggccttgggaagacaccaggtgtctttgtaaacttaggtttcccctgtaccaagcacagtgctgactgcattacatgggtttttctttttactattcgtgacaaccttctgaggtaggtatcattactgtccccatttacagatgagacaactgaggcttaggtaggctgtcactcatccacagccacagagctactatggagggaaccccatttgttcctaaactgcgattaaaaataaaagtggggggagacaggccaagaaaaaaaacacgaaaagggttgaaaagcagcaaaagaaaagtaagcagtcaggcggaaacggcccctttcctgcctccttcccgcccggcgctgggccttgcgcagggcccggacgcccccaagcggccacctctctgcagctgacgcttccggctacaggctggcgtcactagcgagcgccctgcgtaggcaccggctcctgagcccgtgcttcgggtgagggggcgggtcttccggccctctcgaaaatcatttccggcatgagccggaagaccgtcccggatggcctcggggactgccagtgtgtggaggtgagctccgggattgccggcattcccgcttctgctggttgcttcatgctgcaggctgcggccgtcagccctcgctcgcattggtggcgctgaggtgccggggcagcaagtgacatgtcgtcgggcctccgcgccgctgacttcccccgctggaagcgccacatctcggagcaactgaggcgccgggaccggctgcagagacaggcgttcgaggagatcatcctgcagtgtgagcggcgccggtgcgggctgggagtggggcgggcgggccccgcggaggcatgcggggcgtcagcgggaacctgaggccgagtccctggcgccgcccgcacgcatggcggccgccccgggtaacccgcgcttgggacgccgcacgccttttaaatgttttttctaacctgcgttttatctttggaggattttccctattaaattgtacgatctttgtggggaggcacagttcgtgtttgtatttgtaaatcccagtagctcatacaatgcttatgcacttaaataggtcccagaaacatcccatctatggggtcatgttaatgaaacggtcgttgactttcagtcgcagaattaacattgccttctcaatgcactggaacgggtggcctttgattcctcaaacttacttcccttactccaccttggtggttttttttgcggggaaacgggataggggatcagggtcttgctgtgtcgccgagcctggagtgcagtggcggagatcacggctcactgcagtctcaaactcccaggatcaagtgatcctcccacctaagcctcccgagtagctgggattacagacgcgcttcaccacggtcggctaatttttttaaaaaaaaattttttggaacgaggtctcactgtgtttcccaggctggtctccaactcctgcgctcaaacgatcttcccacctcggcctcccaaagtgctgggattataggcgtgagccaccgagcccggccccaccttggtgttaatatcgtaatatcttttaggcgg

SEQ ID NO: 8541 - DNA, 6000 bp, Homo sapiens
aatgatggtttccagcttcatcaatgtccctacaatggacatgaactcatcattttttatggctgcatagtattccatggtgtgtatgtgccacattttcttaatccagtctatcattgttggacatttgggttggttccaagtctttgctattgtgaatagtgctgcaataaacatacgtgtgcatgtgtctttatagcagcatgttttacaatcctttgggtatatacccagtaatgggatggctgggtcaaatagtatttctagttctagatccctgaggaatagccacactgacttccacaatggttgaactagtttacagtcccacaaaaacaagaaatggggaaaggattccctatttaataaatggtgctgggaaaactggctagccatttgtagaaagctgaaactggatcccttccttacaccttatacaaaaattaattcaagatggattaaagacttaaatgttagaccttaaaccataaaaaccctagaagaaaacctaggcattaccattcaggacataggcatgggcaaggacttcatgtctaaaacaccaaaagcagtggcaacaaaagccaaaattgacaaatgggatctcattaaactaaagagcttctgcacagcaaaagaaactaccatcagagtgaacaggcaacttacagaatgggagaaaattttggaatctactcatctgacaaagggctaatatccagaatctacaatgaactcagacaaatttacaagaaaaaatcaaacagccccatcaaaaagtgggtgaaggatatgaacagacccttctcaaaagaagacatttatgcagccaaaagacacatgaaaaaatgctcatcatcactggccatctgagaaatgcaaatcaaaaccacaatgagataccatctcacacaagttagaatggcaatcattaaaaagtcaggaaacaacaggtgctgtagaggatgtggagaaataggaacacttttacactgttggtgggactgtaaactttttattttacaataaatttagatttaaagcaagggtgcaaaaaattgcactaagaattcccatatatcttttgccagtttcccctattgctaaatgttagtttactgtgcacatttttttttattatactttaagttctagggtacatgtgcacaacatgcaggtttgttacatatgtatacatgtgccgtgttggtttgctgcacccattaactcgtcatttacattaggtatttttcctaatgctatccctcccccatacccccacctctcgacaggccccggtgtgcgatattccccgccctgtgtccaagtgttctcattgtttaaatcccacctatgagtgagaacatgcaatgtttggttttccgtccttgcgatagtttgctcagaatgatggtttccagcttcatccatgtcgctacaaaggacatgaactcatccttttttatggctgcatagtattccatggtgtatatgtgccacattttcttaatccagtctaccactgatggacatttgggttgcttccaagtctttgcttttgtgaatagtgccccaataaacatacgtgtgcatgtgtctttatagtaccatgatttataatcctttggatacatacccagtaatgggatggctgggtcaaatggtatttctagttctagatccttgaggaattgccacactgtcttccacaatggttgaactagtttacactcccaccaacagggtaaaagcgttcctatttctccacatcttctctagcacctatgtacatttatcacaactcattaatcaacactgacacattatgttgaaccaaagtctatgttttctttagatgtcattaatttttacctaatgtccttgttcttttctgggatcccatccaggataccgcatgacatttactcatcacatttgtttcatctcctctagcctgtgacagtttttcagagtttccttggttttgattactttgtcagttttgagcaattctggtgaggtattctgtagaatgttcctcagtttgagtttgtctgatgttttgattatggtaacacaggggttataggtttttaggaggaagaccacaaggtaatgtgttttcccgctttcttgcgaatggatacccaactgttgaagagtcatcttttccccacagaattgcctgtgcacctttgaaaaaacttggttgctcatacttctatttctgggtattctattctgttccaatgatctttttgtgaaatatttgattactatagatttgtaataagtcttgaaattaggtaataattgctctccatttttttttctattttttaaaagttatttttgctattgtaggtcttttacatttccctatgaattttagaatcagtttgccaatttgtacaaaaagatagcctgctggaatttagattggggttgtattaaatttatagatcaactaaggaaaaataacattttaacaattttgagttttctgattcatgaacatatctatttattcaggtctctcaccaatgttttgttgttttcagtgtacaatctttcacatcttttgtcagatttatctgttagtattttttatttttgatgctatttaggtgctgttttcattccaattttcaattgttcattgctagtacatttgacccttgaagaatgtgaggattgaggtaccaacccccgagcagtaaaaaattagcatagaaaggttttgtgggtttctttttgttttttatttttgagacagagtcgtgctgttttgcccgggctggagtataatggcgtgatctcagctcaatgcaacctccgcttcccgggttcaagtgattctcctgcctcagcctccagagtagctgggattacaggcatgcaccaccacctgcagctaattttttgcatttttagtagagatagggtttcaccatgttggccaggctggtctccaactcctggcctcccgtgatacgcccaccttgacctcccaaagtgctgggactacaggtgtgagccaccacgcccagcacacatagaatttttgactccctaaaaatttaactattaatagcctactgtgcactagaagccttaccaataacagaaacagttgcttaacacatatttggcatgttatatgtgttatatactgtattatcataatgaagtcagctagagaaaagaaaatgttattaagaaaatcttaaggaagagaaaattaagtattcattaagtggaagtggatcatgataaaggtcttcctcttgattgtcctccattgagtaggctgagaaggaggaagaggtgggttggttttgctgtttcaggggtggcagagggggaagaagtggaggaagaaggaggagagacaggtacacttggtgtaactttacagaattacatcataattattatttgacttttttgcctttgcaattctttgaaaatgcttttttacagtactagtccttcttccccatttgctttagtttcagtgcccattcatggaagggtttgtgttgtaaaataagtcaaaagtagtcttaataattggaagcctttgccaaactgtttaataggaatttgttttctggcatggcttcttctatgtcttctttagtatctggtactgattcaaaagcactcatctccatcaagtcatcttctgttgattcctctggtgtggtgtctattcattcttgaatttctcacagattcatatcttgaaagaccatatcccccaccttttgttgctgaattagagatgttgggtttgcaggcaagtagaccactttgacaccttcagtgttgaactcatgggttctgggtggctaggggcattgtccaaaaatcaaaagaactttgaaagaccgtctcttactggcaagatattacctgacttcagggacaaagtaatgatagaaccaatccagaaaaagtgttcttgccgaggccttcttgtacaacaaaaaaactggcagtgggtattgatcttttccctttaaggcttggaggctagcaggcttatggatgggggcagtcctatttgtaaacccaaacatacaaacatacaaactatgtcaaaggcatagcatgggtactgtgaaaggagggtgaaaacacaaagttgacatcacctctgacctcaaggagtgctcagcagactgagagagacaagtacatattttcctgaaggagggcactggagtgatggcgtgtttagaatgtgcaagttgagcggtcactgagaggcagctcagcagagtgctctcgcaaggattgggcgggcaacttcccactgcgtgcgatgtatcttaggaaagccatttaaaataggagacggttactttccatcaagtccctggtatggtccatggaagcagggttgtcagtctcatttcagcattttagaggcttctcagggtttggaaatggaagaagagaagcagcaatatgtatgcattgcagagacacaggcgagccccaatttaggaggttaggaggtcagtgctaagggccttgttttctttgcttagagcatgagttgccatcttctctggacagagagtatttggttgcctaaaggtaaaatctaaattttgctctgggacaaattccaaaaaaaattagctttaatcaaatttacttttactttatctttctgaaccttcaaggtccaaaagcattggttaataattctgcttctaaacttaacattgcagcacagggcatgttctgcccccaaggcaaagaccataagctactgttgtctggaaaacatacaaatagatatctcagcaaaagctactcatatattcttgttcttttgggtaaatcattgtcagtgactgattttttttttatgaaaggataaaaacacgccctctattggggtcaggttttgtgctggtatttctcccacctactgtatcataggagcttagattcccagctgcttgctctcagctgcagttctctgatggcttgcacagggtggaccagcccccttcctctatgtgtgtgtctgctgctgacctgtggctttgccgaggcagggaagctactggtagtgcccatggatgggagccactggttcaccatgaggtcggtggtggagaaactcattctcagggggcatgaggtggttgtagtcatgccagaggtgagttggcaactgggaagatcactgaattgcacagtgaagacttattcaacttcatataccctggaggatctggaccgggagttcaaggcttttgcccatgctcaatggaaagcacaagtacgaagtatatattctctattaatgggttcatacaatgacatttttgacttatttttttcaaattgcaggagtttgtttaaagacaaaaaattagtagaatacttaaaggagagttcttttgatgcagtgtttctcgatccttttgataactgtggcttaattgttgccaaatatttctccctcccctccgtggtcttcgccaggggaatactttgccactatcttgaagaaggtgcacagtgccctgctcctctttcctatgtccccagaattctcttagggttctcagatgccatgactttcaaggagagagtacggaaccacatcatgcacttggaggaacatttattatgccaccgttttttcaaaaatgccctagaaatagcctctgaaattctccaaacacctgttacggagtatgatctctacagccacacatcaatttggttgttgcgaacggactttgttttggactatcccaaacccgtgatgcccaacatgatcttcattggtggtatcaactgccatcagggaaagccgttgcctatggtaagttatctctcctttagcaccttaagaatacttcacctttggaaattaaaaaaggattctttactgaactgtgatttgacattttcatttgtttcatttcaaatttctttccagtttaacaaattattttgtgccaatgc

SEQ ID NO: 8542 - DNA, 6000 bp, Homo sapiens
ttgtgtgggatttgttttgcagtatctccccagacttcctggtcattttctttgtagtgtcttttgataactagagcattttccttcggataaagccaaattgattatttttaaatgtgcttgtcactgctttttcctccctgccaggaagtgtttgtgcactctcaggtcacacaagagatggtaatttgtcagtgagctgaggaaggcagatctggcctcagctatgagggtgggtagcacccagcccattgcagacccagactccggaggttcctctgtcttcttgggctggggcgtccatctcctcctgcccgcagacacaggagtttctgggtcccaggccttgcgctctgggactgacaccagcggtttgggcttggactgaatgacgccacccgctgttcgggttcactggcttagggacagcggtttgtgggacttctcagcctccgtgatcaaggagccgattcctgtaataaatctcctcctaaacgtatcgcccagcagctctgtttctctggagaaccctgactcacatatgggggcctagaggtttggttgtagcaggccccaggccctgttccagcacctggcagtacccccagctgatgggccccaggtggggagggacagccggcctgagggaggtgcctcctgggccccaccgtgggctcccgtgcagacaggcagggtggggagcaaggacaaggctgtcccctcctctggcctccgtctacaggtgggacttctttccagccctttctgtgggtggggggtgcacacgggcaggccagccccaggcgccctcaggaccgcaccctaggcctgccctggggggagtggggatggggctggggcctcaccttgctcaggacccaaccctggtgcagctccactcctggcttttcgcctgcaggacagaggggcctggagtggcctggccctgccgtgggcagcatggcgtgggcatgcaggtgaggcctgcctgaggtgcccaaccccctttctgccagctggggcttccaggttcagtggtgtgtcttcctgtctggcatttcagagaagggctctgcagatgtgggggctggctgtgaggacacagggagcctgggaaaagggtgggagaagggtccctgtggccacaggccacccgaggaggggcagggccaggctcctgtggaagctgttgcgggcccaggggtctctttgtccaggcgggaaaggcttggagcacaaggcacaggcccttcacccctcagccagccaaagccttgagggctggtcaccccccgacgagctcagtcccctccaacggtgctgcccaatactgggcctcccacaccgcgtccctccccatctccaccctgggatcctcagacacccacacacacaggcaaggggagaagccagggcacccctaggcttggcagagtgcaggctccctgctatgttggctttgcttggtccctccaggggaaccaggagcctgtgggtgaaggaagctgaccctggaagggcctggggacgtctctggaccagcctcaccctggctttgatctttgttccagggcgcagactgaccactctgttcccacacctggctcaaggtgggtcgagggccttcccagccttctcagagctaacccagaggagtgcacaggacaggtaggcagagggttcaggggccaccttccaatggggtgaggctgaggagagggtgctgtgagctgagcaaggaccccactccatttcagctcgtctcccccgagagccacagggagtgctggacccgcctgagcggggggcatatggggctcagcacagcactgtggggcctggatgagaagccgctggtctcttctgcccctccctgacattgaggactggaaccttggggagccttgggtgaggtcgcctcccaggaagtcctgagctgagacatcgcgggcccattttgaggtggctgtgaggggtacaggtgagtgtacttggggttccttcaaggccaggcccagcaggtcacctgcagaaggccttgggcaggtgccccccaccccgtcctggaacaccattcttccccatcgccccagaggaccaggcccaggcaaggctgggaatgcttagccgacctgctcagcatgaagctcctgccccaaccccctccttccaggtgcccggcctgggctctgccagaggctgaggtgcccagggtgtcaggacggccaccctgaaggccctacccctttataggaaataaagtcttctttccaaatttatagatgtgggatttgttcagtggacatagctcacccggggcattttaggaatttacccaaaagacataaaagtctgcgtttacagaaagaatagaccaaaatgctaacagcagctttattcatagtagtaagaactaaaatccacccacatgggcatcatcagaaaaacggccaagctgtggctcttcatgacatggcttcaagtcagcaatgaaaaggaacaaaattctcaaccatgttcaagggacatgaaccccagggacagggccctctctcaaaacaggcaggtccaacccacgtgtagctcgtggtcccattcctctgcaggctccggacagaaagcgggaagctagaatcacataacccacaagagtggaccctcccgctggggaagggcggggaggaccgggaacccacgagagtggaccctcctgctggggaagttcagggaggaccaggaacccacaagagtggaccctccctctggggaagttcagggaggactgggaacccacaagagtggaccctcccgctgcggaagggcagggaggaccagaggactcggggatgatgaagacgttccagctcctgacgctggcgagactcacgctgctgacacctgtcacagtgcacgggctcacacttaacttttgtgtgtttcacgttgttttcatattctggtgtaagtttgttttatttctctagaaagaagcaagggctgtgaatggtgattaaacgttccttctcaggtttgcctgtgcgtggggtagaggtggaccacgcagaccctccctgctgtgagctccgtggagggtcaatgcagatgcagggagactgtggggcccggtatccgcgacgctggacaagggggttcccgctctggaaggaggagtcaaggtctccagtggtgtcggattagaatatgaggaatccgtctgagctcattctccacaggatcccacgagggaaagcctggcttttccctgtgcagatgccaggcctctacaggttccagaaggttcctctgctcctctgagagggcagggcacttgcacagggaacaggcagccgaaggcagccacagccctactggaaccagggtttctctgcctcctgggaagaggtcagtggatgggttggggagggggacaggcggccttcctgtgggagtcgaagagcctggggcctcccctccttggaggcgaccagacaccttccctaactggaggaaattctgaaccccagacctggaaagttcaaagctgaaataaaatcgccccttgttttgcgagctgctgcctcctatgtgccctcaggcaggtccattccctcctggtctcagtctccccagctgtgccagggggacgccaggtgggacccaactgggtttccaaaaacaaaaggaaatttaagtctcagagaaaggggagctttgggccaggttgggggaagggcctcgggtgctggagtgagtcctgggggagaaggaaagggctgcgggcgggacatccagaaagtcccacatgctgtaccatatggccatggctggtgtcccagtgcttgggtgcagactcactggacaggatccatgctgcagggtgacagacggcccatcgcagggcccacagggctcatgtcccatcccctcggggtccggagctctggatggtcccagcccagctatctcccactgcagacgcccaggctcagcgccttctccacgcagctgtgggtagctggcccctctgcaggaaattcaagtgaatggcgatggcactttcggttttcatctctggaaagcgctttcggggcgggaaggtgggagggacgttgatgtgaggcgtggtcctgagttctcctgagggcaggtgagggcagtacagggcagggaatgtggggctggggcaagggctgctgccaactcttgaccagaggggacacagagcaggtggaggagggtctcacccagaccagaccccaggcaggtcaacaagcttgggggtccctgctgaggtggggacacagtggaggtgcagggagccaagaatgagaggaccttcccataggcagggacacagcccacgtgcagggggcctggcctagctggggacacagccaggtgcagggagcagagggcactcactcaagggaagacatctacaggtgcaggcaggagggagcttcacctaggctgggtcaaagaacaggtgcaggggccatgaggggcctcccaggcggacacacagtgcaggttcagtgggggtctcaccccagtggggacacagtgcaggtgcaataagcctggggccctcactgagatggggacacagcatccatgcagggaggcggaaatgggggcccttgttcaggcagggacctggagggggtgcaggatctgggagaccctgactcaagaggggccaggtgcagggagcaggtattggggtccggtacccaagagcgcaggtaggaggagcggagctcggatggaggctctgaagagctgggccagtctccagcgcccagggctggccgagcgtggccagtgggtccgggtgtgtcacatgacgggatgatgccaggctgtggggcagggcccctgtggccatcctggctgtgcacctgggtggcagccagtggggcgggagctggggctgcagctgtggtgttcccagaggcccaggtgccctctcccacacgcctgggccctctgggttgtgggaaccagccagctcctgctctgtcccctcaggtgtcctgcaggcacagctcctcggggggcccaggccgatggcaggtcttaacgtgtccctctccttcttctttgccaccttcgccctctgtgaggcggccaggcgggcctccaaggccctgctcccagtgggcgcctatgaagtcttcgcccgggaggcggtgggtgcgggtgcagctcgggccctgctgcctggagatgaggacgctggtcgagctcgggccctgggctggggactttgggcctgacctgctgctcaccctgctcttcctgctcttcctggcgcacggggtcaccttggacggggcctcggccaaccccactgtgtccctgcaggagttcctcatggccgagcagtctctgcctggcacgctgttgaagctggcggcacaggggctgggcatgcaggccgcctgcaccctgatgcgcctctgctgggcctgggagctcagtgacctgcacctgctgcagagcctcatggcccagagctgcagctcggccctgcgcacatccgtgccccacggggcgcttgtggaggccgcctgcgccttttgtttccatctgaccctcctgcacctgcggcacagtcctcccgcctacagcgggcccgctgtggctctgttggtcaccgtcacggcctacacgggtgagcactgcttccccttcccctgggcccctgaggacctctcacctgtgtggcctccatgcacactcaggcccgtttgcacccaggatagggggctgctggcccgggtggccaacaaacccacaagaagaggcggtgatttcctgggatctggcgggtagacgagggcctgcgctggacatggggtgcggtggagcagcctgtcccctgccagggccatcctgcccactgcacctctccccagtcgcagctattcttggtcctcccagaagttctgcctctggggtagtagggacagccgaggcagacgattcaaggcccag

SEQ ID NO: 8543 - DNA, 6000 bp, Homo sapiens
acctcccagggtctcagatttctcctcctgcagaatgagggccacatcatgtggtcaccaaggtcccttctgcctccgggactctagactctagaaccgtctacttgaggaaccaggactctagaaccgtactgtccaatgtgggcgaggctgcagtgagccatgattgtacccactccagcctgggtgacagagggagaccctgtctcaagttttaaaaggctccaaattaatacccagccatctgttctttaacagacatttttacaaacatacaaaaaatgtggaagtgatgaggaaaggtatgctaaatccagcacaatcctaatcaaaatgccatttgattttttttttttttaaggagtcattctctgtcacccaggctggagtgcaatggcgcaatctcagctcactgcagccaccacctcccaggttcaagcgattctcctgcctcaccctccctagtagctgggattacaggcacccgccaccacacccagctgatttttgtatttttagtagagatggggttttgccatgttgccgggctggtcccaaactcctgacctcaggtgattcgcccacctcagcctcccaaaatgccggaattacaggggtgagccaccgcacccagccaccatttgattttttgagacacattaaattctaaaatttaattttttttccttttttttctgagacagagtctcgctctgtcgctaggctggagtgcagtggcgcgatctgtgctcactgcaaactccgcgtcccgggctcaagcgattctcccgcctcagcctcctgagtaggtaggactacaggcacatgccaccacacccagctaatttttatatttttagaagagacggggtttcaccatgttggccaggatggtcttgatctcttgacctcatgatccacctgcctctgcctcccaaagtgctgggattacaggagtgagccaccgtgcccggctttttctttttccttttttggcgaacagggtcttgctatattgcccaggcaagtctcaaactcctaggctcaagctgtcctcccacctctgccttcctaaaagctgggattataggcatgagctaccgtgcccgacaaattctaaaatgtatatggaagaaaaaagtcaacattgtgattcaattcattttgaaaaagagctgggagagacgctttcctaccagatcctgagtgctgcaaacccacagtgagagtgtggggggaggcctgacctaacagcaccaagacagggacacctcagcaggaacccaggggactcggggactgggaaaagtgtccgggggtcggggaggggtggacagtgtcctcatgatgttggcagagtgcactatgtggaaaaatgaacactgcccctccctggcatcacacacaggataggctccagagcaattggtgattcatgggcggtggtgaaataggaaatcagtagaaaataatgtgggagactgggcatggtggctcgtgcctgtaatcgtagcactttcggaggtcaaggcgagtggattgcttgacctcaggagttcaaaaccagcctgggtaacacggtgaaaacccatctctactttaaaaaaacacaaaacttagccgggcgtggtggcagccacctgtagtcccagctactcgggaggctaaggtggcagaatcgcttgaacccgggaggcagaggttgcagtgaactgagatctcgccactagcactccagcctgggcgacagagtgagaccctgtctcacacccccaaaaaagaaaaaagaatgtgggaaggcggatatgtgagctagcagtagagaaaactccccaaggccgggtgcggtggctcatgcctgtaatcccagcactttgggaggccgaggtgggcagatcacaaggtcaggagttcgagaccagcctggccaacatagtgaaaccccgtctctactaaaaatacaaaaaattagccgggcatggtggcaggcacctgtaatcccagctactcgaggaggctgaagcaagagaattgcttgaacccaggaggtggaggttgcagtgagctgagattgcgccattgcaccccagcctggccaacagagcaagactctatctcgaaaaaaaaactccacaaacacaactgtaagacaagattttgatgggtttatttacataaaattttacatagaacaaaaataatgaataatacctgaataatggcaacagtagattaagagaaggcgtttgcagcttttaaaactggcaaggcttaccatttagaactcccacacatcaaataaaggagacaggaatcctgacggaaacgcaggccaagggccagagtgggcaactcagacaccaggggccagtggcctgtgtggagccgccgctcacaggaagctgggctgctggctgcacctgcagacaggaaggttagaaagcgggcagtgcaggcatccaagagtctgtcccctgcgacccagccaccgtccgtccagcagggctcccatgtggctggggcgcagtgccagggtcctcatggagggagccctgcacgcgcctccagcctcagaaggagcctcagaaagaggctgaacttcagtgtgggctcttcaccaccacttccacctccactaactacaccctaagtatgtccataaatgttacagccagccgggcacggtggctcacgcctggaatcccagcactttgggaggccgaggcgggcggatcacgaggtcaggagatcaagaccatcctggctaacaaggtgaaaccccgtctctactaaaaatataaaaaattagccgggcgtggtggcgggcgcctgtagtcccagctactccggaggctgagccaggagaatggcatgaacccgggaggcagagcttgcagtgagccgagatggcgccattgcactccagcctgggcgacagagcgagactccgtctcaaaaaaaaaaatgttacagccaaagaaagatggtgcagcagattctgggcctgggctcttcccaaggcctggaacctggcgggccccctgtgctggttgcggcttttctccctccctcccttccttcctttccctcagaagtaacacaacttgaaaaaaccacccacccaaacagagttgtatgaagtaaaaatggaaagacactcctcagggccgaaccccctttaggtgttgtgcgtgcactgtcgctgaaagggctcccactggggtgtggtcacctccagcagccggccctgaagctcttgagtagacagccctgaggccaccagagccactttgtcaccaagagcagagagccaggagctcctgggaggtggcatgtcttcctgggagggtccttggccaatgactgagcagagtaagagcctacagttgcatccaggtgaggaaacgcttcgtcttgcctcccctgcagagtgcccatggcaggctgaggccaccctccacaggtcttggggagatggtgccccgctcatcctccctcccctcctgcctcccgactcctttcctggtttctggagcacttccccagtccagccctcgtccagggatccacctcaggcgcctgcaggctgagcttggccaagcagagacctctcatgcagatgccctgaggcccagggccccaaggtcctgccgcccaggctctgctggtgctgacagggaacccggcctgcagggccttcccgctgttccgaggcacaacacaggtccaagaacagggccccttgggaggtgccaagcacagaggggcataggtataagggaaagctgcagccaggatgagggtccgcctggagggatttcaacaggcagaagggggcacctggaacagcaagctgagcttggggctccccagtgcagttgtgcatggagggcgaggagcacgggtggtaggttctcagacactgccaggcaccaaggaggaaagggggagggggagggagaggggaagaggaggggcggggagaaaggataggaggagaaggaggaggagagggagaagtggggggagggggagaaacaggaggaggggagtggggagaaaggaggagaaggaagaggagagggagaagtgggggggagggggagaaacgataggaggagggggagtggggagaaagaggaggaggaggaggagttggggggagaaatgataggaggagagggagaggggagaacggataggaggagaaggagagggaggagtaggggggagaaacaataggaggagaaggaggagagggaaggtggggagaaaggataggaggagggggagaaaggaggagggggaggagggctaggaggagaaagaggagggctaggaggagaatgaggacgaggaggagggcggaaaggatgggaggaaggctaggacccctcctgtccttttgcagatggggccctgagcatgggatgtgcctgaggtcacccctcaggcattagcagagccagcagtgtgatctgggtctcccaatctccccagcccccgggtgaaaccctggcccaccactcagcacatgctacgtaacctcaaggagcctcagtttccccccacataaacagagcttacgaggtctgcctggcaaggcttccagcagaggtggcacttgtggctgttcctgtggaatcccacctcctcgagaccctccaaggcagcaactatgacagctgatgccagccctgaaatctctaagcaaataaggttcccaggaggacggcagcatttgcatgcgggtgtgtgaaagcccagccaagtgggctgcctctgtctgcagctctgagccccacaccccctatttaaacaaagatagatcctgctccaggagccgggaagccttgccctggccagctgtgctgggcacctcccctgcctgcttcctggcccacttgcaggcaaggtgagggcatgcgaatggctgccactgcctgggcggggctccaagggccacccctccccaccctctgtcccgcagtgaggacgggactctactgccgagaccaggctcacgctgagaggtgggccatgacctccgagacctcttccggaagccactgtgccaggtggggacccagcctagacgtgtgggccacagggagaaggtggagcgttggactctagggaggcagggcggcaccccagcccaccgggactttcacacaccctggcctgtggggaggcagtgccagggcccgccctggtccccaaagccccttggggcacgaggagggacacacactcagtgcggctctggacggggtacacccagctggggttggcttcctgcctgcccaggggctcccccatggagcaggtcccttcgttggggtggggggcatccccattctttctgcagagagctctgaggaggggcccgcctgcccaccacagaaggatgggggcatgaggggctgctgggtggccgaaactcctcggggactttcctccaggaacaccccacagtccgtagtgaggctcccagcctggggccggggccgagtcctaacactgagacctggctcgggcttcagggttaggcaggtgcaggcggcccaggctcagtctctgtccctctgggcctccgctaatgtgaagtgaagggtagaactagaaggctgcccctccgacctcctgcggcgcctccatggtcacaccctccggtcatcgtcgcagctccaaatgccagccccagctcgaaccctctccttccagggccacagatgtcgtgctcctggccccgttttgccagcccaagactaggagccacggcacctgtcctcccacagagagagacccccggggcgaaggtgcgggaggaagctgggacccccaagagttgtgaggccgggctccatcaggcccgccttgctggggagctcagggcctatgggtcctggcactgggtcctcaggccatgagcgaaggcaggcgacttgaggggtttcctgtccctggctcacatggctccaccctacggataagaga

SEQ ID NO: 8544 - DNA, 6000 bp, Homo sapiens
cccagggacctctgcaggccaccttccctcccccctcaacccagggacctcggcaggccaccctccctccccctcagcccagggacctccgcaggccaccctccctcccccctcaacccagggacctccgcaggccaccctccctcccccctcaacccagggacctccgcaggccaccttccctcccccctcagcccagggacctccgcaggccaccctccctcccccctcaacccagggacctctgcaggccaccttccctcccccctcagcccagggacctccgcaggccaccctccctcccccctcaacccagggacctctgcaggccaccttccctcccccctcagcccagggacctccgcaggccaccctccctcccccctcaacccagggacctccgcaggccaccctccctccccctcagcccagggacctccgcaggcctccctccctcccccctcaacccagggacctctgcaggccgccctccctcccccctcagcccagggacctccgcaggccaccctccctcccccctcagcccagggacctccgcaggccaccctccctccccctcagcccagggacctccgcaggccaccctccctccccctcagcccagggacctctgcaggcctccctccctcccccctcagcccagggacctccgcaggccaccctccctccccctcaacccagggacctccgcaggccaccctccctcccccctcagcccagggaccttcgcaggccaccctccctcccccctcaacccagggacctccgcaggccaccttccctcccccctcaacccagggacctccgcaggccaccctccctcccccctcagcccagggacctccgcaggccaccttccctccccctcaacccagggacctccgcaggccaccctccctcccccctcagcccagggacctctgcaggcctccctccctccccctcagcccagggacctccgcaggccaccctccctcccccctcagcccagggacctccgcaggcctccctccctccccctcagcccagggacctccgcaggccaccctccctccccctcagcccagggacctccgcaggccactctccctcccccctcagcccagggacctctgcaggccaccttccctcccccctcaacccagggacctctgcaggccaccttccctcccccctcagcccagggacctccgcaggccaccctccctcccccctcagcccagggacctccgcaggccaccctccctcccccctcagcccagggacctccgcaggccaccctccctcccccctaagcccagggacctccgcaggccaccttccctcccccctcagcccagggacctctgcaggccaccctccctccctcccccctcagcccagggacctccgcaggccaccctccctccccctcagcccagggacctccgcaggcctccctccctccccctcagcccagggacctccgcaggccaccttccctcccccctcagcccagggacctccgcaggccaccctccctcccccctcagcccagggacctctgcaggccaccctccctccccctcagcccagggacctccgcaggcctccctccctcccccctcaacccagggacctccgcaggccaccctccctccccctcagcccagggacctctgcaggcctccctccctccccctcagcccagggacctccgcaggcctccctccctcccccctcagcccagggacctccgcaggccaccctccctcccccctcagcccagggacctccgcaggccaccctccctcccccctcagcccagggacctccgcaggccaccttccctcccccctcagcccagggacctccgcaggccaccctccctccccctcagcccagggacctccgcaggcctccctccctccctccccctcagcccagggacctccgcaggccaccctccctccccctcaacccagggacctccgcaggccaccctccctcccccctcaacccagggacctctgcaggccaccttccctcccccctcaacccagggacctccggaggccaccctccctcccccctcaggccagggacctccgaaggccaccctccctcccccctcagccaagggacgtctgcaggccaccttccctccccctcaacccagggacctccgcaggccaccctccctcccccctcagcccagggacctccgcaggccaccttccctccccctcaacccagggacctcggcaggccaccctccctcccccctcagcccagggacctccgcaggccaccctccctcccccctcagcccagggacgtctgcaggccaccctccctcccccctcagcccagggacctccgcaggccaccctccctccctcccccctcagcccagggacctccgcaggccaccttccctccccctcagcccagggacctccgcaggccaccctccctccccctcaacccagggacctccgcaggccaccctccctccctcccccctcagcccagggacctccgcaggccaccttccctcccccctcagcccagggacctccgcaggcctccctccctccccctcagcccagggacctccgcaggccaccctccctcccccctcagcccagggacctccgcaggccaccttccctcccccctcagcccagggacctccgcaggccaccctccctcccccctcaacccagggacctccgcaggccaccctccctcccccctcagcccagggacctccgcaggccaccttccctcccccctcaacccagggacctccgcaggccaccctccctccccctcagcccagggacctccgcaggccaccctccctcccccctcaacccagggacctccgcaggccaccctccctcccccctcaacccagggacctccgcaggccaccttccctcccccctcagcccagggacctccgcaggccaccctccctcccccctcagcccagggacctccgcaggccaccttccctccccctcaacccagggacctcggcaggccaccctccctcccccctcagcccagggacctccgcaggccaccctccctccccctcagcccagggacctccgcaggccaccctccctcccccctcaacccagggacctccgcaggccaccctccctcccccctcaacccagggacctccgcaggccaccctccctcccccctcagcccagggacctctgcaggccaccttccctcccccctcagcccagggacctctgcaggccaccctccctcccccctcagcccagggacctctgcaggccaccctccctccctcctccctcagcccagggatgtctgcaggccactctccctcccccctcaacccagggacctccgcaggccaccctccctcccccctcagcccagggacctctgcaggccaccttccctcccccctcagcccagggacctctgcaggccaccctccctcccccctcagcccagggacctctgcaggccaccctccctccctcctccctcagcccagggatgtctgcaggccactctccctcccccctcagcccagggacctccgcaggccaccctccctccccctcaacccagggacctccgcaggccaccctccctcccccctcagcccagggacctctgcaggccactctccctcccccctcaacccagggacctctgcaggccaccctccctcccccctcagcccagggacctccgcaggccactctccctcccccctcagcccagggacctcggcaggccactctcccctcttagcccagggacctcggcaggccaccctcccaccctccctccctccctccctccctcccccctcagcccaggaaaggcacaggagaggatcctgccaggtaaagggaaagtggcccgggaggagcccacgtgccaacaacaggagtcccagaagacagaaaagaccacagatgagaaagcagttcacgcagagaacaaaacgttcccggaccaaacccagggtcgggttgctcattcccgaggcccgatagcgagatgcagatgaactggggaagaagagggattttatttctgtaactggttacagggagaaggcctggaaatgatcgccagaccaactccagattacagtttttccagagcttacacaccttctaagctctgtgtctccgtgtcagtgtgcattcgtctaaagacgtacgtgattcaattcttctcatctctaactgaggtttggtcctgaagatcttcctctgaagactcagtaaatttacttgatctaaatgggcccaggtgtttacccttatcttgttttctgctaaatcatggaggtttggggagttccttctccacttgtttgtggaggcctggggagttttttcagacccccagtaaaacttgcttaatcctaaacgggtcctggtctcgtcatgcttcaaggcccaagaaagccctgggcaaaactcttgatgggcttttgttacgtcccagccctcgtgtgagggcgctggctctcagctttcaggatttcacttcaccctcagtcagtgctgaacagttgtcgcggaggcctgcgtgagtgaggcctggcgtgccctggaaacattcccctgagttgaagaaagactcacagttttcagcatccagttaccctctgagcatcaggcagaacccgccggccccaaaaccaggcccccttggcacatgtgggcccgagtgagtccagcatgaggaggtgccgcttctgagcagagctcaggttgtctctgggaggaggagcgagcgttgggtgcggtggccgctgcgttggcagccctgtccctgagcggaacgcaggtcgtctctgggaggaggagcgagggttggactcagtggccgctgcggtggcagccctgtccccaggcgtggactctgccctcagcttcacagtcaccgaagaaatgaagttacaggaggggcacaccgtccttttgtctctgcctttgaggttggcgggaactgaaactggtacggtctttttgaatagaaatttggggtctttctggcgacgtaaaactgtgtgtagtttgcagtagagagtgttgagaacagcctgtctgggctgtgcattgagaaggggcggttaaaatgctgccacgtcgtgcagcccataaaagggggacacagagtagccgaaactgctcttgggggagggggcacgtcccagccttccgtgtgatgctggggtcagcgtggcccctcggctgccagagctcacgaagacggttaaggaaagcttcccccgggtggctttcaccccacggggacagagccccagatgggcccagggacctctgagcagccgtgggccatggggtgacagttgggggttggtgggacccgtggctgtcatataccctgggtagacggtggcttgtccaggcagagatgcccaggggaagtgggtggcacctgagggcagatctgacttttcaagagaagctgaaaacacgggtttttctgtgaaatctctagattgaaaacagtgggcttgaaaagcctggagcagagggagtgaggcctgctccccaccccagctctgcgggcacaccctggccagacagccctgctccagacctggcctgtgtctcagggtggcccaggaggggactttgcaaggtgacgtggggcttggaggtcccgtttccctgtaagcctgggtacttaggggatggccctggtcagactccaccagtcccagacttgggggacacgagaagggagatgggccacccagttctggttgggctggggtggggcttctgaggggtggggaggttgtcccttcccacccacctgcccctgccccaggattctcggctgtgagcaggaggatgtgtacgatggccaagttgcctggactgggtccgcccctcctggggctgtgagtgcacaggacactgggcccacaggcacctctggggctct

SEQ ID NO: 8545 - DNA, 6000 bp, Homo sapiens
cctcccggacggggcggctggccgggtgggggggctgacccccccatctccctcccggacggggtggctggccgggctgaggggctcctcacttcccagtaggggcggccgggcagaggcgcccctcacctcccggacggggcggctggccgggcggggggctgacccccccacctccctcccggacggggcggctggccaggcggggggctgaccccccccacctccctcccggacggggtggctgccgggcggagacgctcctcacttcccagatggggtggctgccgggcggagaggctcctcacttctcagacagggcagctgccgggcggaggggctcctcacttctcagacggggcggccgggcagagacgctcctcacctcccagatggggtctcgccgggcagaggcgctcctcacatcccagatggggcggcggggcagaggcgctccccacatctcagacgatgggcggccgggcagagacgctcctcacttcctagatgtgatggcggctgggaagaggcgctcctcacttcctagatgggatggcggccgggtgaagacgctcctcgctttccagactgggcagccaggcagaggggctcctcacatcccagacgatgggcggccaggcagagacactcctcacttcccagacggggtggcggccgggcagaggctgcaatctcggcactttgggaggccaaggcaggcggctgggaggtgtaggttgtagtgagcggagatcacgccactgcactccagcctgggcaccattgagcactgagtgaacgagactccgtctgcaatcccggcacctcgggaggccgaggttggcggatcactcgcggttaggggctggagaccggcccggccaaacagcaaaacccggtctccaccaaaaccagtcaggcgtggcggcgcgcgcctgcaatcgcaggcactcggcaggctgaggcaggagaatcaggcagggaggttgcagtgagccgagatggcagcagtacagtccagcttcggctctgcatgagagggagaccgtggggagaggcagaggcagaggcagaggcagaggcagaggcagaggaggcagaggcagaggaggcagaggcagaggaggcagaggcagaggaggcagaggcagaggcagaggcagaggcagaggcagaggcagaggcagaggcgcctggtcaacaatcttaagtccaataagaatgtttcttatgaagacactacttaaaaaattcttaataggttaccttgatggtctaatacagaattgtccaatagaaatataatgtaagccacatacataatttaaacttttctagtgggcatgttagaaaccagcaaaaagaaaccactgaaattaattttactaaggcattgtttaaccagacatatcacaaatattatcctttcaacatatattcgatataagattatgacttaactatttgacatagttttttcttgctaagtcttcaaaatctagcatatatctgacatttacagcatatctcaatttggaatagtcacatttcaagtgctcaatagtcatatgtagttagtgactaccatatggtcaatgtttacaaatgtaaacattgtaagagacttacattttcttcacatagtttgttgttatcattaaataataatccttaaaatccattttattggataccagtattgctactcctatgttattttttcaattccccatctcttttaatttgaaaatgatttgtaggcaggtgggtggctcacacctgcaatttcagccctttgggagactgatgcaggaggattgtttgagcccaggagtctgagagcagcctgggaaacgtgctgagactgcatctctacaaaaaatcaaaaaattatccaggtgtgatggcgcacacctgtggtcccagctactcaggaggctgaggcaggaggattacttgatccgaggaggtggaggctgcagtgtgccatgttcacaccacctcactccagcccgagtgacagagtgaggccccatttcaaaaaaataaaaatttctttggcatatggaaatcttgtttaaaaagtttagaaaacattttttaaaactccaatatgaaaagctgggtgcagtggcatgcgcctatggtcccaggtacttgggaggctcaggtgggaggatcattgagctcaggagtttcagcacctgtggttttttgatttatttatttaaaacacaacaaaaaccaaaattgcttccatctcatagtcttttgatgtcagcattctgattctgtccactcttaatcttattctttccactgaatgtaagctcatttctttaacagaaatttcctttttccttattaattttggaatttcatggtacttttccacttttagggagatgcagtgcagcgtcttcaagtctcccactcttacgcctgtctccttcacttgtaagagcccttgtgattacactgtcctgcccagatacccaggacaatctccccatcttaaaactcttaatttaatcatatctgtgaagtctcttccacctgtaacggaacatattcccaggtttgaggaagtacaatgtagatacttttgtggggctgtgattctgcctaccacagacactaagcttaaagtgaaacccacatcttattcaaggcttggaggttttcctctattcgaccatttaaatttaatttttgttccttttctccatagtcttctattctccaggcttcagagctatcagcttaccattcaattatctccttttttcctgatcttccttttttcatttttaaaaaacaatacctttcaaagagcaaaagttttagattttgatgaggttctttctagcaaagttttatcatttgttgtttttgtaccctaaggaatctttaccccaagatgtgaagattagtttctgtgttctcttacaaacattaaagaattccagtttgtgtgtttaggtctgtgagattggcagaggggaacaagaccacacaggtcagtctttcaggatgcttttttctgtctctggactttgctggggtgacctcactgacacccatggcttccacatatgcggatggctccaagtctatctgtgcagcccagacccctcctcatctccagaccctggaagctgatgacttgggcagctccttctgtttcccaggcaccaggagctcctccctccccatagttctgctatccttagggcccctaggtctctggagtaccaccgtcttccaagatacatgggcctcctcagggtctgggagtcccagacatgtgacaagaaatcagatgacttcactgtctaaataaaacactactacttggaggtagaacatgggagcccatgaatgtgggaagagcacactaccaggcgtgttccacccgtcacctgggctcatcatgagggtgcttaggaagcatatagttttaagggggttggaggaatagttcagaggctgagaggttgcacccacagctgagaatccctttctagtgctctatgtccttacaaattcccaggaatcatcctctactggacagttcccaaagcccttgcagaccttccttttctgtgccatcctgcgtgtgctgcccttgagctgggtgtcccccagtagacgcttccattcactgcctgtcccatgggttctgtccaaaggtggaatctgttatcaatgtggagtaatttcctccctaagggaagcctcagcctcaccagcaatggcagacacggccaggcaagaagacacaggggcagtgagatagaaagtgcacaccccagacagcctgcccacatcatcctgaggtgaccaggacaaggtggcatcagcaatcttgtgagcacagcacatgtgggagtgactttctggagtaggataagcctcattgggcttgaggcccttgtgagtgctcagggtctctcctttagaaaggcacatatttaattctccatcttgaaatttggactagggcccccacaaattgtgcagcccattctgttctggaggaaccattcttatcagaacttggtgctggattgacttggagaagagcctgaccataatcttcaggatgaaataaaggcctggatgactgaaataaagactggagccttcggcattcagaagaggaattcagactgtgcaagatctgaggccaggctccagctcccccagtcccttggtgagcaggagctccctgaacccaccatgggtctttgctagggttgtcttgcccatgtgtgctttagatagcagcacctcttcttccatggtgtatatggagaatcctcaacaaagtcttcccaagaatctgatcatcacatcttgagctcagcctccctgcagctttttctatattgacagccacttcagagagagtcctctctgatccttacaagaaatatcctggtgcgaaaaacgaccaaaaccacatagccagcctccacgctgttcagagaaagctggcttagcaatgttgtatggtttttggatgcgctgcgttactcatacatgagaagaaagtttcaagggttagcaaatagggtcacatccagcagagagcatatgactgggggctagggcaatggtgactcctcagacctcagctgctgcctgataaacatggttaacagagaagtaggagacagtgacatgaaatgggtgttcacagccttgtgttgggaattggatgagaaacaagagcttgaacttggatgttccccagagtgagcacagggtcagacgtgtttttcaagatagtcatgatcggtcttttccagggtggggcccacagtgaaaaacagtgatagattaatggttaataattaactagaggagggcactctgtcttccaattacacgttgatttgctaagtggctcagtgacaaggtaattaagatgaagaaagcaaatgtagcaggcacagcgtggggtggacagtcagctgtccgtgtcttctgctgagatggccacaggactccaggttcccctgccgtggctggccacaggactgctgcttctcctcagtgtccagccctgggctgagagtggaaaggtgttggtggtgcccattgatggcagccactggctcagcatgcgggaggtcttgcgggagctccatgccagaggccaccaggcagtggtcctcaccccagaggtgaatatgcacatcaaagaagagaactttttcaccctgacaacctatgccatttcgtggacccaggatgaatttgatcgccatgtgctgggccacactcaactgtactttgaaacagaacattttctgaagaaatttttcagaagtatggcaatgttgaacaatatgtctttggtctatcataggtcttgtgtggagctactacataatgaggccctgatcaggcacctgaatgctacttcctttgatgtggttttaacagaccccgttaacctctgcgcggcagtgctggctaagtacctgtcgattcctactgtgttttttttgaggaacattccatgtgatttagactttaagggcacacagtgtccaaacccttcctcctatattcctagattactaacaaccaattcagaccacatgacattcatgcaaagggtcaagaacatgctctaccctctggccctgtcctacatttgccatgctttttctgctccttatgcaagccttgcctctgagctttttcagagagaggtgtcagtggtggatattctcagtcatgcatctgtgtggctgttccgaggggactttgtgatggactaccccaggccaatcatgcccaacatggtcttcattgggggcatcaactgtgccaacaggaagccactatctcaggtctgtattggtgccttcatccaatcaatgttccaggcaaaacactttttaaaaaaatgtatttatttaaaattgcttccatatttacttatctttccaaatatttcatttctgcttctccttgtcataatag

SEQ ID NO: 8546 - DNA, 6000 bp, Homo sapiens
cttgtgcccggcctattaatacttttttatggggctgatcaatcctatttaaatgaggagctggttgcggtgactggttatattccatagattcttcttttaaaataatctggcaaaaccttaccgtaccaccatcagaccagttctgtctctcaataatctaattcataatgatgtccacctaacatatctgtttattcatgcaaggtttccaacaagaattgagatgaggtgggtttcaaaaagataaaatcaagaagataaaaaatcatcatcatgaaggaaaattaagaatgaaaattaaatcaaaagtataagatatataaacgtgaaatgttataaaatctgtacccttgccaatggtggaagtacatgagccaaaagagtgaattcggtaatgagagaaaaaaaaagaaagtaaattgcttctggagtttctagaaaatgaaattacatttttatgtgcgcattaaaagagggatattaactgcaataccaagattccttaacttcagagagtgttaagaatgtgtactctcttaaatcacagagaatgagaatatgaaatacagcgtggcagggcatggtggctcacgtctgtaatcccagcattttgggggaggcagagtagggggatcacctgaacccaggagttcaaagccagcctgggcaacacagtgaaacctcatttctacaaaaaaaacaattttaattgctgagtacagtggctcatgcctgtaatcccagcactttgggaggccaaggggggcagatcacttgaggccaagagttcaagaccagcctggccaatatggcaaaaccctgtctctactaaaaatacaaaaattagctgggtgtggtggtgcatgcctataatcccagctactcgggaggctgaggttgaactgcttgcttgaactcaggaggcagaggctgcagtgagccaagattgtgccactgcactccagccctgggtgacacagtgagactgtctcaaacaaaacaaaacaccagcctgggcaagacccccatctctacaaaacattttaaaaaatcagctgagtgtggtgttatgcactggtagtcccagatactcagaaggccaaggcagggggattccttgagcccaggaagtcaaagttgcagtgagccatcattgtaccactgcactccagcctgggtgacagaacagtaagactgtctcaaaaaaaacctgaaatgaagtttcatatctttatgaaagtaaaggaagatacttctgtctgaaggacatcagtgaatctaaattgccatttaagagagaactcgggctgggcgcggtggctcaggcctataattccagcactttgggaggccgaggtgggtgaatcatgaggtcaggagatagagaccatcctggctaacacggtgaaactccatctctactaaaaatacaaaaaaattagttgggtgtggtggcgcatgcctgtaatcccagctactcgggagactgaggcaggagaatcgcttgaacccaggaggtggaggttgcagtgagccgagatcgcgccattgcactccagcctgggcaacaagagcagaactccgtctcaaaaaaaaaaaaaaaaaaaagaactcacggtagtttggacaagtataattactttccagcatttagttgggaatataaagtcattccaacaaactacattaagtcctcacgtaacctcattgattggttcttggaaaaccacctagattagttcctccaagtaactcgtttttcaaggtcattttgttataatgttttatgatgttgatgagaaaaaaaaatggttttgttatatgcgtgatttcgcttaaagttgtagttccaagaacgagccgcaacgttcagtgtggtcttaaccataaaagctacaaccagtctaagtgttgtactgaaagattaataattcttcccctcaaaaatacactagcattattttcattcctataaggactactaaatttctcatatcaccatagaatttttgcttgctaaaattccagtattgacaatagcttgactattatcccataccgtggttcttggaattgctttaaacccactgtgggaagcgattggcaagcgggtactgtaacattgtgaggacccaagaagtaaggtattgggatgcagcttatttactgtaatgtctttaatgtgggcgagtggttccacaaaaccattgacagtacagaacatccataggttgccaacagcgtcttacgttagggaagacgaagtaggtggtattccggtctgggagccgagaccggatcgtccgccagggaagctgtcagggattatctgcggttcctgagtagctgaaaaccccaattcatgtttttgtgagtggagtaactgctcatcagcagcacttgccagcccgaagccctgaggcgtggcatcaccagacacgccttcccatctgggcaggatatgtgggctctgcttcctgatcatcccacacgctaacactggtctatgctgtggaaatgaagatcttcatttttctcatgtaggtattttaacatcagcaggttttgtgagaagcagctcagtgtgtaattaggattaactccaagacaaacaatatgcatgaaagggatggatgtgaattttgctcagagttgtgggctgtaaaaatgcggctgggcacagtggctcatgcctgtaatgccagcactttgggaggccaacttgggagagttacctgaggccaagaagagttcaagaccagcctaaggcaacatagtgagatcccacctcgatttaaaaataaataaattggcccacatggtggctcatgcctgtaatccctgcactttgggaggttatggtgggtggatcacttaaggtcaggagttcgagaccagcctggccaacatgatgaaaccccatctgtactaaaaatacgaaaattagccggatgtgctcacttgaaccaaggaggcagacgttgcaacgagctgagatcatgccactgcactatagcctgggcgacagagtgagactctgtctcaaaaataaaaataacctttttgtaaatggggggaaatgtttcttctgcctctgggagagagactcttgcctggctaatgtgtaccccacattctttaaagggtttgggcttgcgatggccagatactcaaagtgactagtcagacttaagactattatgtaattttaatctttatcatggaatttatttttactttaaagcaagatggaaagttgccttttgttcctccggaggaagaatttattatgggagtttccaagtatggcataaaagtatcaacatcagatcaatatgtaagtaatataatttattaagaaaactatgttttagataacagggaattcaggccattaagagcccccttataattagggccactcctgtttgcagagtgattggtttgtaaacattcctggcagttggtcttaaacgtgaccaatttcttaaggtgaataggggcttccttttctctcctgtgttggaagggcccatgcaacctgccccccccacccccaaacacacagatggctccgaatgcattttcaactaagggcccctcatcaattaagagcagctgtcagcttggacggtgggcacagacactgggatagtcagtttagatcactgcactcctggcttgctgggatctgaaggcattgcccgagactgagcatacaggacatcccttggggtgagaaacctatggatatgctgtttcaagcctcactctgcctgggagggtgtgtcatcaggactgacaaacatttgagagtcctgatctctcggaatctttcctgacttctgcaggatgttttgcacaggcatgctctctacttaataatccggatggtgtgttacgatgacggtctgggggcgggaaaaagcttactggctctgaagaccacagatgcaagcaatgaggaatacagcctgtgggtttatcagtgcaacagcctggtgagacttcgttactttggttagctgcttgcccatcaagtcgcaacacccagggactactgtttttgaaggctgaagaaatacaatccattatatatggaatatcttggcctggggatagtgaatgaatattaggccggaggtcagccggctggcaagacagtgcaggtttgtgaaatatttgttagggccagtggcagcactcgcttgtgccgggatttaaaaggtaaacaaagcagctgaggaaaaatgtatcctccaggggccgaaggcttcttccatttccgaacgttgttgccctcctagactgcgtgatcagcctttgcaggctgcagtcgctgtttgctttcctctgaaggagggcagaaagggcccacgtgcagggaagctcatagtatgggttccactgacccaggcaggcatgtgtggtcggcttgcttaggagaggtcttaagagggtcaggtgtgtgcctctgctagccaaattaagttcacgaagagacagatgaatgttgctcttactctatctttcatgtaatgtaggaacaagcacaagccatttgcaaggttttatccaccgcttttgactctgtattaacatctgagaaaccctgaatcctgcaatcaagtagaagtcaacttcatctgaaagttcagctgttttcaaactgcaatgctgaaatgttatgcaaataatgaagttatcccttgctctagattttctgaagaaaatggattgtgtaaaatgctgatcatttgtttattaaaatgtgtcctattacacagtgagttaactctcaatgaagtcatctattttctgggctaaaaaacttcatttgtctttttcaacttctaataagcttaacctaagtgtcacagaagcctaggtgtcacagaggtccactcagtgacaaacacacactgaaggcctgaggaagacgagatgtcacagaggtccactcagtgacaaacacacactgaaggcctgaggaagactagatgtcacagaggtccactcagtgacaaacacacactgaaggcctgaggaagacgagatgtcacagaggtccactcagtgacaaacacacactgaaggcctgaggaagactagatgtcacagaggtccactcagtgacaaacacacactgaaggcctgaggaagacgagatgtcacagaggtccactcagtgacaaacacacactgaaggcctgaggaagacgagatgtcacagaggtccactcagtgacaaacacacactgaaggcctgaggaagactagatgtcacagaggtccactcagtgacaaacacacactgaaggcctgaggaagacgagatgtcacagaggtccactcagtgacaaacacacactgaaggcctgaggaagacgagatgtcacagaggtccactcagtgacacacactgaaggcctgaggaagactgaggacatgggctcagtggtggcttcccagtcatggtatcactggcatggacctctgtccggcagaggtgtggactggagaccaggattcatgctggtctggaacagtgacattgccaacttaagacacacaaagcagattttcagaagtgtctggtcaagataacatgctggccaaccacaattcctagagttaagagaaccttaaaagattaccgctcatgctaaaagtatgtaaagatcccatgtacagtatgatagtgtactttttttaaaggactgtcaatatacaaaactttaaagattaaaaacattaaaaataaaaccatgtccatttaaaagtattttatttttttccagtcaaatgactagttaacaagaagagtaaacttattaaacatgctctaattataaatcactgcattaaggacaatgaaaataatcaatttcggttatacaatatatacagttgtgctgcaaccaaagtaatcaggtgaatgaactgaatatcatacatctcaaaatagcatcctaagctgcatattatgttatccac

SEQ ID NO: 8547 - DNA, 6000 bp, Homo sapiens
tttttttttttttttttaccctcttggccttagatctttttatagccaattttgaaaatatttaaatttaatattttaaagctagctttaagtgaagttttgttctttttgttgtgtaagtagcttaattagatttttgtttttgttttcttagataatgcctgtgttctttttgccgtctctgttcttatgtttataatcagttcaatgctggtttatggagcaatttctgtaagtatactgtattttcatcttttagagtttgaccttaggggagcttagtaatttcctatatgtgatacaatgttatggttgttattttttctccagtatcaagtgggttggctgattccattcttctgttaccgactttttgacttcgtcctcagttgcctggttgctattagttctctcacctatttgccaagaatcaaagaatatctggatcaactagtaagtgtgtatgctcattaaacttatttttttttcattttgagtaaaatgtttacatttaaattctgaatcagccttaggtattatttttaactactccgcttgcttttgaaagtgtcttaaaataattatttctgctctcttagctactgtgacaaaactggcaagatgaaagtagagtaatttcttaccatccatttggataatgcagtattaagagttcctagaaatggatattatggaactagtagttcagcttttgtttttgagcatccaaaggtacagtaatttgactgtgtatggcactctttaagtgactagcttattgtctttacagacatctgtagcaagtattccagtgcctactatgtttttagccctttgctaggcactgttggtgaatggtgtggatataaagataactgcgaatattacagtttagcgagcaaactgtaatatttggggagtcaagatacatgaagatgttacctgtgataacaagcgggagctgtcacagcagcagcaaataaggaacttcgattaatgtcatatggaggggggcagggaaaactctgggctgggtggccaaggagggcgtcgtggaggtggtcagaaggagatatgggatctaggtagatgaaaattggcaggagtatcctcagttcatttccaaagtgctgtctttcagaacttttcttcccactaccagatttcctgcctagcccattttccacaccaccaaattcatcattcatttattcagaaaacattcgctggttgctcttatgtgcaaggcactctgctaggtcatagagatgcatcagtggagcttacttcctggtgaaggaatcaggaagttgacagttaactgatacaccattgtaggttactgtgggagtggatatcacatgggtactaaacctgggctgggaagtgagatttgaattgtactcaggagtttgaacaggaattaagatagagaaagtatagaagacaatgttccagataaaagagagaccttgaggcaagaagcagcatagtgagggcactagaagctggccatggtggctggcacacagagggagggtggggaagcctggagaaaggtggccaggggcagggctgttggcctggtcagccacggtcagcggcttctgtgtggctctctgctcatgtcatctccgggggagaaatttcaagtggtgcctccctgccttctgagtaaaacccttagcatagcattccctcatgagctccaccttctgtgtttttctttttgtttatagatgaagatcaaaaaaacagcttttttcccaaggagacaacctggctggggtttggggagtagtgtgttcttaaaattttttttttctatttttttcagtcctttgggatttctgtttatgttgctttttaaatgaaaatgtaattaggccttcttgttgacatttccattaaaaacaagcataacttaaaaaaattaaatcagctttatagaaaagaagataaaaatttattattccttttagagaccctggtgttttctctcctctgttttgttcacttagtgcctcagactggaaggtatttcctctgttggttagtttttaaatctgaaattcttcttttataacacctttctccctgaacttagctcattgccttgtacacagtcagggctgattaagtatttaaatgaatatagctgatgcttttcagtagaacagagtatgtctgcagtaaaacttatgtcttgcctgacattgtaaccagtgggtgtatttttgcccctgtctgatgagagttgagacaaacgattgacatttagaaaaataattttccccttgtagcattaaaatggcccagtttatctgtagaacttacacagaactgagcatctcctgagttaatgatgcaagtgacacagggactgatctccagtgccatataggcgatagtgtttttccaaaggccagaaagatggaaaatagtgaaaagtaaagagaaaacgagctaaatttagactttttggagcattgtgggttatcaaatgtactctaagtgattgttagcatgcattaatggtgataaggcttaaaatttaaaagcactttgaattaaattctgcttatacatttttattaaatatcacttttgactttggtgcctttgtattcttcagatgctcttcaggttatcagcaagtgctagtgcgatggctgacttgtaaatgtgtgtgtgtttctttaatagcctgattttccctacaaagatgacctcctggccttggactccagctgcctcctgttcattgttcttgtgttctttgccttattcatcatttttaaggtacgttgctgactaaatctttaggggtgactgagattgacactgtgaatctaaacctttttgctgcctttcaccttacaagtcacaggagattgaggatttgtggggacagtgtttattctggcacatgagcagagatagcttctagggaatggtttctgttgtgtttccaaggaatggttgtaactgtcaggatccttctctgagtgaaaggacctactttttatgtttttgaaaaggggttcatgatttgtattgaaaatctgttaaaattcccaaggttcacaaacccagaatttcttctgcagcacagtgggttgacctgaattgaagctccatctctggtttctctctgaaatgttggcgatgaaactcatgacacttaaatgagagcaagtagggaaagggcctggcctgtgctgggtccacacagaggtcagctcccttctacacagaggatgtgtggggaaagcattctaagtcactggcattttagagcaggtagtctgttgagtttctagcagatgtcaactttgtttttattcttccaggcttatctaattaactgtgtttggaactgctataaatacatcaacaaccgaaacgtgccggagattgctgtgtaccctgcctttgaagcacctcctcaggttagctactgttggatagagtaaaaggtcaccagtcactattgactgttccaggagaagaacctggagcttgactttctctttcatgctgtaacctatggtttgggcatgaaccctgggtacttttatgaacagcttaaaatccacaggattcaacattttccacttggaatcctgagtacctgggtcgcttgtctcatccagtttggctgttagatttactcattagaggtcctcattagtgtcatgtttgtaggggagatgacaggaaacagctgtgttaggcccatgtagcctggggcttctaaggatggggagttccattgactgaaacttgtgttgttttcagaaaacatccatatgatccaacgggggagctgacctgtctggggagatgaatacagtggtttcatgggtcttttggggaagcctacctttcacagccctctaattgctgctgtgctaccttcccaggttttcagcatataaaatatatgtggcccatctagggccaggctttcagacttggagtcacttcgattagaatgtcactcctccactgcataggtgtgcctgttaccctcgaagacatgatataagttcatgatcttctgactacaaactgattctgatgaaagtcaggatccaggagctagcgtcttattgggtgtttcctattgcatggtttaacccaactcctcaacacctgaagtgtaattggcactggcacttcatcggtcacactggaatgagggcagagcaatggcacccactgcctgcctgtctaggaatccttgtccagaagcaggactctctctccccacctccctctctccaccctccccttcgctagcaatcttggtaaaattccaggttattgaggcatctacttgggaacattttagctaacagtttcttcagctcttctttatggttttgtataaccctatttagggcataaagtctgaaagctgaattatctcacaaaggattttaaaggagaattaaatctgatacaattttttttctctctttagtacgttttgccaacctatgaaatggccgtgaaaatgcctgaaaaagaaccaccacctccttacttacctgcctgaagaaattctgcctttgacaataaatcctataccagctttttgtttgtttatgttacagaatgctgcaattcagggctcttcaaacttgtttgatataaaatatgttgtcttttgtttaagcatttattttcaaacactaaggagctttttgacatctgttaaacgtctttttgtttttttgttaagtcttttacattttaatagtttttgaagacaatctaggttaagcaagagcaaagtgccattgtttgcctttaattggggggtgggaagggaaagagggtacttgccacatagtttcctttttaactgcactttctttatataatcgtttgcattttgttacttgctaccctgagtactttcaggaagactgacttaaatattcggggtgagtaagtagttgggtataagatctgaacttttcatctgcagaggcaagaaaaatatttgacattgtgacttgactgtggaagatgatggttgcatgtttctagtttgtatatgtttccatctttgtgataagatgatttaataaatctctttaaatacttagggttgtcattgtttttaatccgttacttttttttaagataaaccctgacattttccattacagtgtattcagagtgccagtgtttattttttttttaactttgagaatacagttggcccttcgtatccatgggttctgtatccatgggttctatatccatggagttaatcgactgtggattgaaaatatttggggggaaaaatggatagttggatctgtactgaacatgtacagactttttattcttgtcgttgttctctaaaaaatacactataacaatttatgtagcattcacattatattagatattataagtaatctagagatcattttaaaaatatgggaggatatgcatgggtcatatgcaaatactataccattttattataagggacttgagcaactgtggatttgggtatctggagggagaacctgcaaccagtcccccatagataccaagggacaactgcacaatgatgcacagttaattagaaatcattttcttaatccattaactctaaatttgtggtgaagatatttcttgaatcacaggacagaaattaataccggtggtttgaaaagtgattgctgtagcaatcttttttttatgtcttattttttttctttccaacttcttaggttcagagggtacatgtgcaggtttgtaacatgggtaaattgtgttgcaggggttttgtcagtgttttgtcatccaggttgtgagcatagtacctgatagctagttttttgatcctcaccctctactctcaggtaggccctggtatctattactcccttctttgtgtccatgtgtacttaatgtttagctcccacttataagtgagagtatttggatttctgttcttgcattaatttgcct

SEQ ID NO: 8548 - DNA, 6000 bp, Homo sapiens
catgttggccaggctggtctggaactcctgagctcaagtgatcctcccaaagtgctgggattacaggcgtgagccactgcaccagtcaagtcaatgactgtttattgtagatgggccatggtggactgtgactgttcattgcaggtgagccttggcggaatgtgacttgttactgtagatgggctatgaattgcccttctagggtcaaaacctttctcttgggggaaggaagatacagtttagcttttgtcctttcaaaggaagttcagtgttatttctgaccttgtggtttctacacgtgtctgacgcttccctctgacctaggcccctggacgtggagcctccacctggtctggctctgccccagggctgcctcaggaggcaggaggtcttgtctgtccctctctgctttgcactacccagaagtgagacccgtgggcctgtggccagggcctggcaaggcctcttgggctgaggaggcccttttcctttggagcccagcctcaggtgggccccctctgacaagtcagtgcagaggcttctggtgaacagacttcttcctgcccccgtcttctcatgaaactttatctacctccctttcaccctctttctagacaggcctgctggcatttgaggctcccctagttagacagtggccactgtttgtgggtgcccactgggtgccaggctgtgttaggcatagcttcattgaattttggcagcagtcctggaatgtagatgttattatttccccattttacagatggagagacagaagccataagcagtttaatgacatcccaggaccacgcatctagtgagtggcaggatccggagttcctaaagctagtgctctggactgtgctgttctgcatattttttcattctttgttctggtcccagacattggggccctctcaagatagactgtgtagtgagtggggtccttgggtctaagtctcgcaggtgaatagggctctcaaagccacacttctcgccacctggctgctgggttctctcttccttacctgaggtcttggggccagtgtgaagggcagaggcagtcctgactttctgccctccctgccgaccagggttctgcacaggcctgctcactgtgtgtggcgtgatcctgcctccccgcccccgcccccggtcctgccagtcagccccggcctcaggaactggagagatgtgtatatgtttgccctctggcccctttgcctcttggagctgggcaggcgggcagcattcctgggactgctgtttgccagcagggcccgtcccaggcccacagcccacttcttggaggcttgtcagtgcagggccccttccagattagccttatatgtccccagcctgatggacaccctgtccttccttccccaaggaggatgatactctgaccaaagggcctgcacccagtctttactatagacaggaactgggccaagtgtgggaaggtgtatcagggccaggcctggggttgccctgtgtgggcagacctgcctcagaacagacagttccttgtgcccagccctgcccctgccccttgtgccgtcctcggtatccacacctgggggccagcatgcctggaggctgcctctgcacccaggttgtcctgagattgttcttgggggtttttgaaagcctctcagtggggctgggtcggcaatctttggccccaaagctccctggctgatggcccccaagagctggttcacagtgtagggtgggctgatggggtcccatggggaccacagcctctgttcccaataacagctccctgtctgcccttctgagaggtctggagctccctcaccagactgagcttctcagggtgagggccctgcctactctgttgtgcccctgcagccctgcacccagtaccaggctgtgttgtagcatcaggggatggggcctggggaccaaagtgctgcccagagctgagggtcctggagccacatgagaaggcttctccctgtgtacctgtgcagcacagggtagggtgagtccactcagctgtctaggagaggacccaggagcagcagagacccggccaagcctttactcataccatattctgatccttttccagcaaattgtggctactaatttgccccctgaagatcaagatggctctggggatgactctgacaacttctccggctcaggtgcaggtgaggttgtcatgggggccccccccacccaagacggcaacaggtcatgcctgtgggcagtggtcaggcagtctcctgtgtttactgagcatgtactgagtgcaccctgcctgccctgtctccacccagctggctccaaagggcaatgctgaggagaggaatggggtccgtgagctgcctggttaaggagagctcatgctcggaggtgaggtgaaggctgtgagctccagaaggccccagggccgcctgctgcacgcaggctcatattcactaggaatagctttactcactaagaaacctctggaacccccttcagaaggttatttgactcctgagcctctgttttctcatctgcaaaatgggaataataccttgacctgataagcttgtggagctgtaaggcagcacagagccagctggggtgtagctcttccatccaagctcccttccttacttcccctttccctgtgggggactgggggagagaagtccctgagctggaggtggtcagggaagcttcacagaggaggtggctcttgagtggacctcagaagaggggtgagagagctaaggaaggaggctgaggtcatccctggggaagtgacctagcggaggcctgagagctgcaaggtaggatatctgttgttggaagtgtctgttgttggaagtgggggcctttttttcagggagggtggggccagagaagtgtgtgccctgggataagtaggataaccacagtagttatgcccctaagggatgcccaccccacccctgtggtcacagaaaagctttcccaggtggcctaggcacctgtctcgtggctccagagaccaggctgcacctggacacacacaatgggaagggacagctctccttgtccattttccaaggagcttagcctcagctgccttgtccaggtactagcctccctcatagcctgagcttggccagcccaggtgctctggagcctcccccgacccacccaacacactctgcttctggtcctccccaccccccacctccccaacacactctgcttctggtcctgcaggtgctttgcaagatatcaccttgtcacagcagaccccctccacttggaaggacacgcagctcctgacggctattcccacgtctccagaacccaccggcctggaggctacagctgcctccacctccaccctgccggctggagaggggcccaaggagggagaggctgtagtcctgccagaagtggagcctggcctcaccgcccgggagcaggaggccaccccccgacccagggagaccacacagctcccgaccactcatctggcctcaacgaccacagccaccacggcccaggagcccgccacctcccacccccacagggacatgcagcctggccaccatgagacctcaacccctgcaggacccagccaagctgaccttcacactccccacacagaggatggaggtccttctgccaccgagagggctgctgaggatggagcctccagtcagctcccagcagcagagggctctggggagcaggtgagtggcctctgcattccttgggaaattgagtgggttggtcctaatgcctggcacttggcaggccctacacctgtgccctgcgggcatctcgtattcctcaccaggaagacagggcacaggggcccgccttcccctacccccagggcctcgcccagagcaggacagactaactatgagatcagagcagaagcacccttaaagatcacccaagagagggctccccaaactcacaatccaaacttgcagcccctgctgcaagagtgaacgttataccaagtccaattttttattttatagcttcgtgggaattttacgctttacactaaaataagtctgcttatttccatacaaaaatgtgtgctttgtatcactttttgtgatatccatgccatggtccagccagggtccggagttgatgtggcaagaaggcctggctttcgggccctgtgcgatcctggtttgggtgcatctgagtgggtggtggcaaagatcagggaggcaggagctgcttctgggtcttgtagtggagctggttgctgctgctggcggtgacctggccaacccaatctgcccctgccctcccacaggacttcacctttgaaacctcgggggagaatacggctgtagtggccgtggagcctgaccgccggaaccagtccccagtggatcagggggccacgggggcctcacagggcctcctggacaggaaagaggtgctgggaggtgagttttctttcaggggggtagtttggggtgaattgctgctgtggggtcagggtggggctgaccacagccaaggccactgctttggggagggtctgcagcagagcccaaggagccgctgagctgagctggccccgtctacctgccctaggggtcattgccggaggcctcgtggggctcatctttgctgtgtgcctggtgggtttcatgctgtaccgcatgaagaagaaggacgaaggcagctactccttggaggagccgaaacaagccaacggcggggcctaccagaagcccaccaaacaggaggaattctatgcctgacgcgggagccatgcgccccctccgccctgccactcactaggcccccacttgcctcttccttgaagaactgcaggccctggcctcccctgccaccaggccacctccccagcattccagcccctctggtcgctcctgcccacggagtcgtggggtgtgctgggagctccactctgcttctctgacttctgcctggagacttagggcaccaggggtttctcgcataggacctttccaccacagccagcacctggcatcgcaccattctgactcggtttctccaaactgaagcagcctctccccaggtccagctctggaggggagggggatccgactgctttggacctaaatggcctcatgtggctggaagatcctgcgggtggggcttggggctcacacacctgtagcacttactggtaggaccaagcatcttgggggggtggccgctgagtggcaggggacaggagtccactttgtttcgtggggaggtctaatctagatatcgacttgtttttgcacatgtttcctctagttctttgttcatagcccagtagaccttgttacttctgaggtaagttaagtaagttgattcggtatccccccatcttgcttccctaatctatggtcgggagacagcatcagggttaagaagactttttttttttttttttaaactaggagaaccaaatctggaagccaaaatgtaggcttagtttgtgtgttgtctcttgagtttgtcgctcatgtgtgcaacagggtatggactatctgtctggtggccccgtttctggtggtctgttggcaggctggccagtccaggctgccgtggggccgccgcctctttcaagcagtcgtgcctgtgtccatgcgctcagggccatgctgaggcctgggccgctgccacgttggagaagcccgtgtgagaagtgaatgctgggactcagccttcagacagagaggactgtagggagggcggcaggggcctggagatcctcctgcagaccacgcccgtcctgcctgtggcgccgtctccaggggctgcttcctcctggaaattgacgaggggtgtcttgggcagagctggctctgagcgcctccatccaaggccaggttctccgttagctcctgtggccccaccctgggccctgggctggaatcaggaatattttccaaagagtgatagtcttttgcttttggcaaaactctacttaatccaatgggtttttccctgtacagtagattttcc

SEQ ID NO: 8549 - DNA, 6000 bp, Homo sapiens
ctaaaaatacaaaaaatctgccgggcgtgacggcgggcgcctgtaatcccagctactcaggaggctgaggcggagaatcacttgaacctgggaagcacaggttgtagtgagctgccaagatcgcgccactgcactccagcctgggtgacagagcgagactccgtcttaaaaaaaacaaacgagcgtctcactttctctctcctattccatttcccttccccagggttcattccatgatctgctccgtagagaaccaatgctgcgcatgcaggagggagaggggcattctcaactctgcctggacaggctgcagctggaggctattcataaggtagtctctcatcctctccaccctccactctcatttccccccagttctgggcctggggctgatgaaatggtagatgaaaaggttacacagatgacaacctcctcctcctccagagcatgacagacgtacctcattcactggcttttcattcttacctctgtcacccctcatggtcctgtcctttcagattgtggctcattttttttttttgttcatacagctaggagtcaccctaaagcaccacccatgagcatctctctcttgttttctgttctcttcacaggtacgtttcagcccaaacctggactcctatggatggctggtatctggggggcagtcagggctggttcgaatccattttgtccgtggactcgcctccccactgggccaccgtatgcagcttgaaagccgagcccacttcaatgctatgttccaaccatcctcccccactagacggcctggcttctctccaaccagccatcgccttctgcccactccctagccttggcccacaccagatccttggagtgaagtcggtcaagaacaaatggcccctatgcacagagccataggaactgggggccttccctggacagtgatcatgccaggcctggacctttaggcctgcctccccaggactccttagatcccactctttctacagacttctgtgatcacagccccctgcgggcaggggggctctccctccaccaactctcaaggctcctcagcctaagactatggctcatgagaaacactcaggcctgacctaggcttgggagtcaaactgctcatattgagcatattgttaagtgggtaaagccaagtaaaggtactgggtgtttttgtgaccacttgtgaatgggtgtatggagaactgaaaagggtatctgcatgaaggctcctgtctgactattccaggatccaatattactgccttctgaaacttcctctttagggtaaccatcatgtatgcccacgagggtgatagtaattcgtgagactgaagttgcttagagtacttctttgaccaaggaataccacagacaccctaccgatagaacagtggctcagatcttacttgctcctgcttacgaagtattcccaatcactggtcatctgaccctacttgaacactcctgaacagtcatgttttttaaaatcttcctttatatcaagtcagagagtatacttctataaatttcactcatggatgttaggaaatctagtcatcttccctgtgattgccctgttaagtatttaaccatagctatcatgtgtttcccaaatcttctctagattaaatatcttcagttacttcaaccattcttttacacgtcatgatttttgatccttcatgatactgtcacattgttgactcattagaatgtttacctacttcagttctatgtataggaggtgtttagaacccaagtactgtaatgtattgttatatctcatcttgttagagtcctcttgtgggatgctgcagactcacagtgactatgatactgcctcctaagcaaggacacaccccagtgatgagaaataggcaaaccatggtcttgaaatgcctaggagtataggctggggtttggagggaaatagttggatgacctcaggaaatagaaaaaaacaggcagctgctttttggagagagtggagatgagatcagtgcctacctggaacaaaaccctctggcattctagactggctgaatatgtagtgtagggactttatcatctgtcagaaaatctcctttaagaagaagcgatcaagaagtttagtcctggccaggtgtggtggctcacgcctgtaatcccaacactttgggaggccaaggcaggcggattacttgaggtcagaagttcaagaccagcctggccaatgtatggtgaaaccccgtctctaccaaaaatgtaaaaaattagccaggtgtgatggcacacacctgcaatcccagctactcaggaggctgaggcagaagaatcatttgaacctgggatgcagaggttgcagtgagccgagatcctgccactgcactccagcctgggtgacggagcgagactccgtctcaaaaagagttcagcccctatcctgtacagatgagaaaatagacctggaggaaacccaagtctatcaacagcagagaccacaacccatgtcagtgcaaagaagccaagtgttgcactaccctattgggatccagctcacattgagccagttttgttttttgagctgttacgcaagtgccttctgtcgaagagaagctttactcaattctacagggcagcccccttcctattttcagtggtagaaaagatgagacctggggatccacacttgaggctgtagattggtgctggcagccctgcttctgcaactgagtctcagccctagtcttgaccttgttctttttctctaacaagccttttctctttctaaccctccctcccaatatacccacttcatactatccattgttcatacacttctctacctttattcctcttctcatattcctcccttcgccagagtgtctttttccaccatcttcacctgagttcaattcatccttcaaggtcccggctcaaattccaccttcaccaaagagcttcccagttttctccagtaaaaaatagtttccctcccttgtgttcccaagggggaagggaggaaaaaggataaacaagcattaagcacttgatccattttaggcacttcgcatgtgtcacttgtatgaggtaggtattgccattttacttaatgataaaagagttggagagggtaagctgtctgtaaaaggtcaaggtcatataactagtaagtggtggtgctggggatttgaactcagtctaacttcagaatataactttacagcctaccacatttggtctcctattacatttacttttgtcagttcactcctctagcatgctgttttgcaaatagcattttagttaaatgtttgtgacattgacttctcttgcttccttactctgtttctccaggatttgtggcaggagtctccctgccttaatcataaaggaattgagtaaattgggggtggagctgggcaggtggagagcctgaaagagtgtgcctcctgacgtgtgggctccctggagataagtaaagcctgccagcctgacaagtccattgccagggatattgtagacatttccaacgctctagaaaggatattgctctatattcacagactcttagaatgttagagctggaaggggattaagaaatcacctagcttactggttttcaaacatgcagttgtgggccccgttaaaaatgggtcttttgagaagtatatacttggaaaaaaaagttggagaagcagctgtagtaatgctgcccctctcatccccacacacaaacatctgaaaaatccctagaactgaggagccgagtttggaaagtcaatagtgtaacctccctcattttacagatgcagagccttaacatcaagtctagtcatgaccaaggctgcacagcccgttagtttgggagccaatacctaatgtcttctgaggttctaattccaatgctttctgtggaagaatcatacatacgcagtatttcttaagtggctgtttgcggcaaagcactgaaatagttgctatgaggacgacaaatatgaacgaccccagttttacccactcatgagctcacagttgaggccagtgaagaacctagagacaaaacacgcacttaactataacttatagttccctaactacgattgctgagacaaggatcgtagttatggccagttatgcggggagggtgggctgaacaatgagactaccggattgagagaggcccgggtctcgcgcggagagaaggggcaggaggaggcagagggtcgaacttaggtgagaaatatggctggcgggccccacaccagggtccggcacagtccagctggaaaaggggtctctcacagagtgggtggccgagttaggccgctctccacgggtattcatggctcggtccacccccattcctgtcctggctgcgtaatccgaaggacgctgggaggaaggggcgggacttgtggcggaagttcctaggccagcctgtcacgtgggagggaggctcggcgctcaggtgagtggcgggtgatctgcggtctctggcttaaagcgtcgcaagccatgagtgcccacaaggtgtgtggtcatcctatatccgggcagtgacgggccctattttcggtttggagctggactcaggaaggttacaaactggttccaaccaagtctgaatctggagacggaccaagctatcttttgaggcacccaagctctgggtagaagccagagcaaagctgtcctcatgagtgtctccgtcgggaacggaggcttccaggtggtctggcttcaggaatgaggttggggtggctggtggctgctaccaggagtccatagcttcccacagcctttctctcttccccaattgtctaaggcgactcctgcgacaggaagctgtctgggaagcatccttcatgtggcctctgcccctttaagtcacattggaagtgggaaggggaagggagtgggcacaagggaatgtcaggcggcttcttagtcgtggagagggacggtgggggtgaccccctctcctcttggcttgacaggaagcatggcactctggcgggcataccagcgggccctggccgctcacccgtggaaagtacaggtcctgacagctggtgagtgtccctctaggacttgagtgggaccagggcagactgatttggaagccagaggcttgccccactgcaccaccctcacttcctgtttctattcggctctcttgaagggttggctgtctttcatcctacactgtccccagtctgttttggagggtggtccccaaggctgtttttaaggggtatgcgtagttggccaagctgtgcagtagggttttaggatttcaaagtcctcaaaaagctgaacagtcagccctgaaggataaaggcattgccccaggaggcctcaacttggaaaacattttaccgtatgcaaagcactttcatatacgttatggcatagggcccccacaaaggtgtgtgagctaggagggttacttgagtccacattagatcacacctaataagtgctgaatcaagactcttaccccagtttttcttggtattttttattgtgaaacatacaaaagaatgattaagatgtgtatgtacagtttaaatggcattaaaactgaacactcctgtgtcagtaatcagctttgagacctcttgagtgcctctccgtaattcacccaaaatttcctgagttttgtttatatcgttcatttgcttttgttatcatttactgcctaaatatgtatctccaaggttagtatattggtatctgatcactccatcctgatccatttggagtgatcagataccagtcactccaaatgcagtgattgagtactaacctcacagaggtaatgcagtgacctacctgcatttgttaccatcttcattttgcaagttagctaatgtaagaggatggcatgaagataagtaagtcttagagggggaatgtcagaaggccttagaacattggggtgcaaagagtgatcacattaagatgaggtcttgcccatgtttagagaaggggaacaggattctagtgatg

SEQ ID NO: 8550 - DNA, 6000 bp, Homo sapiens
gagaccttttggccacttgaagaatttcacagaggatttcagacttgtatcttaaagactatacttggtcctttcttctaatttgaaacaggagtctggataagccaaaggttttcccaaagtcacagaacctctgagaagaaaggctgggatgaaaatctactttcctgaacacaagtcttggttcatttgaatgtttcttctgggtgccaattcttgctcttggcccagggtaagttcctttggtcatgggtttccaaatgccttagcaataagtatactctgatatctagtttcaggtctacttattgatttgtctcttgcctttttatcccccttctcctcctcacctccctcctgcttgctgctgctgctcctgctcctgctgctgctgctcctcctcctcctccttcttcttcctcttcctcttcttcttcttcctcttctctctctcaatctctgtctctctcatataacacgtggtttcccccagccagaatacaactgtatcctgtctttatttttgacatttgaccatgattattgacttgctttagcttagcgaaggtaagggtacctatcatgcccttaggaattttcacatttgctatatttgtcacgacaactttgtcagaaatagattataatccacttttaaacaggagagataaggccaagaggttaaaactcttgaccaagcccagaatactagctacattaactaaagtaaaattaatttaataaagtaaaattaacttgaataatatattttatgtaacctgatatacccaaaatattatcatttaaacatgtattcaatatgaaaaatactaaggagggattttatatatttttttcataataaacattagaaatgtggtgtgtactttacacttagagcccatttgagtttggatgaggcatatttcatgtgttcaattgccacatatgactaatggctaccatattaaacagtgcaagtctacagcataaatcagagtatgagactttccgctaaagtagtgtcttcccattgcaatcaaaatgcaaacttgttaccatggcctatccaactgtagaagatctagaccttggctgcccctccacctttctgtcttctgttcactatgttccagccagattgatttcttactgtctactggacatgcaaagctattctcatctcaggaccattgcctgtgatattcctttgcttagaacgttctttctcgaaagcttttcatgactgcctctttcccaccaatcaggacttaactgtaacctccttaaagaggacttcttcaactatgaaggtagagctaggacagcacccgcacctgctgtcccaagtcatctaccgcatggccctattttgttttttatagcaactattattatcttaaattactttatgtgcttgcacatttattatctgtttctcatcattagagtgtaagcttcttaaggtgaaggaccttttattttgtccagagcaaaaaattcctggaacatagaacaacatcctgtatacattaggtacacgaggagtatctgttgaccaacaaaatgcctaacttgatcctatatgtcccaatcagattttgcagttgtgagatatgttttaccttaagtcacattgctgaatttctcatgtcatttttattattacttctcttatagagaatttatgtacctccttgactgagttgttcactttgccctttccagaaattgggaatttcctgaggaggttgttggtggtctcagtgtcctctttggccacttcctctcttggtacatggtcaactcacattcctcctcccccagcccaatggcccaagtcatctgcaaggtgacacagagcagcccacctaattgtctccttggggattccagtatctatgtcagaatctatgtctgccacttccactccccatctctctgatttggcctttcagcttcttcctctgttgatcttggctcatctcaatccattttacctcatcccattttctctattgtgagatcacccagaaattttattttattttattattattatactttaagttttagggtacatgtgcacaatgtgcaggtttgttacatgtgtatacatgtgccatgttggtgtgctgcacccattaactcgtcatttacattaggtatatctcctaatgctatccctcccccctccccccaccccacaacagtccccggagtgtgatgttccccttcctgtgtccatgtgttctcattgttcaattcccacctatgagtgagaacatgcgggagatcacccagaatttaagagcatgaacttcttagtcaggtatccaggttcagctctagttacctgtgtagctttgtcggggagttaacctccctgagcttctatttgtgatctgtagaaaagagatactattacttttcctcagagtgttactgggaatatgaaatgagatagtgaatgaaagtctttttgaaatagatcataataagtgcacaagatgtgttagcaatcattctcacacttttcatctttctgtctatttcccctatgtgctcttaaattcattttcccgtctcccatccttttgatggaaattatgtaggatggggtgttaaaattataaatttgggcatgagttaaggtcctaacttttctcagtgggttgtgtaaatgttggaggaaaagagtcagcggtttgaattccaactctgttatttgcttgctgttttaccttgggcaaattattttgcctttctgagccttagctgttttatctctgtaatagaaataataacatataccctttcccaaaaaaactgtgtgatgtgttagacacccacatgtctacagatgcatacattcgtgcctggtagactatcagtattaattcctgcctcctttaaaaaaaaattatctaaaaaagaagaaattttttgagatttagtgtcatttaatctacagggaaaggcacttatttttccttgggaaaagtttgagacaatgtataaatcatgagaattaattgagactcttgtgtctatgaggtgcaaaagcaatggacaggggtattattagagaacgttaaaccctggcagctcatttaaagtttcaagtctctgcagccccctagtggccattgggtgcagcagacgattcacagttaactgacaaattaactggagtcagtaatgcctttggtcaagaattgtatagagaaatagggaaaggctggagttttagtcttttttcatatttcaaataaaaattcctcttccagtaggtatgtcagaaaaatctgatgaaaatcaaacatatattgtaccaggaaagtattaactaccatagcattttcctccctcttttctttcttttccacccttcctccaccaagataggagcatattttcttctcgggtgagataattctttgccctgaaacttgtaaagtcagtgtatccagtgtgacttccagagagagggcagatgcctgtcaaattaagtgagttgccaaacatagagcaggaagaaagccattccgagaatcaatattcctttgttactgggtcttccacttgccaaggcattgccacaaagctggaaaggcccagctcctaggagaacagaggttccacctggccactatctcctgtggggtggtaggcaagttactgcggcccccaggagctcagtgagggaggttcaatgtgacactgtgctctgatcctgtgagaaaactcctgtgctacccgacaggccgtgagctccagagaggatcttgccttattcttagcttcaacagtcagcccaaggcctgacaaccagcctttaagaaggaatcaaggggatttgtgtgacccaaagatggtagttttgtctgaggatctagtgaaccacttgttataaaaacagctattatgagttctgtgttggcagctcaggagagacgaaaggaaagggagaggagaggtacagccattacaggtgagtaaaaaaggcctaaggttctgaaccctcattcccaagattgtgggcaaacaattaaatgctctgcaactcagtttctgcatctgtaaatctggaattaaaatgtttgccttacagagactaggggaggttacacatgttcagacaccattctgagaaaacagagcgactgacaggggtctgaaaggtatttgttgtagctgcagaacaactctgccagaccaagaccatccatccctctctgcccccctattcccaaattctcctgtgtggacggcaggactcctaagctcccaggaatgcattcaaataatagatgggtcagaaaatattctgtctcagggccttaatacaagctgttctcagatttgccagtgtcgcgctgccaccctctccccacttcctcctcccttcccactcccccctcccttcccctctcctccagttttattctggaacctgtttttccgaagtcggacccgtttaatctcttaaatgtataattagggagagtgcttgattgcaaaggcctcttccagttctcacatttgctccctttcacactgcagagaaatagggcagggaatctagaggaggggaagaacaagagactggagagggaacagagggagggtggggcgggctcactccttttctcaatgaatgccgaggcctctgcagatttgcataggagccgatcgagccacgccattggttggagggtgcgggtggggcggggcgaggccggactgcgtgggtcgggcagcagcgcggagttggcttgtgagccccgccccctccgggccccgccccctccctgcgcgcgctcgcgcggctcagccagctgcaagtggcgggcgcccaggcagatgcgatccagcggctctgggggcggcagcggtggtagcagctggtacctcccgccgcctctgttcggagggtcgcggggcaccgaggtgctttccggccgccctctggtcggccacccaaagccgcgggcgctgatgatgggtgaggagggggcggcaagatttcgggcgcccctgccctgaacgccctcagctgctgccgccggggccgctccagtgcctgcgaactctgaggagccgaggcgccggtgagagcaaggacgctgcaaacttgcgcagcgcgggggctgggattcacgcccagaagttcagcaggcagacagtccgaagccttcccgcagcggagagatagcttgagggtgcgcaagacggcagcctccgccctcggttcccgcccagaccgggcagaagagcttggaggagccaaaaggaacgcaaaaggcggccaggacagcgtgcagcagctgggagccgccgttctcagccttaaaagttgcagagattggaggctgccccgagaggggacagaccccagctccgactgcggggggcaggagaggacggtacccaactgccacctcccttcaaccatagtagttcctctgtaccgagcgcagcgagctacagacgggggcgcggcactcggcgcggagagcgggaggctcaaggtcccagccagtgagcccagtgtgcttgagtgtctctggactcgcccctgagcttccaggtctgtttcatttagactcctgctcgcctccgtgcagttgggggaaagcaagagacttgcgcgcacgcacagtcctctggagatcaggtggaaggagccgctgggtaccaaggactgttcagagcctcttcccatctcggggagagcgaagggtgaggctgggcccggagagcagtgtaaacggcctcctccggcgggatgggagccatcgggctcctgtggctcctgccgctgctgctttccacggcagctgtgggctccgggatggggaccggccagcgcgcgggctccccagctgcggggccgccgctgcagccccgggagccactcagctactcgcgcctgcagaggaagagtctggcagttgacttcgtggtgccctcgctcttccgtgtctacgcccggga

SEQ ID NO: 8551 - DNA, 6000 bp, Homo sapiens
tgccacagcctcccgagtagctggattacaggtgcctgccaccatgcccggctaattttggtattttttaaaagagacggggtttcgccatgttggtcaggctggtctcaaactcctgacctcaagtgatctgcccgcctcggcctcccaaagtgctgggattacaggcgtgagccactgtgcaggtctcttttacttttctttaggcaaactgggtcacaccttcatgctagaactttgcatattctataggggctggggggggggtgggggaaatttctcagatcaccacagggcaccatcactgaagatcaaaccactttacacaaccagcaaagacatatcattgtagcagtattaagttttacacttggcatttgggtgagaaacaaagaaagtttggggcatttcaaacaataaaagaagcaggcttttgaaatgcaaagatatagatccctttcaaggaatcgaatataagaataaaaggagggagaggagttgagggtagtgggctggtgaaaggagttgtttaatggaaagagaaagatccagaaaggtgactgtcagatcccttagataaagccacccatctacccgtcaaagatgagaggaaaatccagctggctttattcttttgacaaagattcactgatgtggcagaaagatgaggtaaggggttggtaatagctcatcctcattcaccacgtggtttaaactattccatcactcactctataagaaagccttgcaggaaacccaggacatgcggttttgacaggatctatagtggcaaggaaaatggagaggaacacagaggaaaggggagctgatgtattatttacagtggagaacttgaacagagtcaactgcaggagtcagcccaaagacttgtatctgtatgactgtggaataaagacagacagatctttgaattttcactgccgctctttttgctgctgggccagcatgtgtgcgactcatcttctcactgtgctgcaatctgccctgctactgcttacctttccctatggcccagaagaggtaaagacctcaacagaaacctgtctgggcctctgtgggtgaaatttcgttaggttggcacagagggtgtctcgctgattgtgacaggtctaataagcgtgcagatggcaagaagcacacacacagccactcgcgcacacacagcctccctgaagtcatgcagtgggcagagaggagggactcagagaatctgatccaaaaggaacaaaggctgcagcctctgcagtgggctgagcgagaatgatggggagacggctacaggaaacgagaagcgaagtgtgagaatccacagcaaaagccgccacagagcatatgcatcggacttcacagcttcctcctgcttccagcttgcatttgctccatatgctgctttacactgctttccgggccataatgggtttcattccatagtttttatactaacatgaatgactcacatctgctccagtacccaatttgctctctaatgtcttcggctgtgaggagagaacagcttacacagaactcgccaacaacaggagtggtaaagaaggtcctgatccaggacaagaaaggtcagaaccctaaatgcgtcagctgggagggtctttgagagaacatgacattgccgatgggaaaccacagacccagaggaatgaggagcttggctcaacaatatcaagactgaggaggtagatctgttttaggagatccaggagaaccaggagagtcctagttcagagtgtatttattttttttcatttcctgccatgttaagtcttttgctaggagcttttcctccccatattggctgtgataagaaaaaagtaacttggattaatcgccaatgatagctaatcccccgctgggatcaaccatactctgcattacttaagcttgttattttatttattcattttttgagacagggtctcgctccatcacccaggctggagtgcagtggtgagatcatagctcgctgcagcctcaaaatcctgggctcaagtaatcctcctgtcttagcctcccaattggctgggactagagacacctgccacttcgcctggctattttgttgttgttgttgttgtttagagacaagctctcgctatgttgcccaggcttaaagctggttattaaagcgtttcaaatatattcctgagcatgggggacccctggatagactgggttcctggagagacctacagaactaggccccgcatggacactcacttcacttccagatgtttgaagtcccacttgaaatctacttcagtcctaatgatatttactggtttgacaacccaaactgatatctgatatgatctctggatggatcagctaatgacacctagcaaaactggattcccttgacagcttccataggcccaggaaatcttcctcacttgagtagaggacaaaataatgatttgagaagaaaatcattcctggaaggaaattcccactctctgagacattgcagtccctgcacggagctgccttcaccccagggcctcagtttccccatatgccaaacagtcagaatgaggcacctcagcatctcagcagtgtggtgagcagcgtggtggtgctgcaccatctcaaaagcttggcggtgttcttgtgtaactgtctgccatctgttactcagaagcggcattacaaagcgctgagcaatggactcctgtgctgcagcttctgcctggagccaacagcagctcagcagcttgcctgggggtcccctgcagagcctgcagcagaacgctttgcaggcccgaaactgcaggtcccgggtgaggctcctgaaagaggtccaaggtgcttgggatgctgcagaggtgagttctcttgctgctccccctacccctcccatgatgatcatctacctgggcctttgctgggacaaagcattggctggggagcctactcccacctttcagtgttcagagttctgataaaggcaaatgctagatcaaccctggggttctgtgtgatggtctaagagcgcaggtagatcttgaaagggctggcaacagtgctcaccttttctgggctgtttaatttcaactgcggttcccaaccccaaacatcttatctacagtccagtcaagaactctctgaggttgaggcaggacttccctgtggctgaaagataaggtaccaaaaacaggaggctttgagtagacgcctccatttctcagtacatgtctttggggagacatcttattgaagaaggaattccagagccctgatttacagctgtctcacctgtgcggaggtatgggagcttgccctacactgagctttatggggagagaggggcagggagaatggtggctgccacagtgggtgcatcgttctcacctccccaagaaactcgatgaagcaagcaaccctccaacaaaaatggcatggttcccgctgcctctgctccccagacagagcaaggtttccccactttgagtggtcagataacaccagcaccttgcattcagctttcaccactactcatttgcttgtcagaggaggtattttccctccattttacagatgaggaatcgaagactgggagaaggtaaatgacttacccaagactcacacagtgagtgtgacagctaggtcagtactctctggtcagtgatctggccgtgattccagcctacttgagcctacatgggaattggagttagaatttgctttgcttctagatccaagcggttttaatctgcaagtgggagggggatacaattcccaaaggcccttgggaaaaggggcttttgaaagatcaccctctgcacccagtatcctcctgcccagggtcactttccaagaatcccaagtggttgttccaactttggacctcttttcttgcaagcacaaagccctgatgcttacagggagagaaaacctttatgggagataattgcgccttaattttttaaaggatatctttaaagttaaaattagaccagctcagctttccttccgttaagcagaaaaagttaccaggcacctgcaggcaggcatagaaacaccctggggagttggctgaccgcggccttggccctcagtagccaggcaagtgaaccgcgggtttggggcagcagccctgccggcgccctggaatcccagccttggctgtggtaggacgagcacattgggggtgggaccccggcttcagcgccacgtgcagcccccgcgatgagcgggaaagtcctcccaggcacagcgccgcctggcgagggccggcccttgggtcccagctggcagctgggggtggcgggcatcccgagtgcaccgctcccgccccgccccgccttgccccaacccacgatggtctgggagctgcgcccagggcttggcgctggcggccccgcaacagcaccgagcgtttcggtcggcgggcggcggtagcgccccctctcagagccccgctcactcccacctgggctcgctccgagtcggcctgtctgtcgggcccgccctccccgctcactccctccgccctcgtgctcctcccggggtgcttggcacagcctcggattcctccctctcgctgctcgagtcagtttccctatcggcggcagcgggcaaggcggcggcggcggcggcggcagccgcggtggcggcgtggggaacatctcggcagccaccgcgcttctcccgctggagcgggcgtccagcttggctgccctcggtccttccctgccacgtttcgggtcgccctgcaccccccacccaggctcgcttctcttcgaagcgggaagggcgccttgcaggatcctgccgcccctccaaccggatcctgggtctagagctccccagagcgaggcgctcgccaggactcctgccccgccaaccctgaccgccggggggtgcccccgggacgtagcgccgcggagaggaagcggcaaaggggaccatgcggcgcctgactcgtcggctggttctgccagtcttcggggtgctctggatcacggtgctgctgttcttctgggtaaccaagaggaagttggaggtgccgacgggacctgaagtgcagacccctaaggtaggcggcttgccggcgcgctggcgctgagcggtggcttgcgggagggcgcgcagcccgcgtgccgggtttgcgggctcccgggaaaccagggcgagggtctgggtgctgcgagcaggtaacagccgccggatgtggctaccatgtgatgtttctggattttaaaacgctcgggggcatctccggacccgcggtgtgcatgagtggcagtgggtgtgggtggtgggcgcgcgctcgcctgcggagcggggctcccaacttgagctgcgcgcgagggtcccggggcggagggggctctgcggacgggcggcccaggggctggcggtctccgggcgctgccagagagtcgccggcggtcgggtcgggccagcgcccgggcgaagtgtggcggctgcgctgacctccttcccgcagctgccaggcccgacctggggaggccggaggccgggtgcgccgcgcgcgcctgtgcgttgcgggcgagcgccttgcagcctcccgggcggctgccacccctgttctctaactgttcccgaccctctcagctgcattggaagttgaatgtgcccagaacaccacgaaagagcctgtaaaaacagacgccttggtattggcggggagttgaggaaatgggaatccaagtggcttttccaactcctgctcagtcagttcctgtgagggagccagaaggttccccctataggctcactcttaccttcagattcagagccctgtagggggaaagggaaaacttccccatggctctccgaaggttcactgaaaatcagttgacaaaaggcagatcaataggagaaaaggcataataatttatttgatcatagtttttcgtgacatggtagccttccgttttctcttcacagatttggcccggggacacggaaggaggcctctgggggatttcctggccagcc

SEQ ID NO: 8552 - DNA, 6000 bp, Homo sapiens
gctggctaatggaaatattaaatataattgatatgtatagagacaatttagcatggtatctgtgactgtttaagaatggaatctagtattctctcaggaaattggttataatttggtgttcagctcttttgaaacttgcttctaagaaggaaaaagcaaaatagttttggacacagaataatctgcaaagacttggatgtaagaaattgttaccttgttcagggaatgggaataatttccatattctggagctcagatgccagatcataaaaggtcttagaaagcctgttgaggggtttgagctttgtcctcagggaagtgggaaaccaatgaagagttttaagggacgtgaagagtgtcagatctgcactttaggaatttcattttggctgaaacgtgaagaatggaatgatgcgatttggcagtaatttgaagggagtggttagttatatcagtcttggagacagacacaggtttgaatctcccttcagtgtttatgttcagtactactatttatcacaaatatttcacctttctgattctttcaggtccccaagacatttctttcaccattttaaatgttaaatatcttctgtaccattttgtatacctgccaagtattgggatcacttataaattagattttatatagtaggcaaaatctggtctccttgtttccacccttgccccttcagtcttttctgcactgaaccagcagagagatccttctaaaagaaaaatcagatcatatcaccctctgattagaacctcccagtgattctcatcttctaccccatcaaagcccatgccttatggcaattcagtgttctctgatccattcccactcctgagccctgcccccttggtccattaccctcttgctacattggttttctgtgtttttagactgtgccaagcatgattcccattaggacctttgcacttgctggaattcttttcctacagatatccacaaaacttgatctttcgtgtccttcaggactttgctcaagtgttaccttatcagagaggccttccttaaccatctagtatgaaatcatgcatcccacgtgtatacacactgacacatacacacacacacacacacacacaatctcacactctccttgtcctctatagattgttctgcacacacatgtaccataggagtttttaaccttctgatatttatatttgtttgtttcctccaccattagaatataagctctgtgaggacagagactttgttttatcactggtgaattctcaggatctagaagacagactagtaagtctttctaaaatacatattaagcatgcataaatattgtggatgaaatggatacacaagggagttggaactagatcttccaacattcttgcaggatggttaaatttcaccttgtttcaagcagaaatctcaaagcctttcaaagactgaacaagcagacatactgaccagaacttttgcatattttgaaaatatgctacctctatttttcagccttttacttagttttgaattctactgctataaccctcctctgattttctttagtatgggaaaaatgtcaaagaagcttatctccctgtagtgatgagctataaagggctttagtctatggtgggatctctcagggtctgccagaatgtcctaggcagcggtgttctcctgggcactggtgcagtttgcagtataagccatcagcagcaaacatgagccagagagtgtaggcgaatgtggggtggctctcagccagcccgaagctatgaaagcctgtaatccagttcctcttttaactttttccaggacataagggtatgttctgactcagggcttcttcctattgctgctttatctgatgtcataactagtccatcctgcaaggcctgggagacagtcaccttgacttggagcagaccttcctctacttcagtttcccctcacctccatcccaggttctggaagcagaagggatgtaaggtctgagtagagttttgcttgagctggtgggtggacttaaggccatggtggttgagtccactgctatgcctaccaagctttgtgtgctgctcactgactctgttgccatggccctccttgcctacagtccttcatcatgtgtatattttgtggtcactcttgtcatgccacatgagctaatttaaatggaattattggtcctgcattttttggtcacttgaaccctcgacagaactaatatgtattttagaatgaccatggaaaatatgaccgacaccgagaaggaacattttaaggttggtgacgctgattccacagcctgccaggcgcttacccacaactaggccttggcctgtttatctccctttccagcctgcagaaaaacaggctctgtacacagatgtgaagagctgtgcttgaagaaccagatgcccagctgctaatgtatcagcagacctgggctggctgaaaattagaaagaaatgtgctctcatcaaaacatgcttttaaaaactgtacttaatgtgtggaaatattgcattatagcagaatttttttctcctcaagaacaaatgccattgagctttgatttcaggcaagcttgaagttttgtttccaagtaagtgtggagcaataggacatgatttcatgaaatacagtgtaagatgctctctggcgtttaagataatcaccaggccttgtgttggtgggattttttcggagtctgattttcaaagcatcaattgtaataaggtgcttttggcattgaaaccgtttttggaagatgatgtactaacacaaatttagaagaaaatctgctttagtaaaaaggaggaaattgtttaatgcttcaaaagtcctgtgattttggctattagcatgcataaatgtgtgtttaataaggcaaggctatataaattgaacttttcctttccagtaagtcaattgtgtatcttgctcagtgaatgggtactacatgtagtaaattcacagaaagattgagttgtaaactttacaaaggattgcttagtcactgatggagtcttagaacaatcattcaccatagattttgtgatggtcaaatataaacaaatttcggttttgtgatggtcaaatataaacaaattttggtaagagtaataaaaataagtaattagtaatgctttggctgcagctctaatgacatgactttttttctgccctctcccccatcttatttttaccagtaggttgtgacagttggaagtgtcatgtacaacatgcggcgattaagtctttcacccaccttttcaatgggatttcatctgttagttactgtgagtctcttattttcccatgtggaccatgtaattgctgagacagaaatggaaggagaaggaaatgaaactggtgaatgtactggatcatattactgtaagaaaggggtgattttgcccatttgggaaccccaagacccttcttttggggacaaaattgctagagctactgtgtattttgtggccatggtctacatgtttcttggagtctctatcatagctgatcggttcatgtcctctatagaagtcatcacatctcaagaaaaagaaataaccataaagaaacccaatggagagaccaccaagacaactgtgaggatctggaatgaaacagtttctaacctgaccttgatggccctgggatcttctgctcctgagattctcctttcagtaattgaagtgtgtggccataacttcactgcaggagacctcggtcctagcaccatcgtgggaagtgctgcattcaatatgttcatcattattgcactctgtgtttatgtggtgcctgacggagagacaaggaagattaagcatttgcgtgtcttctttgtgacagcagcctggagcatctttgcctacacctggctttacattattttgtctgtcatatctcctggtgttgtggaggtctgggaaggtttgcttactttcttcttctttcccatctgtgttgtgttcgcttgggtagcggataggagacttctgttttacaagtatgtctacaagaggtatcgagctggcaagcagagggggatgattattgaacatgaaggagacaggccatcttctaagactgaaattgaaatggacgggaaagtggtcaattctcatgttgaaaatttcttagatggtgctctggttctggaggtggatgagagggaccaagatgatgaagaagctaggcgagaaatggctaggattctgaaggaacttaagcagaagcatccagataaagaaatagagcaattaatagaattagctaactaccaagtcctaagtcagcagcaaaaaagtagagcattttatcgcattcaagctactcgcctcatgactggagctggcaacattttaaagaggcatgcagctgaccaagcaaggaaggctgtcagcatgcacgaggtcaacactgaagtgactgaaaatgaccctgttagtaagatcttctttgaacaagggacatatcagtgtctggagaactgtggtactgtggcccttaccattatccgcagaggtggtgatttgactaacactgtgtttgttgacttcagaacagaggatggcacagcaaatgctgggtctgattatgaatttactgaaggaactgtggtgtttaagcctggtgatacccagaaggaaatcagagtgggtatcatagatgatgatatctttgaggaggatgaaaatttccttgtgcatctcagcaatgtcaaagtatcttctgaagcttcagaagatggcatactggaagccaatcatgtttctacacttgcttgcctcggatctccctccactgccactgtaactatttttgatgatgaccacgcaggcatttttacttttgaggaacctgtgactcatgtgagtgagagcattggcatcatggaggtgaaagtattgagaacatctggagctcgaggaaatgttatcgttccatataaaaccatcgaagggactgccagaggtggaggggaggattttgaggacacttgtggagagctcgaattccagaatgatgaaattgtgtaagttctatattatatatgtgtgtgtgtgtgtgtgtgtgtgtgtgtggttcagtgtgtttatgaatgtgagtctgtgcatcattttttaaattaaatagcatgcaaggaatggaatagcttttatacaagatccctttcaagatatcagtctttgcttgggtgccagttatcaatatgctctgcacacagagatcttaaatttatttacatcagaattttatttttacttttatacatttacacattttaactacattgtgactatgataaaatgagtgatgggacacagtttatcagatgacttaagacaggctgagaaattggtcttctattttgaatcacatggtatatactcagaaaaggaatatttaaaacatcacaataggtctctaacttcgtttctgagtacaaattgggaaaacccaaaaaggaaacaccctgaaaataatttcttggctaccagggctggctgaaaatatttttgtggcttttatgtgacattgtgttttgtgacaatataagttaatgtttctgcttaaatgccaatgctaaattatgacttcataaccaatcctgcttcttcagtgttatgccaacatgggaaaggccatccagcccttttgtagttcaagtccggttttattttacatccttattaaacaaaccctgtaccccactgatacagtgatggagagagaaataaggttctgtccacgtgtctagttgtcagggagcaggtcagagaaaagaaggaaaaatttattcttcctcgtggtactttacagtggcactgtgctcatgtagtaatatgaagtacccagttgttaagtgattcttcgactgagagttgatatttagagggctgttccccctttgcctaggaaagtgtgttgcactcaactcaccaaaagcaaaccagaaaatttgactctatgaacaatttctggggggaaag

SEQ ID NO: 8553 - DNA, 6000 bp, Homo sapiens
aggcatgagcccccgcacccgacctccttcccctaagtcttaccctggttgttatctatgatgatttttgaaagcaccttgaaatttgtcaatatcaggttcactgattgctttgaatggtaaagaatgtcactttcacttaaaatttaaaacaaattatttaacctctctacattaaaatccatctctaaaacgaaggagttggactattcaatttgtaaaaatctatctagttttaagagaattgtgacatgtagttttctcccacaccatagagtttgtaataatatccatgggtttgtggtcatctttttttttttttttttgtggcctctcttttctttttatggctatctctctctctctcctctgccctccctcccccagctgtttttctgtgagatttctaacatttcctttgcaacaaaggcattagctttgcttaaagctgctccagtgtcctagtcctccagctggctctgtctttgagccttgctgcactaaccctgaacaccacaggcctgacagtgtggggattagcattagaggagtcccaggaggaaaagcacctgaagttagtccttagaactctgttttcagaaaccttatctatggatagagacacttcgtgagagcccgaggacaagaactgcagacatagtttctaaggggagagggtggcactctgtctcccatgcaagctgtggtgtagggtggtccaagataggatttgttcactttcttgctcacaagcccacctttgtagagaaagtagcctcagaattataatttgagagttacagaagtttcctctcctttatatatttcctcagctagtcctcctgtgatccctgtaattactacattttcttttttgtgggggatggagtctcgctctgtcaccaggctggagtgcggtggtgcaatctcagctcactgcaacctctgactccctggttcaagcgattctcctggctctgcctcccaagtagctgggattacaggcacctgccaccacgcctagctaatttttgtgtttttagtagagacagggtttcaccatgttggccaggatggtgtcaatctcctgacctcgtgatccactcgactcagcatcccaaagtgctgggattacaggtgagccaccgccccgctacattttctgtccatacctttaaaaatgcaaatatcatgcagagcaataaagacttcaagtatactgttaatttcaattaggttaatttctcactttaattcttttaaaaaacctatgaagaacagataacttgacctatcacagcatttgaacaaattgaccctaatctctttactaacacacttttaccactgacttccaggtcaccatcctttgagttgtcctcccatctcttcatcctcacttgctgttttttcctgttttctgtaacttattaaaattggagaaacccagggcttggtccttggtccccttctcttctccatctaaatcttgtcacgttacaatatatgcttcataatacagaatatatttatttaatctttcggaaagaaggtagaaaagtttagcatttagaacatggtttctctatctcagcactgttgacatttgggtccaaataattatttgtgatagggactgtcctgtacattatagaatgattagcagcattcttggccactatccactggatgctgctagcaccctccagttttgacaaccagaaatgtcaccaaacattgtcaaatgttccctggggggtgggatggagcaaaatcaccatccgaaaccactgatttacagcacttttatgtaaaaccccaaaacccttaaattattcaaattgtaatctttgacttaatttggccaattcattttttttttaggtttgtatctcttaaagttacaagaatctgaataacaacaagagccaacaatagaatctataagccaagttttcagttttggacaacataagctgcttctggggaggaaacacgtgaaaatttgttttgtctttagccctacaccattattggtaaaaacatggatgttattttgcctttgaagcagcagtgaacaataccctaaattgaaattcaagtttagcttggccactttttgctaattgcatccagctgagaaaactaaggcttgaagaggttaatttgcccatgtctgggtaaatatacaaatcatttacttctcagccttttacattcgttcctggaagaatcagacaaaatttgggttaatcgtcactctaaattgtaaagctcttaatccatgtctgtattattatttgcattcatagataaaagaacttcaagttgatatgagatgtgaaggtcttcagcagagattgccagaacctttattttacagttcccttcttgcccacacctacactattttctttacatgaaaaaaagcaggccacatgtccttccctctgtcttccttcctttccctcaagattttccctcaaaacataccagtcatgctcttctaaacctacatgaacatcgataacattatcttaattcattttaaattagaaaagtaaaccatagacttaaacaaaatgtataaaatgatacctaataaaactatgtctcagtcctacctttgaactcagtctcctcagatgtagccactatttggccactattaactgatagtttatgtccttacagaaatttcctgtaggtcgggcagggtggctcatgcctctataatcctggtactttgggaggccaaggtgggcggatcactcgagatcaggagtttgagacccaccaggccaacatggtgtaaccccatctctactaaaaatacaaaaaaaaaaaaaaattagctgggcgtggtggcactctcctgtaatcccatctactcaggaggctgaggcagaagaatcacttgaacctgagaggcagaggttgcagtgagtctagatcccaccactgcactccagcctgggtgacagagcaagactccatctcaaaaaaaaaaaaaaaaaaaaaaattcttccgcatatgcaatcatttgtgtgtgtatacatgcatgtattatgtaagtaagtatagcctatacacaatttaaattttatggctttttcattcaaatgtatctgagaaatctcttcatataaggacatatgatttaccacattgtattttacagatgaagagtatttcacctgtaaggctgtatcatagtttatctactcagtttactatcagtgattaaggtggtttctagtttggggctattacagtgctctaatgaataggtttagtgttgatgttttattattattttgtttttaatgacaggtgctctgagtcataatattttttaagaataaagtttgttgagaattacgttattattgaatagtctgaataaatagaaaaaaacacatgacaacatctattttaaaaaacttgaaaaatgctttattatttcctgatagtcaatattgaatgaaagaaagaatttgcaaaaaaacttgacagggttcaatctttcaggaatgtgtttagtttaaaaaaatagttgccaagacaaattgagctttggaatttcagcattctacaactcataagctttacttatgaggcacacctatcaatgtttattccaatacactttttttctaaatagtgttgccagactctaaaagatgttagaattaattctttcaaatgtatgaatagtatgaaaactgggcaatgaaaagcaataaaagtgccagggtggctagggtaatttttcttctagaaattttattcctgaagattgttttatgctacttttgagctttaaaaaaaaaatctccgtgatactgtcatttgaaacacacaccggtctcatcacttatagcctaccctgtcagactgtatataatcatatatataatatataattgtatgtatatgtatatataactatatataatcatctcacattgaagaagtgtgtaaacatatctgttattacagtatgatcactggaaacagatgtatttggggatatagttccatatggtattccagatgtgtagtctttgcttaccaaataattattgtaaatttcagagaaaaggcagcaaataagtacatattttcatcattgaataatacatttgttcttcaggctttgggaaacaggatgtgcatcttttggtgcttgtttttatttttaatgattgataaaatggcatatttattgggacttaaattgtctttaaagagcaacagttgtaattggccaaaaaaaaaaaagcctaagaatgtatttcttaatgttgcataattgtctttacaaactcatcccataaaaatactcattataaacttggcattcaaaaaatgtcattcattaacttacaaataaaattgtaattacaattacaaggcttcgaggagattctactaggagggttccatgctaattgcacagttttaagtcttctaatttaatattaggtaaaaagataattatctcaagaaaaacacataacagtttaagggctggggaaaaaaaagtttcccctctgtgtttagcaatcacactggatttgaatgtaatatacagaaaatgttcgtgcatgaaaataagcctttttttcggtcgggggttagagggaggtctgtttacctatgcggtctcgttaggggagcaaattgaaaagcaacgactgctgagactttttgagtggtgccgggctgggctgtgtaccaacagcctcgtcaactgcagacggaactgcagcatcccttcctgccgtagtgcgtcagccattggctcctcagtgacacgtgactgacagagcgttttctgtgtcttttctcgcccatctgtgtgcagggcactgataggccgggctgatgcgcaggcaatttatcatcttgatctcccactgagtcagggagctctcctgtcaccagtattgatttcagaggatggactaaatttcctaggatttccattaagaattaagaaaaaagctctaagcacgcagggtagccagacagacatggatatgagatggcactgtgaaaacttgcaggtagcttcttctgtcacagccgctgctgagcacagcttagatctgcagcatgcagggtttaagataccagaagcctaaaaacaataataatgaaaataagaataaactcatttggataaactaattttaagatttatgttaaaatatttcttcttgaagattgcatgtcaaatttatgcacgctgtatgtgaaatgtggaaaggttgttttaaattttaaaatgtccttaaaccctgagcatggttgcttctagttttgtctgctgctttgtgtgagcttcaggggtttatcagcatgcttgtggcaaaaacaaccaaaacttgtgtctgtgtgtgtgtgtgtgtgtgtgtgcatatgtatgtatatatgtattaacttagttcaagtaaaagcatgaataaaagctgctttcagtacttgccagactgctttattattgttaatgacttgctgaaatttttgcttaaatatgcttagattctgaccatgcatgcttttgtggcagagtgggattttcatgagcatttgtaaagatggaatgtctgaattaaatgcatgtttgctaaaacagaaaacgtattagtgatcagtgattaaacctgattaatgtaaatatttcatgataagatatgagtaacatttacttacattaattctgcttactgaaaaaaatgcgtgtctgggataatgaaagtgtttatttctgaaatattaattttgattatttcaacaatagtaagattttaattttctaaaatgcctcccagatgaaataattaaaaacatttttaaagaaattatatcctagaggaggattctaaactgctgtttgtgtatgtgagagaccatgtgcatgttcatgtgtgtgtgaattccttggggaattgtttgataccctcctagctagtccttattctcgagaaaag

SEQ ID NO: 8554 - DNA, 6000 bp, Homo sapiens; identical to SEQ ID NO: 867

SEQ ID NO: 8555 - DNA, 6000 bp, Homo sapiens
ggcccggcctctcaccacgcctccggctttgtgagcgcgcgggttggggcgggggggtgctggcggggcgcccacggcgcagcctcccgcctctatataaacacacgcatcgcctcgctttggactcaaattcacattgagagaagcttttaaaaccaccagccctgaaatcctgcctcctgcttttccccctctttcattccttttgccttcctttcttttttccccatttcttcccccagcagcaactccagagccgagagaccgcgtcccgggacggactgccttttcttaattgatacaatagcccagctcgggttttccacctcctcccccaaccccaccccgcctcacccctcccgcccgctgccgccgccgccgccgccgccgccgccgccgccgccccatcgcccgcccggggctctgtcgccggctgcgtcccgtcccggccgcggcccgccggctccgcacccgcgctcgggccgcagcgcccgcctcgccgcctcgcccgccgctcctgcctcgggggtgctgcggcggctctggggctcgagcgcgccgccccgggcagcccagggacttttaggctccggcctctccactcgcctcagccagggagctttctccctcgcccccaaagtttctgggttcgttggaatttttggattcaggaattttttctttttttctttttttcacctaggaattttggggccatactgcaatacttttgacaaatcgaccgcactttctctctgctagctctctgcccccttctttttttccgagcaggggaaggggcttacgagagagaggctccctctggacaaagttttccaaagttttccgagtgtgatggtagcggggagagcaaacccaccagcttgactcacggcttcatctcaccaccccttgagcagcccctaagcccgctataaaggaacaaacaaacaaacaaacaaacaaagttgcaccccagtcgcctcgtgtttcctctcttcttttaggcaatttttttcctccctctctccgctcccctcgcagcctccactccctttcccttggccccttcctccttctctgtttcggctggaggtgccaggacccccggccgcagcctcccctcccccgccgctccggtcccctcccgtcgggccctcccctcccccgccgcggccggcacagccaatcccccgagcggccgccaacatgctctttgagggcttggatctggtgtcggcgctggccaccctcgccgcgtgcctggtgtccgtgacgctgctgctggccgtgtcgcagcagctgtggcagctgcgctgggccgccactcgcgacaagagctgcaagctgcccatccccaagggatccatgggcttcccgctcatcggagagaccggccactggctgctgcaggtaagggcgcgctcgctccgctgcactccggggtccgctagctgcgagcgcggggcagacggagcggcgggccggccagggggcgccgggagcctgaaggcactggtccccgccccgccccttccctcctctctgccgcagcagcccgggcttccccagcccgccggcagcgcggttccgggaccactggcgcccgcggcgcaggttcagggggctggtaagaggggttcccggacctgagggggctcccaagatggacttgcctgggtcgcggctggcctggcagggggcgtggagcgccccgggggcgcctagcgaggcgcggtcccgggggagggtccggtcctgagccgctttcgcctcccctcggtgctgcaagcccccagtcgccctcggctttctggggttggctgtgtcgctgggagccgaaaattgagtcgggagaggagggggctggtggcagcttgaattgccgatttaaaactgtgttcctgcggcgccgtcggcagcgccaggtacagtgtccctggtccgcggtccgcgcgagtgtgtctgttttgtggtggaagaggaagaaggtaacccaaggaaaaatgagaatccagggctctaggctttcggggaaaagggtctatttacttattgggtggggacagtttggcaggagagggaaacttgggagaggtgagtgtgggatccatagagagagagtgcgtgtgtgcttgttagatgccgcacaaccccactctgctggtgataacgggggtgaggcgcgtcagggaccagacccaggtaggtaatggggagattaacctggagttcacctcatcaagtgccagacaatcgcttttgcaatgtgatacacaccggttttcttcttggggtgggggagcggagcgcctctgcagtaactgcgggaggtgtatttgtgtgtacgcgcgtttgttctgttaggggaagcagggatgtcctgaaactgacaatccccgcactagagaggtgaagcgaaaggtgagcgctgcgacctgtgggtttacaggtgcgaaagcttggcttgaaattaacagacgcgtgcaatccgcgcgctcgcgcacacacgcactcaccctgccccgggacgagtgacagcggagcgggggcggggagggggttcgaagttcctctgccctgtggtctttccacgtcccggattaggcccatctctttttggggttgttcgtgcaatgaggtgggggtcctttcaaccaatggatgtatcacccccccaccccccgcaaagaaatccccagagcctttccctcgccaccacacttaaagtgtcaactgcagcggtgctctaggctttgggccgcgaatttaggaaataaaataacttgggcaacggctcccgccttttagagccagtctgctgaatccacggtctgtcaccacccacccccacttcgtttcctgacctctctgccccccctcaggtccccatgaccttttctccgaatcccacaagagcccctgggggtcagcgtccaacctgcacagaagttagggaggaggaaacctaagcctccccatccctccaacccggggccctagatctggaggtgaggagggaaatagggggtacgtgtacaggagcgcctaaggggttaatgagagccctctgaatcccagcgttattttttcggagtcatttatcagattttacggggggacctccaagggctctccgtttccaccgagcgccatctaaacagagcccagggctaaaaatacaacatttttgtataaattggactcgcggcccgagcggccgcccctatgaaagtactctttgtgaagaccgtggaaacggcggacaaataactctttattaatgccacaaaaaacgcactttaattatagttaggcagatcagaggcggggggtgggggcgaggcggcggcgacctcggaaaattcacaacccaacttttgtgttgaaagaaaagaaaaacagaggaaaagaaggagaggaaagacggagagtgagacggagcgagggagacgggtatagcagacggagggagggaaaccctcgcctcaccaccccttctgtcgcaccccacctccgcctagatttttcttaaaggggtagacgccgtctagaagggctgcacggcagggggaattatccccgccttccagcctgggagggggacagcgttcccgcggcccagcccccctcctggctgcgcgggcgctcccagctcgttccccgtcgcgcgccgggccggaggcgcatgtggaaaagtgattagggctccgggttctgcagagtcacttttcggctgtactggcgtgtgtgcacatttagctggaagtagttttctgtggaaaaaaggaaagtgaggagggggaccaacccgggctagggggactgagttgtcccctcgggggtgcaggagcgggtagatctggagcccgagtcggtacgctcgtgggctggcaggcggggcggctagacaggtggcgcccctcccctttgcgccgggtgctgccccggcaggagaagggttaacgtggggtggggtaactagtgccgacgtcaaaggtgagcgggacgcccttgcccccgcccctctgaggtctccacggtttccggtacccgcgcccggccggctccgccagccgtttcgagagtccggccggccccggccccgccatcctcggcttgcgccgccaccaccggggatctggttacctgcgcgggtcgccctgcccggtcccgccccgccccgcgctcgggttccaaactccagggcggcaaccaaagtccgtctccgttatttccagggcaaaatgcattaggaaaatcgcggctctgggcccgtgaccccgccctgcagagtcctccgagggccgccgggtccctgcgcgggccacaccggagagcggaggaaactccaacccccatctgtagttgctgcctccgggcaccgaccgcttaccgctataaataatctttggcctgcggccaccccgcggggtctcgccagcccgtggcccggagcctggaaatatttattccgagaggctcccgagcgcggggtgggggtgtgggggtgggggtgggggcggagactcccgcttcgggtccagctgtccgggatacctctttcctctcgaaagtcattaccaaaaaacagcctcctgggggtgcccctgggcctccgcctccttgcattatttattatcctctaggccctacttcgcagttcttgtgcacgctatgaaaaataaaacctgcgtgctcgtctgtgtgagtgtgtttggtggggagagggggcaggtgactgtaccccgggttggggtccgccgcccctccctcgcgggccctctgcagaagtgcaccctgagagagacccgggtgtggctcccgcagggttctggcttccagtcgtcgcggagggagaagtatggcaacgtgttcaagacgcatttgttggggcggccgctgatacgcgtgaccggcgcggagaacgtgcgcaagatcctcatgggcgagcaccacctcgtgagcaccgagtggcctcgcagcacccgcatgttgctgggccccaacacggtgtccaattccattggcgacatccaccgcaacaagcgcaaggtaagaactctgcccgttttcttccgcgcaatccctcccccacctcggggcaaggagttcctggagcccggggaatgtcccctaccgaatctgtgcccccctttgcacaccatgcttgaagactccgcagttccccgccgacaaggcctcgagtccggatccagggcctgctccggcctcctcttggtcccttttcttgctggccgactgcgtcatgggcacccccaacggtggcttggaagagcttgagcgtgcggggtctggggtgtccaaagcctgtccttgccttgctccacagagctggaaaaagaagggggcgggacagttggccggcgttcgccttttcgccacgtttcccagggaattccgaggactggagaccgatcattctaaaatcaaagctgtccttcccaccacaggctgcttgaagggagtcgcgggcaggcggctgcgcgtggaggttggggacagcttgtgggctgcggtggcggggcctggtcagagaggtgcggcgagcctgggcagcggagcgcacgggtctgggccgtgggggaagggcgggcggggggagagcaggcgaggcacgagcggggatcaaagcgcacccacccccccccgaaagaggaagggaaagtgggtgtttatcccttggatttcccgagcgactggaggaggcgcggaggaggcgcgcacgggacaggcccccgcccctcccggctgcgctaggctcccagcgctggcggcacgtgctgtttgaactgcagtaacccgaaagcggagccagcgggcgggccctaagccgccgggagggaggctgcgcgacctctcccactccatttttttccactgggtcagaggactcacccaggtttgaaacctaaggaaagggagaggcagccccccgtccctgagcggtggcagaccggggaggtggggaggcggact

SEQ ID NO: 8556 - DNA, 6000 bp, Homo sapiens
ctttcttatgaagggaaagagaaggaatcacttggctgactcattcttccagtaaagaaaaaggggaggaaaaacatccaccgattgtgcgattgggtaaagatgggagctgaatttgggagggaggctatacattttgaactattgagaaaataaaaatgaactgagactgagaaagtataaccttccttgccattcatcagacagggaggacagacacagagccagctgcaaagaaagaatgtttctcacgaggacccacaggatctataaagtatcgaacaaccttcttccagtaaccacctctttcatactcatgtctcactctataaggtcctagactgccaggaactttgctgtttaagtcatatcattaggaatgaaccatctacctcttgattggcaggtctaagtcactttgcctcggagaatcaacccatagctgcaaataaggggtttctggtcacaacgtttctcattaatcttaactttatagtttttaaggaaacaagaccctgagtggttggtccagacctatgatgactccttttcacacagtcttgctttgcttggagcctattgaagcactgcttcatttacattttactctatcttccttaaattatataccaaatatttttctttgtttggcaaggcaccccataattcctctgctgtggtgcttttctttgttgagtgagtcagtaaatctgacttggtcagactataggtttgtctctatagtgggtggggtgggggtcttagggcaatctgtacctgacatttccaattcagagtctctttcttgaatctcagtccaaatgtttgctgaaaaattatatctggaagtccctttaaatatctcagactgatatgaccaatacagagtttttatcttctttccacttaatcagtatgcttcttcctgtccctattctggttaacaaacattcatgtctcactagaaagtgaggcatcatctgtggctgctcttcctcatttccccacagtcggtcagccttgctacctccaggacctagcacagtgctgggcacacagtagatcctcggtagtgggttgaatgatgaatgaatgaagagaccacaggagtctggtgcagcttctgatcctaagctttatgctttcatcctcttgcatataccctcctctgctaggtaaactcatccatcccttggtcccagctcctctgggacacctccttgacttaaactaggaagacataggaagaactctgtgtgtccccagtatacttcgcgatgcttcatttaaactctgatcagtgttttgtagttacttgtttatagttattagtctgttttgatgggctgtgagctctttgagggcttgttcatttggtgtctgtcccctgagcctagctcattaggagtttgtaggtgtctgtggagcaaaatgccttatctgggagtctcccccagtagctatggtcgaaagtgacacaagaaggctggcagggctgggacaggatgaagaccgtgccagaccataggacaagtcaaaggctgaagtttctgctggaccatcttcaagaagttgcttcactcaggccattctacttccaggttctctcctcttcccctgctcatcctctttcctccttggaccactagctgccatactgttaccctttcctaatcctgccctcccttcaaagcccagcccagctctaccccacccagaagccttgaggccattggctgctcatcagcccactcatggattcctgtggcagaagacccttccttccagatatgtaaggagacttcgagccagggaggataaggaaggaacattcaatagcccatgtccttcaggagctcttaatcaagtataatacttaaaatatcagttcatgttttactttattttatttttggagacaggctctcactctgtcacccaggctggagtgcagtggcatgatcatagctcactgcagcctcgaactcctgggctgaagtggtcctcctacctcagcctcctaagtagctgggactacaggtgtataccaccatgcctggctaatttttaaaattttttgtagagatggggtttcactgtgttgcccaggctgatctcaaactcctgggctcaagtgatcctatcacttcagcctcccaagtagctgggattataggagcaagccactgtgactggcttgcattttactctaaatatgtatttttaaatgtaatatcatttctgtatattaggtataatattgatttttttaatttcaaaagcaatttaaagatctggaaatataaatcatacataagcctattacccagaggcaatctctattagcattttagtatattttcatctagcttttttgaaaatataatttttacctttttattttgaaacacttttagtcttacagaaaggttgcaagaataaggaaaacttcgctatttgcctagatctaccaatttttaacatcacatttcctttattattctctttgtctacaggtaatcataaagtctgaaaagatagcaaatatacatggtatcattaggacatcttcaatctgcattcaattatagtatctacatttccaggttttatggctgccctgtatttttacacatgttatttttcttcaactatttacaaataggttgtattcattcatctcctaatacatcagagtatgtgactttttttttttttttttttgagacagagtcttgctctgtcgcctaggctgcagtgcagtggcgcgatctctgctcgctgcaacctccacctcctaggttcaagcgattctcctgcttcagcctcccaagtagctgggattgcactaccacacctggctaatttttatatttttagtatggacggggtttcaccatgttggccaggctggtcttgaacccctgacctcaggtgatctgcctgccttggtctcccagagtgctgggattacaggcatgagccaccacgcccggtccagcatatatcttttaagaacaaggacattcttggccaggcgcggtggctcacgcctgtaatcccagcacttcgggaggccgaggtgggcagatcatgaggtcaggagatcgagaccatcctggctaacatggtgaaaccctgtctcaactaaaaatacaaaaaaaataagccgggcgtggtgtcactggcctgtagtcacagctactcgggaggctgaggcaggagaattgctaactcgggaggcagaggttgcagtgagctgagatcgtgccactgcactccagcctgggcaacagagttagaccctgtcttaaaaaaaaaaaaaaaagaacaaggacattctcttatataaccgcagtgtagtaattatattcaggagacttaacatggatacaacacttttattaacctatggtccatattccacttttgtcacttgtctcagtaatgctcttgagagcattcccccctctacgccaggatccaatcccgagttacacagtgcatctagttgtctctttagtttctttaatgtggaacagtctcattcccactctttctttgtctttatgacattgacatatttgatgaacaaaaccaattaatttatggaatgtctgtcagtgtgggtttgtgttgttttcttgtgattagatttatttagtccctttggaatattatgtgagtgatgctgtggacttctcggggtatcacatttggaagaacacagtgtcccacctgcccttcgttgatccttttaacatatccccatcattttttgggggtaagacttcattacttcctggtgcaacaaaatgtaccagtttcatcttgtaccctccctaccccagcctttgaatccgctcctttcctaaggaaccctggtctctgttagtggaccaggatctggatgtcatttggtctttttgcttttcacttagtatctgtctagctctgtttatccccttgtttattgagttggaatcacactgcttatatgcatttcataaaattttaagcattattccatgtcataaatgtttgaaaacatagttttaaaggctgcatagtattcagtcatatgaatggaccatcatttatttaaccatccacctttgtaaagaatgcagcagtgaatatccttggtatgtacacctgaccagatctttgaacatcttggattgtttccttagactacattctcagaggtgaaattttgccaggacagcattgtgagcctcccttatgtatgtctttaatgggaaaatggtctgggctgtgtggattataagaggttagagaggcagctgtttctgttaggaatggaccaaagcttgatctggtttgtgagagacagcacctgggtaggggtggcattaggggttagaggttgcttcatgcaggggtgccatggtgggagagaaatggaggtgggatgagaactggtgtgtggggggactttgaggtgacctggagcctattgcagggtccttattgggaagggaaaggaacaggaattggctgcagggtctggtgtcctactaaataaggggagggaatgtggaggcttctgtttcctccactgtgcaaaggatggtgcttggagagttgtggggctccagggaggaatttggggcagagcccggagtgtagtgaggcatgaaccccagcgattgcagcttccccttcatccccgagcttggcaccctctgtcttccccttgagctcagctttgcccagctggcttagtccccagggcagaaggcccagcagccgggttgcttggtttcctttcattgtgctccaatgcctgtggctgcgcttagcataaagccctccttttccacggcccctgctctggggcaaggttgggggagctgccccttgtcctgcacttcagcagctacagggctgtgggtgaaggagggcctgaggattgtgagctcagtgcttttaggcttgagctgcccttggggatcccccctggaggcagagctggaccttggggagggaccctgtggcgggtaggcaggatgctttgtcactcaaggtcctgagcaaggcagggaggctgggagagggctggggaccaggcctcaccttcagcctacatgtccagggatgcttgggagcttttaataggctcagaatagatctcagggcactgggagagagaggggaaaatggaagtcacctggaagagcagatgggcctgtccttgagtatctcagtggtctctctgagttgactttggaaaactctcagccccaggaaagctgtccttagatttctgaggcctcattggcatttatcacccacacgaggagtcctggggaccgggggaccccaatcataaagggtggggctctccagtgtctggagaagggtgtgcagcagctgatccattcactcttctctctcatcctcttcttcagacgtccttctatggccgcttcaggcacttcttggatatcatcgaccctcgcacactctttgtcactgaggtaagtcatggctgtcacctcagtggcccttgggcctttgtaccttgtcatttcagaatatgtgggtcattaagggagggtgaggatgggggagtgaagagaataggggaggtgagaggtgagaggaaggtaacaaattctctctacctgtagctgtctgtttatgtatctgtgtgtctgtctgtatctgagttgatacattgtgctgtatgctttttacattatatcatttggatctcacaacaaccctttaagatagatattattgttattctttaaaactttcaagaaattattatcaagtacataagttatttgctcattagaaaagttcaaacagtacaaatatgtttaagtagaaaaaagtatcctttaatcgtcctccctacttagttccctcctcttataggtaacagctgttaatggcttttaacatcaggttattaaggtataatttacctttcttatgtgtgcagttctttaagttttgacagcc

SEQ ID NO: 8557 - DNA, 6000 bp, Homo sapiens
ggggactccagaggttggagaaggccctgaggctcctgaggcccagggccaggatccagtaggagaggggcttgggtccttgtcagccacctcccagcaggctgatgtgtgggtctccaaggaagatgccttgaaccccttcttgtttcaggggagccgagatcctcccagcctctcatctgcatccccgccagggtcgagggaatcttctattcattctggtccagaagagctgcccactcccccagagcctgactttccaccgccccctctcccgccttgggccagccaccaccgtggggggcccagccctccatgctctcccctgtctgaagcctggcccctgactacctcctctgcaccaccaggggagccagccttactccctggcccccatgagccctccccacctgggggctcccctgccctacttagggaggacctcgctgcagccaccccagcctccccgcttgtgcttctgcccttggagacacgaccagctgaggagccacagcccagtgccaggtgagcatccacccccagaacactgtccaggaggaagggggtggacagggggcagaacagcccaagggactgaggggttcacactccagtctcatcctttgtggggcaggtgagggtctcttttaccccagaggcaagacggtacaggctttgaagacaggagctttctatggtaccacctctgaagctgctgtcttgggacttgggataatcaaggcagccccccacaagccaggggtttggagaacagcactgatgaggtgcagggtataaggaatgaagtggggagagccgatgtgggctggcagggaaggagagcagtgctgtaggcccttctggagtgtgtgcactcagccgcaggggagctgtgggtggggggcggtggaacttgtcaatcagggggtagttcttggggcagaccgtggcagagcaggctggcagtggagccttgagcagtttcctattctgctagagtgagggtgcaggctggggaaggcagagagccagaggagggaccagcacttaggtcagagagaaagctgcagacaccttcagaagaaaaaggaaaactcaaacacttcccacatatgtaactctcagaagaaaggttccccacgcgcagcagttgcttcattggtttgcgtttggtgccttttaaggggtggttctgatgcacttaggaccgctgagtggacagcggatgcctgtgtgactgtgctcactgtggcattgggaggtttggaagaattatgaagctgtgacctcaccaggtggctggtcaggggtgatgtgggcagaggcctggagactcagggcactgggaggtgatggggtgtgacttagaaggcagcaagtccctctgggacgatagcgctctaggaggaccgagtgaagggaggggagagcagggcaggctccagcactggcctcccgaccaggcattcatgtttggtcatccacattcactgagcacctactatgtgtcagatgctgaacagatgaaagacactgtctccactctgttcccaaggaatgtccaatccactggggaagataaagtggacccaagaagggaagaaaccccaaggggccagaactacatatgggaagtgggtgggagggagtccaggctgcccccagtgtccctccctggtggtggtggtgactctcctcccttgaggtgagggagaggatgtgggggagctggtggttgcagtgtcctcggctggccctgctgtctgccagcatgacctctaataatacttgccactttttataagttttattcgtcccagagttggcttcatgtctgtactgggcttgttccttctgttatgaagtggacgggccaaatagagctgtctcattcctcaaaggaagaaatagagcccatgagaggcgcagggtttaggatcccagatccctctgatgtaagggggcaaacaagccaaggcctcctggcccctcattcaaggcacttttatactacactggtcatcctccccttccctggcacagcccgcaggtggcattagagctgcttttataccccatccctagcacaggctcctaggtgtcaggaaaggactgagatgcattctttctccatactgtctgcccagagcatgggtgctctgccactcttcccgatttgtgagaatgaatgcatggatctagcctgagagtctctgggtctgggtgacccttccttcagtggagttcagggccttggactaagccattttgctttctactcctgaatggtctaaatcctctgtgaagtaagcatagatttgtaagaggtccccctgggcaggatagttaatgtgggagcctgatgcagtttatgttatagtttatgtacctgtcacagggtgctggaggatcccagagaagggtcatcttagcctggaggaatcaggaaggcttcctggagaaggtggctttgcacaactgtgaaacatgagtaggaattagtgagccaacgggaggaaggggcaatgttgttccagacagaagaatagcttttgtaagatcttggtaagaatgtggctttgggagtagtggaccatgaagaaagggcagggaccagattgtgttagagattgtattttcttaccttgatagaagccattaaaggattctcaagctttgagaatgctgagatcattatcctgcagcagcatggttggaggtgggcaagactgagatggaggagctgatttagtggctgtgactagaaggaaggtttaagcattggcctggagaggagtggggtggcttgagaaggtaggaaggtggcagtgcttgattgttaaggccgaggctgaagaggatgagccagaggacctcctaggcttctgactttctgacctgagccagtgggggccagaggtgctcctcactgctagggcagcacagaggaggtgtggcggggagtgggatgcacctgaggggtaacccagggagcagcaagccagtctgcacctgactctgcaggtctagagtccaggcagtgagctctgggttagagatggagattaggagagtggtaggatgcagggaggaggagaggagagaacccaagggcagactagcagttgttaagactgagaaggggctgtggggtcagaagacgaaatggaggtcttgaagggaaagggaggcaagcagcccaaaggaaggagtgcttcaagtgtcggctccacagaggtcagtgaggtgagaaccagcagggcttggtgacctcaacaagtccacttgtggtgggccggtagagaccgacgtcctgttctaatgggttaaggagtcaatgaaaggtaagaaattatacaaatgtagtctccatgctgctgcggagaggcttgggtgagaagaaaggggaaggtgactaggaatgatagctggagcaaatataaggtcaagggagggtttttcagggctatgtaaatgctgatgggaagcaacccctagagagagctggttgaccaagtgtcccagtttgcccaggttttagcactcaaagtctcatgtcctgggaatcctcacagtcctgggaaaactgggaacttgggagggttggtcaccgcactagagaaaggttacagtatagaagagaaaggagggaagatggctgggggagggtgtccctgacagagggtgggtgcaggtgcacaggagtctgtagcatggcctttgctgtccctgtgaaagggtcagttcacccggtgaatgagggagtgaaatggggagggagcaggtggtggggtgggaattgaggccagcccagggggttgctgaggagtactggacaccgctgccctgaaaccttgactctgtaggggcagctaccacccagtgctgggctttctgtccagcagacctggaggctccacagggaaggcagccccacctttgacccgtgccacccttctctctgtgtaacccatctcttgtatgtctttgcagtccccaccccgtgaagcccctcagtgccgcccctgtggagggcagccccgacaggaagcagtcccgctccagtctgagcatagccctgagcagtgggctggagaagctcaaaacagtcacatctgggagcattcagcctgtgacccaggccccccaggctggccagatggtggacaccaaaaggctgaaggtaaggcccagcagggtgtgggggccatctgacagaatgtgtggtggagtctcagggcttggtcctggtgagggtggggcagggagcaggccaggtcccccatatcagagtcctgaagccagttaggctctgactttggagacaggcagcctggggccctgtggtggtgaaacttaggtgttggtgggcaggcgggcgggcgggcaagcgggcaggcaggcaggcaggcctagggctgccctgctcactgtcttcggtccggcctcaggactcagctgtgctggaccagtcggccaagtactaccacctgacccacgatgagctcatcagcctgctcctgcagcgggagcgggagctgagccagcgggacgagcatgtgcaggagctggagagctacatcgaccggctgctggtgcggatcatggagacctcacccacgctgctgcagatccccccgggcccccccaaatagccttcctcaccctacccccaggagggttggcatggacctattgctgcctgccctctctcctcctgaactctctcatctgcagtggggcatcgtctgtcttgccttgtcactccttgctcctctccctcctgcctcaactggggctgctggaagggggccctctggattccctttggaggcatcaggttctgtgcacaacttgtgtgtctttgggagccctgggtctttcccacctgcctgttttcatatccctcagctttgggggccccagggaattggaactcttcccccaagacagagcaggggtgaactgtagcttgatgcagtaatctgggacaagactggttgctagcacatactttattatcccccaaggatggtcagccatttcttcccacagccaaagccccatccccttcatttccctccagtccctggaggggcttctagtattactgggacaatgaccacgctgcctgtttgtctgtgagttacgggcaaccagcctcttcagcctcacacccattcccctgagagcaagaagcctgtgtggtctgggccagtctctgccatgtcctgagtctgcttcagtctggagctgtttgtggggcgagtgccatgtggacagtggtggatgatgtgtgtgcttcaggctgctccctgacccctctgacctttccacgagtgtcacatgggaatgtgtggggcgcaggggcgggtgcggagagagcacctttttgcttttcgagctcttgaccacctccaatgtgtaggtccctccaggctggggcttgggactgcttatgatttggggatcaagcctccatgtctattcttgttgcctgtccagatgccaaaactctgtgttgctgcagggtttgaacttttggaaaccaattaaaatgtgcctttggtgggcggggtcaagagcccctggatgtcgacctctcccgctgtgtggcgtccccctcccacctgttgaatacatagggatggctctctcagggccctgggaatgggaatggacagcactgctgtgggctgttcccctcccctaaagttaatctcttggtctggccaagttgctgctccctcaaccttcctgctgtcttcccctccctcaaccccaataggaggatcccaggataaacactgctgggcaggcgggcaggcaggcctggggctgccctgctcactctcattgtctggcctcaggacttagccatactagaccagtcagcttgcctggaagagggaggtcccactatgcctttgggagacacctatacttaggaaaaagcctttgttgtcctcccatccatccattaagctgctatctcagcct

SEQ ID NO: 8558 - DNA, 6000 bp, Homo sapiens
tcgaaaagttctgtcttattctttaaaaacttataggttcataggtttatagcattctgcttttcttgtcgtcatgaatacaatgtcttttcttgtctctgttgtgatttcctctaatttggtcttgagagctgtctctggagagtagccagaaaccaagatagccactttctaggagagctctaaccaggaggagagtaaggtttagatggtcaggtgagaccaaatgaaaccaaaatgcataaaacagaagaaatttattatttacagatctcaaagaggttaggggtggctgatgggaagtcaagacgcagtaggatgttcaatcagtgaatggggagagagagagagagaaaaagagagagaatgcactatattgcaaacaatcatatagggaggggaagttttaactaggccaaaggagtacaactaattgggtttcaaacaacttatgtcaggccaaaaactggatgccaagaaagcaactatattaaacaaacctatgacaatctccttgaagatattaactatctttgtttttgtctttgttttgtaatctttgtacaggggtcatgcttatcttttattattccagttttagtatatgtgctactaaagcgagcaccagctacatagttttttaaagaacctaaatgttttaaaatatatatttagggagtacaaattcaggtttcttacatgcatatatttcattgtggtgaagtttgagtttagtgtactcatcacccgaatagtgaacagtgtagcaataggtcacttttcaaccctcacccccttcctaccctcctaccttttggagtctccagtgtctgttatttcactctacatgtccatgtgtacgaattgttagctcccacttataagtgagaacatacagaatttgtctttctgtttctgagttatttcactgagggtaatggcctccagtttcatccatgttgatgcaaaagacatgatttcattttctatgactgattagcattccattatatatatataatgtaatgtatatattacatttccttatccaatcctccattgattacacttaggttgattccatatctttgctattgtgaatagtgctgcaataaacatacaagtgctggtatcttttttaatataatgattcttttcctttgggcatataccagcagtgggattgctgaatcaaatggtagttttatttttagttctttgagaatcctccatactgttttccataaaggttgtactaatttacattcccaccgacagtgcatgttttctctgcggcctcgccaacatctgttatttttggacacttttttttttttttgtgagacagagtctcactctgtcgcccaggctggagtgcagtggcacaatctcggtctgcaacctctgccttctgggttcaagtgattcttgtgcctcagcctcctgagtatctgggattacaggcatgcaccaccacacctggctaatttttgtatttttagtagatacggggtttcaccatgttagccaagctggtcttgaactcctgacctcaggccatcccccccacctctgcctcccaaagtgctgggattacaggcatgagccacctcgccaggcctagactttttaataatagccattctggctggtgtaagatggtatctcattgtggttttaatttgcatttctctgatgattagcaatattgagcattttttacatgtttgttggccatttatgtgtcttcttttgtcaaatatctgttcatgtcctttgcccactttttaatggggttatttgtttttttctttttgagttgtttgaattcctcacagattctagatattagctctttgtcacatgcgcagtgtgcaatatttttttttcattctgtaggttgtctgtttactttgttcattgtttattttgctgtgtagaagctttttagtttaattaagtgccatttgtctatttttgcttttgtgacatttgctactacatagttttaatggtttctttggctgcctacattgctcctgtttccttggactttttcttttcctgtttgttttggtatctgtcattctggtgattcttggctggctgttcatgttttgaagtggagctgccaaacagctgccatgtggccaggctggacttgttgaatgatagacttacagtgggcaattggatgcagcccttgccattttgtcagaggtccccaaaatgttggaatctggaagttctccaatgtcctgcctggagggcctaaacttcattagggttctaggagtccagcaggcaaagggctgaggggctaactgcatttacttaactcctttttgtttccccagtgaaattactcctttttgccctcagctgtccagggatcttctgtcctggctttagtctcctacagggcccctccatattctgagtagaaagggcattataggagactagagcctagaggagagacctgaggatttaacctcagaactccttatgaagattttccaccatctcccctgtgttcagcccgctctgcatcatggtcttgagatatccctattgcctctgatgtcctatttctatctttgagaaacattttgtatatgtagaggctgtctaatccttgaaggttcagataaaacatttaaaaaaaaaactatctgttcctggtgtttatttttctttgcattatagaaaaattttcaaacacaacaaaagtaaaataaatgatgatgaccctgttaacttaaagatcacatgatctatgcatttggagagaagactttatttcttgtaaagggttacagcctgcaaggtggccatgttacaggatgggaaccatagcctcagggttagatcagagacaggcacttcgaaggaggaggggaaaggcaggaatttaagttgactgggttggctaaacatgcatattcagtaggttacaggaggatctatgaatattcatgaaggtggtcctgatgcatgtgtattgaacaaacatgcatattacgcatgcccatgttcaccttgggatggagccataacatttaaatgtattacattaggcattatacgttagaaggtctttgtaggacacaaatgcgttcaagtgcacagcctctgtaaactgaccagaaccagtccatggttcatgatcttcttatcaggagggagttactaaagtcagtcttttgtccaatcaaagctatagttatggcttatggagcagggggttggttagtcagcatctgctggtagatgtgctgcaaattgttctaatattgcttgtctcaaggccagtgcttgcttagctgctagaggaaaagaaaaaccgtgtggcagttaggacacagtttattcttcaagtgtaggcgtgtataacttaacccttgcctggcctggctttaggtcttgtttacagtttggtaccttattgccataaagggtctgttctgtcagtcttattctcaattttaacataaatgctggtcagttatgtctacactgcaaaagggagatgatataaccaggtgtgtctgacctcctatcctgtcttggccaggattttggtttttaatgtatctctgggatccccttggccaagagggagtctgttcagttggtggggaggcttaggattttatttttagtttacaactctttttttttttttttttttttttttttacaactcttttgtagcataacctagcttcaataattatcaatacatgactgattgtggtgtctttcctacaatcattttaattgttattggttaatttaggttttctaatttttttaaaagtcaattttgatacttctattgtttttgtagagaagtatccatgtattagccttgtggctgagggctatagttccagaaacagattgtccagatttgtttttccatgtgggtagtcatttaagctctctgtgtctgggtttcctcatttgtaaaatgggaataataatgttatttatgtcataggattgttgataagattcaattaaatcatacatgcaaagcacttctggcacatagcaatgttaactattcttattatttaagttttaaaattaattggcatgaattttttaatggaattataatttttaaattctcaactatattttatgtccctttttcagtcctagtgttgtttacttaaaaacaaaagcatagattgcttttgttttttctttttcgtagagatagagtctcactctgtcacccaggctgtaatgcagtggcacaatcattatggctcactgcagcctcaaacttctgggcttgtatgattctcccgcctcagcctcccaagtagcttagcactacagcacaccatcacacctggcgcatatatatatgcataatatattacttttatatatattattatataagcataataaatttacttttcagaggcttttctgtgacgtagtatatgtgctctctttgtaaatgtgtcatttgtacttgaaaaagaagtgtgttctctgcttgttggaaattattcttcaatttgtttatatgtccttttttttttttttttttcttttcgtaagacagagtcttgctctgttcccccggctggtatgcagtggtgcaatctcagctcattgcaacctccacctcccgggttcaagagattctcttgcctcagccttcctagcagctgggattataggtgaatgccaccacatctggctaatttttgtatttttattagagatgcagtttcactgtattggccaggctggtctcgaactcctgacctcaggtgatccacccgcctcagcctcccaaagtgctgggattacaggtgtgagccactgcacccagttatatgtccttttgtcttagttttttatctgtattaaaatctcccattatgactgtggatttgaccatttctccttgaaatcctaccctttttaatgtatacattttgaggctgtgttccttttactttatagtcatgaaggtgaaggaggagaaggctggggtaggaaagctggaccacactaaccacaggaggagatttccggatcagaaaggtgaggtcactttgaggacttgatgcaaatctcaggaggcactgagaattctctgaatgtctttatgacagctctttcagcaggagagtctagggagcaggtcccttttcctgactcatccacagtgtctccttgaggctggtgggaccagccttcatggtatccccaggtgactgcatggtcaagctggagacaggaaactgccactttgcctatgtggattagaatatagcttccccaacacaaaatgtaactcacctaattttacaagatctgcaaaccataataaatgccaaatatcaacattttatattaatagattcccaaactgacagcacaattaaaaccagtgcaagaggatgttgaggtggcaggtatttctgttgctccagaattgctgactttagctgcccaaagcctcctacacactacagagaagaagccatggggcttatgaaaaggcaatcagatgggcggctactgccatcgttaccccagccccacttgaaggaaaataccaacctcgctgcccacctagaggctcggtgagctgcagaatgtgtagagccactctggagctgtcaagcaagaaaaatgccctaaagagttgctaggagaacttggcacatgtcctgagccaaactgcaagatacttaccgtgagaggagaggtcttgtagagccacagaggagaatgtagacttgggggagggcaagccactccccacagttcaccagctaaatcaccatgctcttttgattatgatagaagccaagaaaagatgggacaatttagattcagaacagaaagtaaaatagttttttgacagccatctcctctgatttctataataaatatactcttcctgtgtatagtcccttacaatttgcataatcatgttcttatacatgatcccattct

SEQ ID NO: 8559 - DNA, 6000 bp, Homo sapiens
attctctctttttgaaattgtgactcccactctccgccaattcttctaaaggtttccttttaaagaaaagccatggttcgctgccactgaaaattaaagacaacagcataaagatcaaggtccaggctggtgctagcgatgacagaacattaaaataatcactcaaatttccttccttgaacattgacaaagattgctaatggaaagccaatccccagaatgcagattcatttcagactttctgcacttgcacctctgtgttcacaaattattttgactaaaatgaacaaattggaagtgttgagataaaacagaagtaatgacataccaaaaaaaaaattgtatgttactcccccactccacttcacaacatagagtaccacgaaaaacaggagggctcattaggcaaaggctaatttacaaggttgaagagagaaggaattaatcgactcttccctccgtcaagctatacttctggcctctctaactacaacgaatttgctccatgagcttctctcttctacctccccttagttccagattatgtttggccatcagattcataactcatataacccagacttccttcccatttgctgaatccatattttcaagattcttatcatttcttaccccaaactggaggtctggcctcagtgcccaatcacatgttggcatgatggcttgggatggtattcttgatgcccaactattagtactagacttgcagctatagcggttcagctagatgagctcaggttccttcccctgacaaacatggaaaatgtcaagggtattttcaaagcatataaagcatctcttatccaatatacaacatttgaagaagaagtttgccaacagaaatctatggtcacccgggaagaagagattgatccagtacatgcaatagctacattgtaacctggtgaatcagatattttcaaaagacaggtacagacatatgagagaataagcaggaggaaagaaaaaaaacttcaggtgagctttttttttctttttttccttttttagttcattggacacttacaggcatgaaattaaaactcatgaaaaacagccatatcgacttgctgtggtgactcaaaagttgtcgtttctcgattcaactttgctgaaacactcgattcatgttgttcttatttaacctaatttgcattgatttaatcagtgctggtatgctttaaatacataataaattgggattctgcaacttagatgacttagaatagctaaatttcaataaagctcatttcaatctgttaatgtatacggttctgccaaggggtttaaaactgtagaaaagatgcaaacttgccacattagaggtgggaaaggcttaaagataccatatagatgaaatgatttgcaggataataatgcaaaaagcaatatatagaaaatatatatttatatataatatatatatataatttatttattttaattacagcctaggagcatcttgtaagttttgagtagcacacttagaagaaaactcacatataaatcagtgaatttaattttattccctttctttcttgccaacactcaactcttctgcctctctgcaccagctctacaaatcaagtgacatccaaagtgggacctcttcttgcccatttggcagcctctgtcaccactttgccaagcagccagcattaggaggatttttttttttcctagcaaccctagggattgggtggtgtgtactcacagtactcgctgaatggctggccgctgtttaaccctgcgggtgcctcctcaacacccctcccccacctcccaaccctttagagtttatggctccatcagctggcctgctgtcacgaataattgtcttggcaagaggtgaaaccacttgatggtgaatttgtttgtctgtctgttaaagtgttccgcagcaccttggaggtgccaggatgaaacatgcaaatgcctgatccagagttaggtaggcagcaagagtgacagagaggcaatcatcaagaatggcaaattaagaaagaaagaaagagagagagagaaagaaagaaagaaagaaagaaagaaagaaagaaagaaagaaagaaagaaaagaaaagaaaagaaaagaaaagaaagaaagaaagaaaaaaccatctgtgccagttgcaagctgtatgaccttggataaaccatgatgtctcttggcctcagtttagtcacgtgcaaaattaagggggttgattttctaatgtctcttctaactcctaagacagcatgtgatgtctaggacatttcagatttgtgttccttccaattaaatgatacatctcagagatgaatgaccagggcagagctcagatgaatacaaaatggaatgattcatgcccctgttcatatgacttttcctgaaaagtaccaccagtctttggtgactttgattccattggttggcctcttcagcttagatgctaaggaccaatccagttacttgtccagtctatctaccctggctctggtaatccaccctcattcctatcaaagtaagtgccactacatataatgcctactgattttgacttccttagaggcagaaacgatgggaattcaaacagtggagctggagactcacatttgactctccctaccatctccctgggcatctttgtcaagaaggaaggcttgcccacactcacttcccgcaggctttctcagccatcttggaggactttgtttaaacagatgaccaactgaccctccccagggcagaccctctacagaccagtaggcacaaggtgtgtgtgtggggaggtggggggagagctcattgtaaggactcctatctataaatgattatgaatagaaataatgaggcaaaggcttctcgtcatactcagaggaaaaagtggcacaacttagtgcagtctcaaagattaattaggatgtgtgtatggagacgggtaggcttcattatggcttaaactatcacgtccctacacattcacactctcttggagtggggtgcactgcagggcccagtaatcaccatgaacagcacaagtcagggtaagccctccccatgtcagacagtacaatcgttctttaatccactctgtaccccatatgtatctgtggagcctgatgaagccccggagggatctcagtcaagtctccctgcacacagacatacctttttgccacactggatctcacaccaccgggacttggatggcttcccaaactaggtgggtttggaaagcatttcccctctccacctcaaaaaagggctggctgactgcagaattccagtacccgcaagagggggaaaaaaccccaaaaatcttagccaagccccaaatcattgccttcctgtgtcttctctcaagttgcttttctaaagcaaaggtccaaacgttgatttctctacagattcctacgtatctcttacacgtagacagttttaaaggggaaaagaatatatccccaaaaggcaagggggagagcacagaacatttcagtttcccacttggaaatatcttgtcgtggatgatgctacccctacctccacctccctcccccctcctttttttttttttttttttttttgaaatatggacaaaaaagctgaaagtgttttccgtttcatcaaaaaacatatattactttagtggttcggtaaaatgttggttttatgcccaccccttttcaatctgcccatgtctgaggtgctcggggaagacgcacaatcgtgagcagcttacgacactcagtgagcagtaggtgcctgtgcaagctcgcgccgcacactgcctggtggagggaaggagcccgggcgccgctcgccgctccccgcgccgccgtccgcacctccccaccgcccgccgcccgccgcccgccgcccgcaaagcatgagtgagcccgctctctgcagctgcccggggcgcgaatggcaggctgtttccgcggagtaaaaggtggcgccggtcagtggtcgtttccaatgacggacattaaccagactgtcagatcctggggagtcgcgagccccgagtttggagttttttccccccacaacgtcacagtccgaactgcagagggaaaggaaggcggcaggaaggcgaagctcgggctccggcacgtagttgggaaacttgcgggtcctagaagtcgcctccccgccttgccggccgcccttgcagccccgagccgagcagcaaagtgagacattgtgcgcctgccagatccgccggccgcggaccggggctgcctcggaaacacagaggggtcttctctcgccctgcatataattagcctgcacacaaagggagcagctgaatggaggttgtcactctctggaaaagggtgggtaagacactttttaattaaattctttcccgaagattttttttttcctcccttttctttgctgcagcatctaacatggaccaaatcaccatctctttgatctttccgtggctgtgaactttctatgctgcccagctttctgcatgcttagaggtgaacgtgtggtttttggggaggggggtccttctttatttctatgtatttatttgattttttgcccttttctccccctcccccgcttcccctccctcggaataaaatatgatgtagatttctgaccgagcgcttccaatggacattctccagtctctctggaaagattctcgctaatggatttcctgctgctcggtctctgtctatactggctgctgaggaggccctcgggggtggtcttgtgtctgctgggggcctgctttcagatgctgcccgccgcccccagcgggtgcccgcagctgtgccggtgcgaggggcggctgctgtactgcgaggcgctcaacctcaccgaggcgccccacaacctgtccggcctgctgggcttgtccctgcgctacaacagcctctcggagctgcgcgccggccagttcacggggttaatgcagctcacgtggctctatctggatcacaatcacatctgctccgtgcagggggacgcctttcagaaactgcgccgagttaaggaactcacgctgagttccaaccagatcacccaactgcccaacaccaccttccggcccatgcccaacctgcgcagcgtggacctctcgtacaacaagctgcaggcgctcgcgcccgacctcttccacgggctgcggaagctcaccacgctgcatatgcgggccaacgccatccagtttgtgcccgtgcgcatcttccaggactgccgcagcctcaagtttctcgacatcggatacaatcagctcaagagtctggcgcgcaactctttcgccggcttgtttaagctcaccgagctgcacctcgagcacaacgacttggtcaaggtgaacttcgcccacttcccgcgcctcatctccctgcactcgctctgcctgcggaggaacaaggtggccattgtggtcagctcgctggactgggtttggaacctggagaaaatggacttgtcgggcaacgagatcgagtacatggagccccatgtgttcgagaccgtgccgcacctgcagtccctgcagctggactccaaccgcctcacctacatcgagccccggatcctcaactcttggaagtccctgacaagcatcaccctggccgggaacctgtgggattgcgggcgcaacgtgtgtgccctagcctcgtggctcaacaacttccaggggcgctacgatggcaacttgcagtgcgccagcccggagtacgcacagggcgaggacgtcctggacgccgtgtacgccttccacctgtgcgaggatggggccgagcccaccagcggccacctgctctcggccgtcaccaaccgcagtgatctggggccccctgccagctcggccaccacgctcgcggacggcggggaggggcagcacgacggcacattcgagcctgccaccgtggctcttccaggcggcgagcacgccgagaacgccgtgcagatccacaaggtggtcacgggcaccatggccctcatcttctccttcctcatcg

SEQ ID NO: 8560 - DNA, 6000 bp, Homo sapiens
gtaattaggctctgtctttcttaaaatggttatagtttaaatagacctctgtgagtgtactgctctttctacagtcagggtcattaacaaatatgctaccaggtgactgcctctgagttcagagactgaactatgtcattacagagccacctgttaatcattttctttttcctttcctcagatcattgcttttgtcctggaaggaaaaagatctaaagtcacccggcggccaaaggccagtgactaccaacgtttggaccagaaggtaaggaaggaggagccaggtccatgggagggataggagggataggcaacgtcagatggacccagtagtgggcttgcatttgccatgaagcagcagtggctgattctggggatgcggttgctgttgctgttgcattcgccctttttagacaacaaactagaaacatctagatacacatatctgtgacgttagagctagcagagaccttggaatactctacagcagctacctcccttcacagatgaggaaataggcccacgcagaaacactcttttttttttttttccgctaagtttctactgcaagttagtggcaaactcaggacctgatagcaactccctagtctcccagtcctgagctttctgcattctgccagcgctccataaactttaataggcatttgaatcaccttggggaattttgataaaaagcattatctgattcattagatgtggggtggagcctatatttctacattcttttttttttttttggagatggagttttgctcttgttgcccaggctggagtacaatggtgcaatctcggctcactacaacctctgctgcctgggttcaagcgattcttctgcctcagcctcccgagtagctaggattacaggcgccaccaccacgtccagctaattttgtatttttagtagagatgggtttctccatgttggtcaggctggtctcgaactcccaacctcaggtgatccgcccgcctcgacctcccaaagtgctgagattacaggcataagccaccgtgcctggcctgtgtctacattcttaggaagttcccaggtgaaaccaaatgccactggatccacactttgtgtggtaaagtgctagactgtgctccctggaaacacgagcctggaagcacataggcctccaactccccacatcagcctggcttaagcaccgtaggctggagttcctgagtacagccaatccattcctctgtcagacagataagccctccttccaccccatggcagcagagctaagcaagggtctctctaaagacaacctgtctaagcaggaagactgtactctcactgcgttgctaccagcatgcacccttccttctgctttcagcatagcaacagccaggacattggcaaagaaccattggtggcccaactatgaattgttcccagacttcctgcagggaacacgattctcttgcacaactcaatattagctacagaacgagccactgagctcagaatatctttgctaactagtccagtaggctagctttacaatttagctctggactactgccttttcagataattgactttaagggttttcccccttttatgatttttgtttgtttgtttttgagacggagtcttgctgtgtcgtccaggctggagtgcagtggcacaatcttggctcactgcaacctccaccacccgggttcaagcagttctccctcttcagcctcccgagtaggtgggattacaggcgcccaccaccacgcccagctaatttttagatttttagtagagatggggtttcacccttttggccaggctggtcttgaactgctgacctcaaatgatccacccacctcagcctcccagagtgctgggattacaggcgtgagccaccacacatggcttatgatttttaaaaaaatacacatgtggctgggcatagtggttcacgcctgtaatcccaacagtttgggaggcagatcacctgaggtcaggagttctagatcagtctggccaacatggtgaaataccatctctactaaaaatacaaaaattagctgggcatggtaatcccagctactactgaggaagccgaggtgggagaatcgcttgaacttcggaggcagaggttgcagtgagccaagatcatgccactgcactccagcctgggcaacagagcaagactccgtctcaaaaaagaagaaaaccaccaccaacaaaaaacacatgtaaataattcacaacagtacagaacagtatgaagcagaagccaggattcctctctctccatcaagtgtatatctttctagtgttaggtttcatttcaaactttaaaaatcattttgtgtgctattttaattaattgctgtttctgtggtggtgggtcagtatgtcttaattctgaatgttttccctgcacctcctaaaagatcttttttcccctaagtcctaacagaatggtatattcctctggaaaaagatgaacgtcaccaatggattgtgctgctctcgtttcagctttgatttttttgtccttgagaaccttgtcctccctgctgatttgtttctaaatcaaaagaaatgaagaaaaaagtactgtgacctgagagacaccctcctctagaatttagtggcgggtctgggctggcagaggtagggggctgctttgggctttgcacctgcactttggtgacattgttcttctgtgttccctttatttatgctggtggcttccatccgttcctcctctgagggtgagtggaggggtatatggaaacacggctatgaccaaagggagatcccagcctgggcaggctgcgctgctgaccaccctccctggggcccgggctctgtaggaaagttggtccttgactgtggcattgcactctgcactgtttctctctgcagacctaggggaaaactgcaggtggaagtgcttttctactaaggcctcttactttgggggggatgtgccctacagaagacatagaagatggggaaatgccaatgggcaaagagctactttgaatacataattctcttcaaagacttcagcagcaaaccaaaacagcaggttaaaaaaaaagatgcttttttgggtgcaagtctaacctgtctagcatgagatcttcttgattttctgattattttatgtagcttgagacaaagtgaatcaacttccacttagttgtaccgagcataaaacagaacttgggcttcctggcagtgaggccactgtcccatcacagatttttaaaataaatatgatttgaagtagtgtgatctttcacacaatcatactcagtaggaactttttgaaatagggcaagtttatgtttcatgcgagaaaacatgaaggagggttttggttttggtctgcagtttttccaaagggcttttatgagatacatttcccacaaagtccattttgcctttgttgcctaaaacagacaaaatagacttagatttattaatagaaactatactctctgccaattttacctcagtgtatttaatggtcctttaatctgatataagatgccaagggtatttgataaaaattcttcttccatgccatgtcaggagttaatacaaatgaagaaattccgtgggttcccctgggataagtgagggtagtgtcttggacaacactattgtttgaaggtttatcttttctaatcatgctctaccgcattgtagagagcctaaagagagttgtttctgagctgatctcagggaaatacaaataacttgggagatgagggaaataagatgaattctgtgctgtcaaggcagtaagtctgaagaaaggaccatgcttcttatattatcttccaccttgcttaaaacagcccatagctttgagttgacattttcattcttggcggatagcctactttatgaaggtaaggaatgaactcctacccttcttgggtcattctctgtactgatgcgttagtcttataatactttgcaccaacctgaggaatcttctaggcttctctagcatcccctaagactgtggctatttcacgtctctctccctgcctgccttccttttcccttcctttcccctcctcatgttttctggttgtgcccatctgtaccagctcctttccatccaccttcgtatgcacccagatttttctgttcccatctgtcctatttgttattcatcccgctgctcaacttctccagtatgttgcttcccttaagttgccattcattctcttcatgacttttactaactcacttcggtctctgtctgtcaactaaacttttctaaaggttaccagttatccaatcaccaaatccatggctttttctcaaagcttagtcttgtccttggcagaactggacactattgaccatccaaatggaaattcccctttcttggtgtctctgacaaatggtcctttgccttatcttgtgctggtggtgaagaggccctcaaagccaggcctctctattcctttgactgtctcctcagccattaacccattcttcatcctcggagtgagtgattcccaagtctttgtcttggcttaatccctaaagaacccagttctgctggtatcgaatagttcagcttggttgtcattgaaaggaatttctctcttctgtccatcagcctgtccctcccaactgtctaggacagtcttcggtcacctaaattcctaactgcagacttttgccctttttctctctcatcaccaaagtcccatccatttttttttaataaaagatcctcagctacagtctttccattttccttgcttctcttattgcacacccccagcccattttgcttctctcttggattttgttttttcagatccacatttattgggtttcctgtccagcttcttggaaaggagctcactcttggaaagactgatctttccaaaatattttccctggtctgaagctttggtgtgaacttctcaaggcttagagaatccagttacagaccttttggggttcaggatgctatagattgacaccctcctgcctgtttttctctgcatcccaacctggccaaggcccctcctgtggggtgcccatctgtgcctttattccggctgtgccctcgactttccagcttcccatgtttctttggttaggtttctctcccttccttctttctccttccccaatccgcctgtttcgtcagggcccagtttgtttcctcatacaccttcctcactaccccaccccacatggttgactctttccctcagctccaccagctcttcatcatgccactcatttcagaacttgagcaaaacagggcagtcaggatctgatgtctttctggtctccctaagaaaactaagctcttgagggacagcccttggcaatgctttcctatctgctgatcatggtgaccttccttaggacttccagagttcagttccttctggcagagaggttttctttctccatgccatatggatgtgactcaaatgaggggtcccacagcttttcctggctaccacttgctgtgaccttatacatgttggggtttgctcttaaagaggagagcaggaagaaaggttggtttcagaaaccaagagggtcggcagtggacgcgtacattttgtcacggagtccacagagctgagcttttgagcagactctgagaagtatcattgcttgtgttgaaagaatacaacaggatttaagtttctctttagaaattgcactgaagaaaggccgggcgcggtggctccccctgtaatcccagcgctttgggaggccgaggcggggggatcacgaggtcaagagatcgagaccatcctggccaacatggtgaaaccccgtctctaataaaaatacaaaaattagccgggcatggtgacgtgcacctgtagtcccagctactagataggctgaggcaggagaattgcttgaatccgggaggcggaggttgcagtgagccgagatcgtgccactgaactccaacctgccaatagagcgagactccgtctcaaaaaaaaaaaaaaaaa

SEQ ID NO: 8561 - DNA, 6000 bp, Homo sapiens
cattgcaagatttttctttcagcttacatttatgtttccaaatcaagtgacatatcaaatgcttatgtcactgattattttagtggctggattatctgataacatttagcccaggatggaggaagagatgattttaaataaagtagcatgagagggatgataactgacatgtatggatgctttatatatattatctcctttagtcattgtgactgggagatatcccagtatcatctccatcttacagatgatggcttgaaaggttgagctgctcacccaagttcacgtctagtttagctagtttataatgtggtttagtgctcccgtgtgccaggaactgttctaaaagtgtattagtaatattagctcatttaactttcatcacattcctggggatgtaggtgctacaatcatccccatctcacaggcagggaaactgaggagcagggagatttagtaacctgcccagggtcaccagcggcagtacgtggtgaagcccggcttgaattcagtggtgtggtttcagagtctgagctcctgaccactctgctctctgcctggttagggagtgtccacagagaagcccaaagttaaaagcagcatggtgcagagaggaaagagcttaaatgttttacccaattcaaatctaactgccacttagtaatggtgaaaccctaggcaggtgacttgattgttttgagtcccagttttctcaactgtgaaatgtagaagttgagtaagagaatatatacaaaattcctttcttgatcctaatttttattcatacgtttctactttaatttgtacatcctttgaagtgcctccaattttttttgtggtacagacaggtataaacaaataaatgaagagctcagttagcaaaggcacagcttggctcctgcaaaactattgagtctcagggtcttgctggtcgcagggccagccttcccagcataggtgtcctcaggtgtctgctggctcatgtcatttcatcagcattaacacatctgctttggtcgagtaggatgtgtccagtaccctctgctcaggcttccctttcttcctggactgtctggccttgcagacatacctcccccagtcctttgcaattccacggcgcttcacagctctcttggataaaggttttagacatcctgtctctgtttttgtcttctgagaaagtctttaaatgatggcacttggtatggcttactgatggactgggaactcttccctttgtttctctgctgcccttctccactttctctttgcatcctctttttcctgtccattaccatctgaccaactgtaaagtgattgttctaaagtctgggtcagctgaggagagaggtgcgctctcctgtacaagggccaagaatactattccacaagcacagggtggagaaggtgtgttttagtaataccctgggggaaatcaacttagtagttttcctgtccagccaggcacatctgtgtcaacctgtgccccggctgcctgtgatcattttgaacttaagccacgtggtctgcttgtctctgcagtggtcagtcaagtgctctggttgttaggctgttacttgttaaggctcccctaaggaatcctagtgatttctaagaatgaccagaggagaaactcaagatcacctccctgaggaatcatggaagggataggaacatctgtgtagccttaaggagagaagacctggtacagggcacatggcagtcagtgtcaatgagccagaggttcagaccgcagaaggatgggcctgcccaggtggccttaatggcagagctctgtatagggatggcagccaatctcaaaggagaaaggtttgacggtcccaggcatccaaagatgggataaacagaccacctttgtggtgactctctggggatctttaagaaagtcaggggtctgaccgggtgtgatggcgcacacctgtaatcccagcaccttgggaggctgaggtgggcggatcatgaggtcaggagttcgagaccagcctggccaacatggtgaaaccccgtctctactaaaaatacagaaattagctgggcgtggtggcaggcacctgtaatcccagctactcaggaggctgaggcaggagaatcacttgaacccaagacagggaggttgcagtgagccaagactgtgccattgcactccagcctgggcgacaagagtgaaactctgtctcaaaaaaaagccaggggtcctgtaggtagaattcagacattagacagggaggggctcaggggcctttctgatcccttccaggtctgagattctgtggttctcagcaatttgccagtgcctgactggaagatggaggctggtttcgtaacctggggctttcaaagttctgaattctgggtggagttgtctcaaacggtaggctctcaaagaacacctgcatgcagcctaaccagtccccaactcagtgactttcagactgaacctcactgctacttccaagctcctctgaagcttgccacattccatcggtattatcctaattcatacgagcctctcatcctgccatctaaagtataagttacttgagagtagggactatgtctgtaaaaatacatagtacgtggcattctaaggaaaggtgtagtgagcgagggctgccctttagagtcacctgctcttcctgtttccctggttgtgtgtcttctcacctgccttcctgcatccagccatgccccactgtggccggagtagtcgtgttctacaatttgaatctaatatattgcttccctccttaaaactctttggtgcctctcctttaccttcaggaaaatacccagactccttagtctggcccagaagaccgttcatgacttggttcctactgatctctccagtctttttgtgccacctccattgtcccaactctatgtattttaggcacactcaacccctcacaggtccttgggtaaacctcttctcttctttccttttctcttttttttttttttttttgagacggagtctcactctgtctcccaggctggtgtgcagtggcatgatctcagctcactgcaacctccacctcctgggttcaagtgattctcctgtctcagcctcccgagtagctgggattacaggcatgtgccaccacacccagctaatttttgtatttttaatggagatggggttttgtcatgttggccaggctggtcttaaacccctgacctcgggtgatccacccgcctcaacctcccaaagtgctaggatgacaggcatgagccactgagcccagcttcttttcttttcagcagggcctcacgctgtcacccaggctgaagtgcagtggcccgatcattgctcactgcagcctcaacttcccaggctcaagcaatcctcccacctcagcctcctgagtagctgggactatagcatgcaccaccatacgtgcctatttttttttttttttttttttttttttttttggtagaggcagggtcttaccgtgtttcccaggctagtcgcaaactcctggactcaagtgactcaagtgatcctcctgcctcagcctcccaaagtgctgggattatagacatgagccaccatgccctgcccttaaaacatttttattgagatataattaacacaccacatagttcacccatttaaagcatacagtacagccaggcatggtggctcctgtctataatcccagctttttgggaggccgaggcaggaaggatcatttgaggccaggagtttgagaccagcctgggcaacataccaagacatcatctctattaaaaataaaaacattagccttgtgtggtgtctcacaactgtagtcttagctactccagagactaaggcagaaggatcacttgcgcccaggagtttgagattacagtgagctataatcatgccactgcactccagcccataaaacagaacagaacaagacactgagaaaaaaaaaagggatacagtgcagtgattttgtgcaatacactatggttttagtgatttacagaactgtgcaaccatcaccatgatctaagtttagaaggtttttagtatcccaaaaagaaactccatatccattcatagtcactccctatttccccctccccacaaatcctaggcaaccagtaatctactttctgtctgtatagatttgcctattatggacatttcatgttattcatttcatggtctcctgtgactggattctttcacttaggataatgttttgaaggtacacccatgttgtagcatgtatcggtacttcattattatttctggataatacctcattgtatggatatacctcattttgtttatccattcatcagttagtggacatttgggttgtgtccacttttggctattatgaataatgctgctgtgaacatgtgtatgtaagtatttgtgtacctgttttcagttcttttatgtatatactaggaatatagttgctgggtcatatggtaactatgttttgctttttgaggaactgccaagctgttttccaaaatggttgcattattttacattcttgtaagcaaggtaccagagtttcagtttctccgcatctttatcaacatttgttattatctttccttttttactactgtcatcctgatagatgttaagtgatatctcattgtggttttgatttgctgatagctaatgatgctgagcatctttcccatgtgctctcattgaccgtatgtgtgttttctttggaggaatgcccattcagatcctttgcccatttttaattgggctatttgactttttattcttaaattgtaagagttctttctgtgttctggataccagtaccctatatctggtatgtgatttccaagtattttctccactctctaagttgtcttttcactttctttagggtatcatttttagcacaaaagtctttaattctgatgaaacccaatttacctatttttcctttggtcatttatgcttttggtgtcatatctaagaaactattgtttagtcccaagttttcttctagtatgtttataacatactacctcttacatttaggtctttgattcgttttgcattaatttttgtatatggtatattagtccattttcactactgataaagacatacctaagactgggcaatttacagaagaggtttaattgtagttacaactccacatggcaggggaagcctcacaatcatggcagaaggcaaggaggagcaagtcacgtcttacatgaatggcagcaggcaaaagagagaaactgtgcagggaaactcccatttttaaaaccatcagatctcatgagacccattcactaccacaagaacggcacaggaaagacctgcccccatgattcagtcatctaccactgggtccttcccacaacacatgggaattatgggagctaccagatgagatttgggtggggacaaagagtcaaaccatatcagtgtgaggtcagggtccaaggtcatccttttgcatgttgttctccagttgtcccaggaccatttgttgaaaagaactttcctctatttgctgcattctttctttctttgctgcctagagcctttccctgcccttcgcccttctgttactcgtattttaagtcaagtctcagctcagcggttaccccttctaagaggctatccctgatcgtccctctgtgtgtgtgagagagccccctcatgccttaatcctgatgtttatcattgtaggatttcagctgttcatcttccccacttgttttccaggccaggtcttgggagacaggggctgtgtgcttaacatcttacattacttaatatgcacttacatatattcaacttcagggggaaggggagatagtacttgaatcacagtgtaatcttccattacctgtgaactctagattgtacagaaaatccggttataacttgtaattctttgagtacatcagtaatgcaccttaggtttaatgtgaggaacaggactgatagttctcttcaacctaaacatccactggtag

SEQ ID NO: 8562 - DNA, 6000 bp, Homo sapiens
ggcataaaagacagaattcctcatcgtccatagtaagaaatcaatagataatgtataaaatggaaaaagcaagaaaagcagtaaaaacctattctttgaaaatatagaggtaaacatgaaaaaattgctaaaataattgaaggcagtgtctctgaggaatgggaatcagagatggtagggaaaagcaggggatgtggtcttttgttttgttttgttttgttgagacagggtctcactctctcacccaggctgcagtaccgtggcgggatcacatctcactgcagcagcctcaaactcctgggctcaagcaatccttccgcctcagcctcctgagtagctggaactacaggagggtgcccaccatgcccagtttatttttattttttgtatttttttgtagagacagggtctcactatgctgcccaggatggtctggaactcctgggctcaagtgatcctcctgccttggcttcccaaaatgctacaattacaggtgagccacctcttctggccaatgtgtttttttataagcagggtttgtcagggacattctcagtttttcctccctagtctggtataatttcattaccattgccccttttactcccaaagttgtcccagttttgtatgtagccctgaaatgctacttcattttttaaactatgtgtgcatgatattttgataacagtgaaataaaaagagaaggctctttggaccttaaataaaataactctggttcatcaagctcagtcaaagactttaattttcttttttccaaaaaccgattcttggttttttttttttcaatttttaccctctgtacattagaatgtatccaaaaactaattcttcattttaaattaattacaagcaatgtgtacttcaaagcacttttacaatcactcactcatttaatccttacgacagcttcatagggtaagcatcctatcccattttatagataataaaaatgaggggccgggcgcagtggctcatgcctgtaatcccagcactttgggaggctaaggcaggcaggtcacaaggtcaggagattgagaccatcctggccaacacggtgaaaccccatctctactaaaatacaaaaaattagcccggcgtggtggcacgtgcctgtagtcccagctacctgggaggctgaggcaggggaattgcttgaacccaggaggcggaggttgcagtgaactgagatcgtgctactgaactccagcctgacaacagaggaaaactcccaaaaaaaaaaaaaaaaaaaaaaaaagaggttagggaggtcttctgattgtctaccaaggtgacactagtccactggaccaggccctttaattgcagtttgcacactcttgccacaatatcaaatgataaagcatttaagccatcctacatatgaacagaatctgagatataaaaccaataacccagattaatagcctattagaaaaacagattatgaaaatgaataattcatacattcttctgtttttgaaaataaattctaattagtctgcccagctaggcttagtggaaactgaaatcaatctcatgggaagacagcccacacctccaacccctgtcatctttggagtcccagaggatgaaccgctgccgctaaacctccggaccaggaaaacagtcctagtgggtttttttgttttgttttgttgttgttgttttttttttagattacaaagtaatacatgattatttcagaaaatataataaaacagagatatagcataaaagaaaaaatattctaaatcccatcacttagaggtgaatacacctaacaatttagtggatacatctctgtctttttgtaatacagatacaaaaataggatcatatgacgcaaacttctcagtcacctggtttttttcaccaaacactatattttggacatggttccatgtccataaccgtgtgtctacatttttctttttagtggctgcctcatggttcatcatttgaattactgtatttgatcaatcctctgtcactagatatttgggttcttccttttttctttccagcattaactctgcaacaacgacgaaattctatacacacatctttgtgcccatgtccaattattcctcaagataaatttcctgaagagagattactgtgccaaagagcttgtattttatggggggcttctaacccacattgtataccccaccaacatagaatgtgcttgtccatactctcttattcagatgacccaatgtgttctcttatcaatgcttttatccctcctgtgggttaaccatgaatgaaacaaagcaagggggttgggatgggaggcagttgaaacaaacaagaaatttaaaaagagttctttaattccttctttctagtccctcccacactctaatgtttttttccaatttggaactctggcctgactggttccaccctcagctcacacaccaactttccctgcccatgcctattctgtatttttgagattgggtcagtctctcctcactagcgagtacatacattcctttgaggtgagggacatcaccttcagtgtcaaggtttggacaatatcatcaaagggtcaccaagacatgcccaagaattctgaaatttcagaaccaggcttgttagaatcagttgtttaacacagtctcccacactgatctgccagccacgagaacaaagccacatggaagctaaagacacaggggcagtgtccagttgctggctggacattcctacacctcctcctctgattctcaatgctccctgggcccatccccttccaactcctcccccactagcccggcactgaaatgcccttgttcactttattttaaatgggcaccattcggaggctacattctcacagtccattctttgcttcccgttcctcccttgctccatgacctgggatcatgatccctttcttcctaaaactttcacccctagtttcagatagttgacagttttgcacaaatagtaacatttccccgtaattactgttttttttttccttccttatcaaaaggggctggtcaaagccaaccttgttcagtttatgaacccaactccttcctccctcaagactgacacagagattgacgtaaagagtacgctcggcccggttaaatttataagcacagaaccaggtatcgcatgcttgtccatgtgactcttttttttcttttctttctttctttttttttttttttttttttttttttttttgagacggagtcttgctatgtcacccaggctggatggagtgcagtggcgcgatctcagctccctacaagctccgcctcccgggttcacgccattctcctgccttagcctcccgagtagctgggactacaggggcccaccaccacgccggcctaattttttgtatttttaatagaggcagggtttcaccgtgttaaccaggatggtctcgaactcctgacctcgtgatctgcccgcctcggcctcccaaagtgctgggattacaggcgtgagccactgtgccaggcccatgtacaaaataaagcacccggaactttgcacctggacttatctacactcgacaatctttgtcctaggaactcagggagtccacaccaggcttttaacacccttgagactgaaggagggaaaaggctgtaactggcagcgacaactgggcctagtataacgcgaactccagttttggccaaacctcctccaacacacatgtgcaaagccacattctcatgaagagggggcaaaacatttgctttctgggtttaaccttctaccatctcaaaccaactgtgccaaaaatttccctgttcaccaggattcatcaaaaaacgtacatttctattttcaccgattttaagagaataattaactgctctatttttacaaaaaatacacaaagtgatacaatctaaagactaatcctcagacaaaatcaattgctaaacattggaggggcaaaaggggagaccacgccgcaaaagcacggagaggcaactttcggcaccgcgggaaggccccgaccacgctgcggctccgcctctcctcccgcccctcgttcggtagtccggtagccccgcggctccccgaattccccgccctcggcccctgcgggcgcaccctgcaggccccgccccggccccgcctcatcgcgacgtcagttgttatgtctcggctccggccgcggccgccgctgatacacggttgtggagggtacggccgcggtctccggaggtggcgggggtgttggggacgggtgctgcgaccggcactgcccatccgagcgggacgggcgctgagtggccgggaggcagccgggtagccgcctggaggagcagtctcggggcctattattggttttttccctccgagaccgattccatctgcagagaccgcgacgccccatcctgggccgggccgcagtgcccgcccgcctgagaggcgccgcccgccagccggcccgagcgaacctggagccgccgccgtgcccgccgctcttctcgcggagcctgggcggtcggcggggcctggggcctgggcttcgggcgcggcgttgcggcggccgctcctccccgcgcagaacacgctgggccccgggcctggcccggccgagcgccgcgccctcctgacccgcggccgcgggagtccggcccccacggcccctcgggccccggcctgccgcccggatccccgcctcctgggcggatctgagttattttttggtctccccctcccccttgagatcgcggcaccggagggccgaccccgccacctgggtcagtgcccgccccgggggaagcgtccctcgttttgttcttccccgcgagctctccccgcgcccctctcctttctgtgcttaatggatgggggttttgagtttttcccctttatttttgtcggctcttgactgggaggcccggcgcgaggctctgcgtctctgcgtccctcgtcgccgcctcgcgcccgcgcggatcccgtcacctgcttccccgccggggatggccggccagtgacggcgccgggtggcccgcgcgtggacacggggccctcgcccaagctgccaccgagccgcggcccccgccctcgacccttctctctcccgtattccgagctctctggaaagagaggaaactccagggaagatgtggctgaagctttttttcttgctcctctatttcctggtcctgttcgtcctggccaggttttttgaggccattgtgtggtatgaaactggcatctttgccacccagctggtggatccggtggcgctgagcttcaagaagctgaagaccattttggagtgccgggggttgggctactcagggttgcccgagaagaaggatgtccgggagctggtggaaaagtcaggcgagtatcgggcttcccctagggtcccctccacctgggagaggggacgacctgtacctcctggtacctggctgttcccccagagtgaggcctttcctggaagcgttaaagctgcccaggtttcttcgtccaagcttcctacaatcaagtatgcggatcccagctttgaggaggagtctgaaattatttggaggagtgttggtgtatccttttaaggttatcgtaaaatgacagtttaaagtgtggcttcttagcgttgtttactaagttgagtgattttctcaaaattctggaatatcaactagttacaaactggaaagcattatttgtcagttgaagttcataaaaacgtaagaaaaactccaaaacgttgtctgtcaatagcaatatttgtcacgatagtaataataagatacccagagtggggacacatctttggaatacttactatcagaggcacttgggcctaggatttaaatgttaaatcatgagtttgaatatagacagtatacaccgtacagtattagcttttcagactttaagtttggtgaaaataaggcgagcattttgtataaatgcctgccatgttcgagtttatattatatttctgttaggatttttaaaaatttgcat

SEQ ID NO: 8563 - DNA, 6000 bp, Homo sapiens
ttacataatattaaaagggtcaattctccaagaagacaaaacaatccttaacatgcatacatgtattagcaaagcatcaaaatacctgagagaaaaaatgataggtatgcaaggaaaaatacacaaagtcactattatagttggatatttcaatacttctctctcaataattgataaatctagcaggtagaaagtcagtaatgatttaattgacctcaacagcactctcaaccagtttgatctaattgacatttatagaatactctatccaacaacaaaatacatattcttccaagttcacatggaacatttaccaaaagagattgcattctttcccataaaacacactttaacaaactgaaatgaacagaaatcatataaagtatgctgtcagaccacaacagaattaaactagaaattaataacaaaaagagagctgaaaagtctccaaatatttgaagattaaacaacatgcttctaaataacacatgggtcaaagaagacgtctcaagagatattttaaaatattttgaactaaatgaaaatgcaacttctcaaaattcatgggatgcagcaatgcagtacttcgagggaaacttatagcattaaatacacatattttgaaaagagatctaaaattgaccatctaaaattccaccttaggaaacaagagaaggaagagcaatacaagcctaaagcaagcagaagaataaaaataataaaaattagagaaatcaatgaaactgaaaacaggaaacaatagagaaaataaaacaaaagctatttctttgaaaagatcagtaaaattggtaaacctctagtcaatctaaccaagaaaaaagagagaaggcaaaaattactcatatcagaaacaaaagagagatcatcactatggatctcacagacaataaaaggataccgaaggaatattacaaatgaatggggccgcttgtgtatggcaagctcggctattccttttctttcttatcctgaaagaaggcaaagggtcctaactctccatactactttcccttcctcaccaccccactccctttctctgatggaaattgagacatgaatctatcaatcccaggaaaatcatgtaatctcactgggcattatttttccccatattttagccaaaatatgctaaaatctcactactcaaaaaaaaaatggttaaagaagtttcccaaattgcataagctttaggccccataggaactctatctgctttgtttgccacactgaaatttctgctaagatccagggggagcaggggcagtcagggtgaatttgaggcatctgtttggtgtgctggagtttttctttttcaataaggtgttttgtggtagaagaaatagcaatgtaattcctacagtgttaagagctgaaagacattaacctccttcagttaaaagttagaaaacagaagcacaaaaggacaagaacagacaatccacacacaaaaaagaaaattcaagtgattacagatctacagaaaaaccgtcaaccgcaataaaaatcaaaggagattgtaaaaattatcccacttcttgcttctcccaaaataacactgatgcatgtacacacacacacacacacacacacgcacacacaccacacatactaagtcctcacttaacatcatgtataggttcttggaaactgtgattttaagcaaaataacatacagcagatcctcaaaaagtattttttcattcaatgttgttttgttacaatgttgattgaaaaactggttttattatatgttgtttggcttaaagttgcagtttccaagaacctatggatgacagtgaagacttactatatgcgtgtatctgtgtgtatgtgtgtgtgtgtgtgtaatttgttttttaattcctggggctgaccaggggttagtgaaagaagaactctgatgcagccaacagtatacatctgtcaaatctttaaaaggccaacttgcctttaagagccatttccttctaaaaattcaaaccaagaaaataattcaaatgcacaaaaagatatataagccaaaatgtttctttgtttattactttaacagccatatggtttttatactccataacatcactttaaaatatataatgcacaaactgttagaaatataaacaagaggccaggcgcggtggctcacgcctgtaatcccagcacttgggaggccggggtgggcggatcaagaggtcaggagatgcagaccatcctggctaacacggtgaaaccccgtctctactaaaaaatacaaaaaattagccgggtgtggtggtgggcgccagtaaccacagctactcgggaggctgaggcaggagaatggcgtgaacccgggaggcggagcttgcagtgagccgagaccacgccactgcactccagcctgggcgacagagcgagactccgtctcaaaaaaaaaaaaaaaaaaaaaaaaaaaaaaaaatatatatatatatatatatatatataaagaagaaatagtaaatccacaaacacatttaaaaaacttacagctctttcagaaattagatcaagtagataaaaattttaaaaagacatagcagatatggataatacattttacaaagcttgatctaatataaagaattttgtgcccaatcatttatacaaaactgtgcctaaacttatttacgaaatcaaccatcaatcaaaaacttcaatttcaaaaagcgtaaatacagccacattctcagaccacagagcaataaaattataaaccaaagaagggggaaaaaatgtatccacttaaaaatttgttatcaccttttaagaactgttatgataactaagaaacaaaaattgaaattatacactatttagaaattgctgtatcataatttaaaaagtacacacgaccttaatgtctaattgtgcaaagtatgagtggaatattatgcagatatcagataagattcatgaagaacgtgttataaaagaaattggctgaaataaaatttttatggaactttatgattaaaaaatttttaaagcaggctggagacctgaataggaaatatgatgacagtgatggaaaaaaattaaaaatatataagcatagaatagaaacaaagcaaatgcaaaacaatataccaaaatgttaggagtgactataattccatattggcactataagccattatttttgttttgttctgttttctattctccaaaatatttttaacctaaaaaagacagcaaaagtgaggcagagaggaatttagggacttgctaaagtcacaaattcaatgcacggcccaggccacccccagcttccattgctgtgtctaatcagcccgggacttcagtaaacgacaacaacaacaacaaaaaacgaggattcacatcaccaggagagaaacgggctcggcctaaggacttggtagtagctggcagcaggacgcgcttcgactaaggggctctggttccaagcacccccagagccagcgcaggagaggaccttccaggtaaactaaaaccaagagcggaatgaaatcggtgaataagccaaacgaacctcagagggaccttggcacccgcacccccgccccgcaccttagttctgcgagcctttccccgtctccaacgcgggcaaggctgtcagatcctcaagccgacccttctctgcaccgcgacctcagtgtcctgcgcgggacatcagaggccggacgctccacctgccccagggcacgccccgagcccccaagcccatctccttcctgtcgggtgctcacctcttcctccctgcgggcccagggccttcttgaggggctgcggatgcgaatgagccagcgaagggccgcccgcggcccctcggcacctctgcccagccgtcccgaccaggggaccagctcagccccggtcggggccccggcacccaggaccgctcaggatctccattccagtcccttcgcactttctgacggggaaggagagttgggagaacgagactctcaagtctggggacttctacccaccattaaagctttggcattctggccatttctttctttttaaaaaattattattattattttttattttgagatgggagtctcgctctatcccccagcctggagtgcagtgactcgatctccgctcgctgcaacttccgcctccagggttcaaacgattcttctgcctcagcctccccagtagctaggactacaggcttgcgccatcacgcccggctagttttttttttgttttttgtttgtttgtttgtttgtttttaaagtagaaacaggatttcgccatattggccaggctggtctcgaactcctgacctcagttgatccgaccgcctcggcctcccaaagtgttggaattacagcagtgagccaccgcgcaccaagcccggcccattctggccatatctatagacggatgcattgcacaggaggctcagcactaatcggtagatactgcgagatgctgggaggttaaggggcctacccgcaatatctctggccaatgccttgggctagaaatgccataattagccgctcttttgatcccttgcaaaatgcgaatcccaccgcacctccaccccacccgagtggtaatctcctagtggtaatctaagtgagcctgtgataagataagtagctcctggtggtgagggtgagaaattggggagctggagccccagccagggacgaggctgtaggggctagggcgaagatggaggctgctgggcccccagatggaagacggtaacgtgcgcccgcttcgtttttgctcgaggtcagtcaggtgcagactgaattcgaagtcgctccctcctccgctcaaccccgaccaggccaaaactaaagcagcaccgccccctgctgggccgacagggcatcagattttgctggacgcgggtgacaggcgagatagggagtgtccctgctgctagtgcccctgctgctagtgcctagttacctgcagtacttaccctccctgggcctcagtttttcttcctctgtaaaataaatgcgctgggccggatcttttctgagttctcttctcccctacgaattctagatccctcctctgtcctccctgcgccagggaccttcgggcgacccttccctgtacccccaccccaccctctctggaccccgtttctgcctcagtacggcgcgctgagctctgccccctgcccaggccctgaccccctcaggagccgcggtttcctggggtaacagtgggaaacgtgtcggccgtctccgctcaggcgcttgctgtgtacagaaaggtgaattcatgggaaaggtggcggagggatccaggttctggtggacgctttacggctccaccaaggctggccccgagatttgcgcagaatgagcggctgaggatggaagggctgcaagatccaccgccttacttagctgggacccggccccacctcctctacagcagaccctgtctccaccggtgcggttggtgctaggttcccaaacacactgctgccgtttcttgtctgacatcgcggccctgctcctgcctgccttcagcctgggctagccccccgcccttcccccagctccctgcccctgcgcccaccacactcctcctccgtctcctttaggctgattcaggcacaccggctctcgtcgccttggtggccctccccagccctcctccgcgcctgctccgggtggcgctccgctgggctcctcgtgcgcctgtccgcgaccgcacccacctcatcctggcacccccatcgtggcatcacgtgttccctcatctgtcctcatggctggcgtgcccctctgcggtgagacctgcagaacaggaattggtgccgggtcagcagccggcgatgaagccggacgaagcctgcaaaccccacccatacgccagcttcacatagctcctatccattgcacagcagcgtggggaagcaccgttctctaccctccaagtaagaagctgattgttggggcacaggggagatcctatagcatggctctg

SEQ ID NO: 8564 - DNA, 6000 bp, Homo sapiens
gggcgtatgctgtcccctggggtgtgtaatgggccctctctgggactggctgggagctgaccagatcttctaaaactagtctgggatcggttagagactcagcctccccaaggtccagattttcacagtggtgctggcaatgtgaccacttgccctccagatctttgacttttccagatccctaagcccttgggaaaaggctgggggatatcctgataggagccactggaaaatccgcatccggggctgtgatgacggatgttttcctgcttccttttggtactggtgacagggaggggctgggaagggaaagacatcccaggtgggcagctttgataactctcctttggaggaagtagggagggagagtccttttcctatgtccctagtcacctcggtccccaggcgcgctgacccaagctttctcacttccccatctgtgggatgacggcagtcctggctgccttggaaatccaccaggcagcgttcaccagagaacccagtgtccacccagggcctccctctggctgcctcaggagagctagtaggtgagtagctcaaatgaagggcagtgtggcccccaaccaacatcaagagatgggaagggggacttgcttttcaggaaagactctttaggtcatctctaggggctggcctgagctgctgggtgatctttgaagacccttgagagtcatttagcacaatttctgtgtctttccttgacacgaccacaagcagttgtcaaggcctgagtcccaaagtgtggataccttccatagatatgctaggccctagggagactagtcaggtacgtgcacctccccccacccccggtacctgtattagtaatttttttattaattgaagacccagaaatcttttttttatatcagttgtactttcatttagaagtatgaatcatgagcaagtagtcatgcaggaaattgtatcctctgcccacccacccacagaaagggccagtgctggaatggacagaatacagcaggaagtgcatgaaggtggaaaaggggagggagctgggagcttatctccgagagcgtttgggaggataggcgcgtggagtctgttagctggaggcttctacattcctgggcctccagaacccaaacgcctgccgctgccctgccagtgaaaccaaaccggttgccttttgaaactttccactgaggccaccttggagtcagagccagcgagctcaggtctctcctggtaaccttcacacctagaggtggggggatgggggagcagtattgaaggtgaggaaaaacagcatgaaatggagcattgtcaggatagatggtgactctgtggaaaaacagaatcgggagtcccaagacctgatttaaaaatctgaactttccagtctgagcaatatagcgagaccctgtcccgtgtatgatggtgtgcacctgtagtcttgggaggctcacgtgggaggaccgcttgagcccaggagtctgaggttacattgagccatgactgtgccattgcactccagactgggcaacagagtaagaccccgtttctaaaaaagaaattctgacctttttatctccatgacttggggctagttgtttaatcttttttaattatctccatgacttggggctagttgtttaatcttttttaattatctccatgacttggggctagttgtttaatctttttgactcatctccaaaaggggagcaacaatacttatttttttaattttgtcgaggcagggtctcgctctacaggctggagtgcaatggcacaatcacagctcactgcagcctcaacctcctgggctcaagcgaccctcccactccagcctcctgagtagctgggacttacagatgcatgccaccacgcccccgctagtttggtttgtttgtttgtttgtttgtttgtttttgagacagagtctccttctgttgcccaggcttgagtgcagtggagtgatcttggctcactacaagctctgcctcctgggttcacgccattctcctgtctcagcctcccgagtagctgggactacaggcgcccgccaccacgcctggctaatttttctgtatttttagtaaagacagggtttcaccatgttagccaggatgatctggatctcctgatctcgtgatccgcctgcctcagcctcccaaagtgctgggattacaggcgtgagccacccctccccgccacgccccgctagtttttttttttttttaatttggggctgggcgtagtggctaatcccagcactttgggaggcctaagcaggtggaccacctgaggtcaggagttcgagcccagcctgaccaaaacggcgaagtcccatctctactaaaaatacaaaaattagctgggcatggtggcgcatgcctggtcaacatggtgaaaccccgtctctactaaaaatacaaaaattagccaggtctggtggcaggcacctgtaattccagctacttgggaggctgaagcaggagaatcacttgaacccaggaggtggaggttgcagtgagccgagatcgcgctattgcactcccgcctgggtgacagagtgagactctgtctcaaaaaaaaaataataataataatttcttttgtagagacagggtctcagtatgttgccctggctggtcttgaactcctggggtcaagtgatcctcccatctcagcctcccaaattacttactttttaaagggtggtcataagggtgaagtaagaaaatgtacatcaagacaagctgcaaaaatctaaagcacagaacacaagtgagggcacttgcatctcagtttaccctccgcttgaatagatacggggaataaactaaacacgagggtgacacaccttctcccaccttgtcagctgaagcaggaggccttccctgcccaccccatggtcattatctccagcatctccaaggccacagctttttttctttttcctagtggaaaagagctgggaaacgtggctttggccagcaagggagaaggggccattatgtgtaccagcaaagacccgattgttactgaaaccaaactgggctgcttttctcaattatctccaccacttttctggtctccacttttcagatgccaagttttaacccagaacaaaagctgctgtcggactgatttataatccagatctgctgacgcagcctgaagtgttcctcccctccaggactgcaccctggcttaaagttacctccaaacctcaggacgtcaagccccttcacctctgccttttgcccctagccaggaggtagcatctgtctccaggtgcccgtggggtgtcctccatgaggaccacctcttctaaccacctgcccagctcagaggaccagctggcaggaaagacgctgcaccgcccatgaggccagagctacaagttgcttctaggagtggctgtgggcggaggctggtggttctgaaggtggcggtggttctgcagcgtggctccccacagcccctttcatctgaacagtagggctcatgccacttgttaatcagccttccagtggcacgaggagtcattttctggggataggcgctttgcccaaagcgtgagaagcaggagcaggccctttctgttgattgaagggtcttcctggctggtgaagccctttccagacttgagggcagggaccagtggtcctcggggcctagaaagaggcagaattgggggccaaacggcagacccctctggtccgccccaaaagacgcctcggttcccccagcgtgcctcccctggatactcgcctcgacgtggctcgcccgcggtcgttcctgcaactgcacggtcgggagtccctctccccagcccagcccgcccggagtcttcgggggacacttcagaaagatcgggtgagtgtgattcccccgtggccatacccggagtccctcccccgccccacctccctccaggcgctgtggcgcagcccgcgactccgagccccggggctgctggacacccggaggggttgaggtccgggcacccagagaggcggaggtccgagcccccgggcggagagcgggcgggtccacaggtcgctgcgggtcgcagccccctcctgagcgagccttcgcggcccgcccccggcctccgctcgacccccccagcctgacgtcaaggggaagggggcggagagccgcggccgcgctggagaaagagccggcgcccgccgtggtggcgcggggagcccgagcctaggggcgcggagccgggcggggacggaggggcggtggcagagaggccgcggagggctggcgggcgagcgcgggcaggcggcgacgcgggggcaggggtggacggcggtcagagccgaacgcgagggcggcgcccggggactggagctgcgcgcaataggtgagcgaggccgggcttgcgtgaggctggagccgcggggccccggagccgccgctttgtccctttgcttgggcaggggctgccggacgcgggagggacaggggctggggcgcggggagccgcggcggcggagacggctgtacgcggggatccttcctgcgacccccgcggctgcttcgcagggtctcgggagtggggcgcacagcacctgcagccccgcagccccggggccggaggggcgcgccagcgagggttcctcgcgcggtccggtccgcggccgggatcctcgccaggctcctggactgccctcggcgctcccacccccgatggaaagtttggggcgggcttggagggaggccgatgttgtgggatcggatttccctgccgcggccccccgcccgcccgcccattccgctggggaggcgggttgtcccggaaagccaggcccccgggccgagccgggccgcgccgtccccggctggagcgctcgccctgcagggagggccgcggtccacggctggccgctcggggtgggcgagggtgtggggtgccccgcctggatcccgcacccctccccccaacccctcctcccggctgcccgtttcctcgccctggggggagctgcgggtgggagcaccgctgccgggcggatcctcggagcacgccacggggtgcggcccgatcctcgggtaaggagccgagatgaggccgcgggcgttttggggggctggtctggggcgcagcccccgctctcccgcgccggggctctgggccgacagggggcgtccgcaggccgggctcgccacgctccccgcgccgccgctttgtttgcgttcaaatccctggagctgggggaggggagaacccggggggacccgggacggggtcttggcggggaccctttgtttgggggtgagcaggtccccagcttctgcgtctccgcccctggcacgggaaggctggagcaggggaagccaatcccgctggcccgcccaggccagggtccctggggcgcagtccccgagttgggaaggttcgtcagagtcgcgggagcgcagcgggtgccggccgtgcgcggcgcgttgccagcggcccgggaggaaccccctcgcgtccccgcccctacctccccccgtcgcctgcgcgcgccgccggagtccccgactcgacccgagctcggtccccccaccgcccctccgccagagggctggtgtttcggaggaggcagtgcgaggaacaggatgaggccctggtcatttccacgcccatcccacccacttcctgcctccctcttgggcaacaaaggggcctcgggaagctgggccccttcgctcccggcccttctcacactcctgccctgctgatgtggaacggggtttggggttctgcagggctattgtctgcgctggggaaggggacaggccgggaccgggacctccgctcgcagccggccgcaccaggtttcccctttggggctttcccgaccgcctaccccaccgcatgccctcgtcgccctaaggagtcttcctcccagaattaggtgttggcagggtccggagccccagtggctgcaaggcctgctgcctgaggttctttcaagaaactcaaacctcttaggcctgagtgtg

SEQ ID NO: 8565 - DNA, 6000 bp, Homo sapiens
gtgcgggagagtgttggcagcctctggaagctgagaatggctccctgctgagagcctgtaaggagacctcagtcctgcagcctcagggaactgaattttgctgtcatcctgaatcatcctctgaagaaaggaacacagccctgctgacaccttgatttctgcctgggggcaggcagagctgagaaccagctgagccatactgtgcccggtcctgtagacctgtcagatcggatcgtgaatggatattttttgagcctctaaatttgattaggcagcaatagaaaactactgtgaggacttagcacagcactgggccctcatttcactaagtgctgcccaaattataccttttttttttttttttttttttttttttttgagacggagtctctctctgttgcccaggctggagtgcagtggcacgatctcagctcattgcaagctctgcctcccgggttcacgccattctcctgcctcagcctcctgagtagctgggactacaggcacttgccaccatgctgggctgattttttgtattttttagtagagacggggtttcaccctgttagccaggatggtctccatctcctgccctcatgatccgcccaccttgacctcccccaaatgatacctattaatattactactctcttctcttttttagcacatggcaagaaacatttattttatgacactattgtttatataatttcagtaccactgagaagccagaacttagtaaaaatggtgttttaataagtaaattatcttctttaactgcgagctttgataccaaagctgctctaggccatttctgccaattctgtgactgtgtgtaggacacacacacacacacacacacatacatgcaaacacacacacccacacacccacacattgaatgaagtcatacaataaatgactggtgctttgtcctttgctcagagtattgcgttccctcagttggcatttatgttgggagagcataagatgcttctctgcctctgtggtttgaagcctgtttttcactttctccttcagcgggtcctcaaccttggcatcaggtcttctgtgcccttgataatttcccccttgctgccctccatctcttcactctttctgccctcacaatgcccacttcatccaacaatgccagaatgcaccttcctttgaagcccacatggaacattctccaagactgatcatattctcagccataaaagacacctcagccaacctgaaagaatagagtgctataaagtgtcctctcagaccagagtggaattacactagaaattagtaacagaaagatatctggaaaattacaaaaatatttagtgatgaaacaacaaacttctacataagatatgagacaaaggaaaaatctcaagagagattaaacatactttgaactaaatgaaagaattaggtttcttgtttatatatttgataaagaatgagatggaagagaatctgaaatatttttctcttttcaaaagaaacttttttcctgatgatgaaaataatacatacatgttaaagaaaatatagaaaggtattttacaaagcaaatagaaaattatttttaatctttctataaactgttgaggaagttggctgggcatggtggctcacacctataatcccagcactttgggaggccaaggagggtggatcatttgagctcaggagtttcagtccagcctgggcaacgcggtgaaacccagtctctaccaaaaatacaaaaagttagctgggcatgcttgtgcatgtctgtggtcgcagctattcaggaggctgaggcatgagaatcgctagaacccagaatgtggaggttgcagtgagccaagatagtgccgttgcactccagcctgggtgacagaataagacctcatctcaaaaaaaaaaaccaaaaaaaaaacactgaagctaacatccagttgttttcctaaatgtgattttttttccaattaaaaacatgcttaataggtaatatggttatatggttcaattattttaaaaaataaatggaaaagatggccgggcacagtggatcatgtctgtaatcccagtactttgggaggctgaggcaggcagatcgcttgagcctaggagttccagaccagcctgggcaacatggcgaaaccctgtctctacaaaaattacccaggcatggtggcatgcacctgtggtcccagctacccaggaggctgaggtgggaggattacttgagcccaggaagttgaggctgcagtgagccatgactgcaccgcactccagcctgggtgacagagtaagaccctgtctcaaaaataaataaataaacataaaaatggaaaagataaaactgtaaagttaaagtcttcctcttgccagttctcagctctcctcaggaaacagctgttgatcctttctttgtattcatctgcagtgtttgtatgtgacccagctaacacaaataggtatttatagttctccctttttatataacctattatgtattgtcctgaatcttattttcttccacttactgtgtcctggtgatctttctatatcatatatagagaccttttttggcagctgcttagtgttccattttgtggctatactagctagatctctttaccaagacacgggttttcccttcagcattacttgttagcaagtcgtcttcttatgaatatgttgtaatttccttagtcctgtgttgttggatctttaggttgattgcagtttggggccatcataaaccatgcttcagaaagccacacatctgtgtctctgtcatcattttcatggtacactggctttcccagggtcctgctacagagcacctgtgcttccctgaaatgctgtcccaatttacttttccaccgtctgtataaacagggatcttgagaccagcttttccatggggaacaggaaaaggcagaaatgtgcattgtgtcgtgggaagaccagtaccgggaacttgtagtatctctgttgaagaggtccaggaaaataaaagaagaaagtgaccatagctaacacttaactatattccaaatgctattctaatcgctgtttatggttggcaagtttaattatgtcaatacccgtgcgaagtaggcagctattttcttcattttataggtgaggaaaccaaggcatggagccctttccattacctgccttttacctggatgctcagttgctatggagggccgggggtgggggcaccaggagagggaagatgggagagccaagccatcaaccctgggcacccaccctaaagaggaggggtggaaacagtgtttgccaaggggattgagtccatgtttatgtagacatttaaagcatgcagctctgattagaatatttttgttgaagtatcatttagaaatttttttctcagctttcagtttatattgcaaatgtaaataaaactgcagtggtggctcttagagatcgccctctgtttaatttggagctgttggaggcttcctatggagcagcctaggacactgaaaattctttcccctgcggtggcttcacagggaaggtgagcccctcgctcagaacagtcgacagcactggcgggcaaccccagctcccgggggctgagccagtctctagtgtgtgcagcctttgccctaagtaaatacatttgacatgaaatgaagggaaaatcttgctgttctgcttctttgtgccgagagaaatttggtctttatactttgagaagttctgtatcttcttcattcctgttttccatcctaaatactggttctagagacaaagactagggccatgctgtgagacttcacattgcagagagggacatctcgttggggagtatttctgtaagacctctgactcaagtgtagaaaaagagaattctactgtaagtatcttttatgatgggaatttagtatgtgctaaataatcgcgtgagttatcacagaaagaactaacccactgttttgcgttttagtgtttctatagtctttagtttcatggtacaaatcctgaactggtccttggcagtttcatacagcatgggtgtggcacagaatgaggcttgacacagactatgtcactaacttaagacaaaattaaaaaagaaaatcaacaaaggagtggaagctacagtcagtttttatgtggatttcccctttggtagaagaaaatgtcgatttctccgatgtgttctgaacagtggtttcaggttatcccgagttgttctcctcctatggtgatttttttcttccctatgtatgtgtcatttatgtgggttttgggcacagtgaaattcaacctaagaccctttagggagttcatttgtggtttgactggttgagtttccccagtcaggattcatagaagggccgagtaagtcgcagctgtgccctcacccagccacttcccaacataagattaccctgcatgctctctggtaggaatgctgctgatcattaattggagctcttttaggctcatttcttgagacttctatttttctagctgagctcccagcacgtggccttgtaaatgtgaaaggtcgtggcagggtctctagcggtctctggagcaactgtgggcacccatgaatgggctgcctttctgtccccctttgacttcctctccccacctcagcttggattttggaacgtcaggctcatgcttggtgtactctgaactgtgcagttgacatgttcccagggcctttgtcctgggctgtgagggttaaccttgctgctttatttatattccgaagccggttgttattaatgttacttactgtttacctagcacctctcattgctggttatttgtccctgctctgaatttcccctcttctctccccttcagaatttctcaccagattatttaaccaacagactctgctgcagtgccctttttaggataggaactggagttattgttaatgttacaggaagaacacattctcaaaggagaggggggtggtgggaaactttgattttcatagggttttcagtttcctctcaaatgggaggatgcagcagtgccgctacttaactgaacgtctcgacagtctgatggggcggccctcagccttccggagcagcagtgggactgacctgtccagtgaggaagaaacactgaaccagatggaatggcctttggggatggaaaaaccccagtttacgctcatctcttctctcagctaacttttgtggagccctgttcccaaactggcctgggccagagcaccgtggaggggtatttgttgtaaatggaaggtttccaggcccgcctggaaatcctgaagggtgagacctgcagtgggctcaggagtctgcatttgtgggtgaccgagggggcctcccctccctctagagtccacactgtggagagcatcaggaagggaaaggcctgcatcttgtgctcagtgagctcatcgtctagtgaggaaggcatgtgtgaatctctggacaaggcagcgctgagctgttgtggactagtggtgcaggcaagggattatttctgaccaaggatggtgagaaggtttcccatacagactgacgtctggattgagctttgaagaagaaagccaggactggagcagacgacgaggagggaagagtgtgaggttaatgatagtggctttctgtttgatgtcggagaggcttcctgtactctcaaggcacacttcttccctcttagcctttaatgcagtttcctgtctttccctgcataccttgtcacctcaagagtaaagataatgatgaataatttgttgtgtaagatcacagcccatacagagttgtttatactctctttgaggaatgtagggtgaccctgtctgtgtaagcagaaatgcccgtgagtataagtcaggtggcagcaggctccaggtctagcacacctgagcgggctctgtggtgtcgtactcggctctgaaggtctggccaggttcattttttaaaattttaattttaatttttaaattttatttatttttttgagacggag

SEQ ID NO: 8566 - DNA, 6000 bp, Homo sapiens
tggctcacacacaaaaaacccgagtcatttcaatggctggacccagaaaatcgagccctcttctctcctccctgtctctggcccccaactctgcctcagttgccctggggtctcactgtcccctcaagacactgcccctgcaggcgcaggcagagaggcctttgttcccctcagctgtgtcccctcagctgtgtagagaggatgctgccgtcggacacgtggtaactgagcctgctgccacccccacccgtgatggtcagtaggtcgcgtgccatctggggctactagagccggcccactgtgcatactacatgtgcctgctgggtgctctgggctcttctcgcactcctgcactggcaaccgcttatctttttgagctgggtcttaaaggtggagaggtctgaccaaggggcggtcactcacactggcattccagtgaagggcatggcccatgcagagaccaggggtgatatacccgtgtcctcctacctgcagaccgtgacggtgctggggaggggagggggcaccaggccacatcgggagggcagcaggtagacgctccagcccctccacggcagaggccctgagctttgcaggggtgaggaggctgtcattcagaaacgtcgctgccagggagaagggacttagagaagggagccttgtggctgtggcccatggctgccctcaccaccaggctcctgccttcaggtggccaggggccatctgaacgcccaggggacctgggtatggggttggtgtagaccatgtcttggcccttcccaaggtgccggcttcacctccatccctctgtgctctggtgctgacctggcatttgcagttatgtgccctagtggcagccgctcgagcttggctgccaagacccacggtgtggtcagaccactgtgtgcggctgaggaatgagttcctcccaggaggggaaagccctcgggtcaatcggggccctcgtgcccacccgtcactgcaggccaggatcgtggcaggtggcaaccccagctttgagtgctgcgtcttctggggctgcagccgcccactgtgagcaggagggtgagggcaggtagagtctgtcctgccatgaagctggaggctttgacagcaggggcggacagaactgagcagaaacacttcacagcctggccacgagctccccgctttgtgctccctccctcgcatttccccgtgttctgcacccccagagctgaggagccagggcccttgtccaggaacaggctggatcgaggcctggtgcctgcatgcattcccaggtgggagccaggcaggtgacccggaccctccaccagcccagaagcagcccttccaccgaggggcctcacaccacttctgcctgctccctcagtcattaggcccagcgctggctaggtggctccagacatgaccagcaggctctaaggctcatcagcgtcttctggagcctgcacgatacacacacaggcacaggctacaccatgggagaccccatctgcagggtgccaagcccttgcatgcttgggcctctgacgggatctgtccccgctgctaaccaggcacagggcagcttgctctgcaggtcttccagtcagctagcacagaccctggccagtgtcatgactctgtggccctgggcaagtcacacaccctctctgggccatgggcagaggagctcatgatggaggcatgccttgggcttcaggggatggtccctgaatgggtgtggggctggggctgaaggacccgcctgtgggctggggcgctgaaaatgggagaggaactgagccatttgtgtttcccagatggggcctgctgcactgtgcacagcgtgtccttgccctcagagtcacccttggggccagagtccttgtggctgtaactcacagggtcattggctggggctaggagggcaagcttctctgttggtggacacatcacactgtggttttttgtgttcagaagaaacctgccacactggcctgtctccatccatttggtcacggccccacaggagtggggagcggaggtccatgcggccctatgcctcccctggacacagggtcagctaggaaggatatggatagcctcttctgagcagtcagggcctcgtgagcctgaggcaggagacagaagcctgccccggccgcctcgggcccttactccctggcccttggtcattattgtttctaaaacgtttgtctcacctgctacctgaagaaggtcccgccctctggcccttgaggccccgagtgcccaggagctgctgccatcagcatggatgggtggtaccaggcaggctgtgggtgcagggtgcttggggagggccaggtgtgccttgggacgtgtgaagtgggagcctggagcagggaaactgaggcctgctctcgcccctgctgcccacagcttatctgccccctggagaccagccgtgcctgaccctggggtcgtcagctcagtcctgctgggtccttcctccaccccatctgctgagagctcctccagggcagggtctgagcctgccaggccacagaaaacactgggcggatgacagctgcctgtcccttcctcggcagtctgcatgcagtagtgctggccttgctgcctgcccctggagccatcactggctaccccgcctgcttcagagctgccacccctggggctttctgacatgtcctcataggcgggggtggcctgcagtggcaccgcaccacttgccaggcactgtgcctccctccctgcagggaggtgtgcggtcagatcaggcagttgccagcggacaccaagaagcgctttgtgctccccggggtccctccatgccccccacccccacccctgcccagggcagtgtgaggggaggaggggagcagtgtgggtacacttccatgttgccatctggggaatcctggcggggggtcagggcccttctggagctgctcccccgggcagtgaggggccctgtgggctcctaggctgcctgcctggccctggttctacttggcctgaagcccacccaccccagcgtggacaggagccaggaggaggagccctctaagaatgactgcagcctctcccggggctgagcccacacacacacaccgggcatatccacagccgccaccacgttttacccacctgtccagtgtcctgacgcctccagcccagcgtcatagcgagcctggcaaggacatgcttcatgctgggctcctgccgcgcaggggagggtgggaggtggagtcttccttgggtcgtttctcccttgtgcacgcaccgttacatactgtgcaatgcgttggtgtcttgggggacaacccagcaagtagagttggtgtatacgtcatggcttcctctggggtcctgggctggctggtccgctgggcaccccccccccaaccaccaccaggccttggcaggaccctgggactgggactggaggtgaccctcgctggcccctgcccaccttctgttcctgctgagtggctctttgggtggcaccatgcccaggctgtaaacagctggtgaagactgctggcctcaggcggctgtggctctgcgacttctctggatgcggtattggtggctccacccaccagcaggaaaaagtcaggttgtccctccagaggagccaggccaggcgctgcagggcactgtggtggtcatcctgggtagccatgtgaccgtggcatgctccttggcatctctgataccgggttttgaaacgactgagagctaagtgcaggagttggttggcattagaggcgaagcccaaactcctgtagtggggactttgactcagagcagccctggtagcccccctcatgctgcgtcacagccctcacctcctctccccgtctccttgcaggaagttctactacatcaccctgctacgagaccccgtgtcccgctacctgagcgagtggcggcatgtgcagaggggtgccacgtggaagacgtcgttgcatatgtgtgatgggcgcacgcccacgcctgaggagctgccgccctgctacgagggcacggactggtcgggctgcacgctacaggagttcatggactgcccgtacaacctggccaacaaccgccaggtgcgcatgctggccgacctgagcctggtgggctgctacaacctgtccttcatccccgagggcaagcgggcccagctgctgctcgagagcgccaagaagaacctgcggggcatggccttcttcggcctgaccgagttccagcgcaagacgcagtacctgttcgagcggacgttcaacctcaagttcatccggcccttcatgcagtacaatagcacgcgggcgggcggcgtggaggtggatgaagacaccatccggcgcatcgaggagctcaacgacctggacatgcagctgtacgactacgccaaggacctcttccagcagcgctaccagtacaagcggcagctggagcgcagggagcagcgcctgaggagccgcgaggagcgtctgctgcaccgggccaaggaggcactgccgcgggaggatgccgacgagccgggccgcgtgcccaccgaggactacatgagccacatcattgagaagtggtagtggcggtggtggccacggggaggcctcttggggggtgtgggggataaaacaggacagacgacaggtccacccaagactgtcaagggatgagcatcccaaacctgctccacagaggtagctgcgtcctgaaaaaaaacagagcagggatgtagtggggctgggcagggatgggggcttgagaaatcaacaggtgcagcccagtgggtcagaggaaagcgtgctcgaaggatgccatggtcagggcagggcctccagagcaggtgttgtgcctggagctgctctcctggcctccttggatttatcgcaaaaactgaaggtttgcgcaagagacgaggacagcggaaagtggacctgccaggccgggagtgtgtccctcaccaactatgcacacagcactcgctcttagctcctctgtccgggctactaggagtgagaccagcttctggcaactgccccagctccaggccatcccatagcccctcctcttctggctgcccccaatgccccgaggcctggggagcccccagctcacccatctgtagctccctcaaagtcagggcccaccccatctgaggcagagaagactcgagtccagcccccaggaagcctgctcccctctctggcccatggtcctgcttcatgctttgggtcaggaggccaaagctgatgttcaggccccacccactccctacagtcctcagaccaaggaggggtttgggtagtaggcccgagctgcattgccggccttcctcgggccaactggcagcccaggagtggggaggctttggccagggatgctgccacttgtgcgtgagtccgcggctggcccttggaggtgaccatccaggcaggcctggctcagactggaagggctggggaccgagggctcccctgcctctgttctcctttctgacccactgggatttgctagcaggctgccccagccccatcaccgaaacacatactcaagagctcaaataccactgctcccaccagcgtacggattaagttcatcaggcttccatcggctggagcatgggaccatagcccctgcccaggagccgtaccctcggaccacagtggctctgtatggccaggaactgggactcgagctttcagattctcaactagccttggcaaaacagctgtaggtggcctccctgacaacagacactcagccctccccaccctggctctccttgcatttccccatgctccccaccccctggcaaaaggctggccatgctctgttcccagcagccgcgcaggtttccccactggctgcaatggccctaccaaaagccatgttgcatatccgttgtaagcacgtgccctgtgccctgtccccattccttatgccctaggaggccaagctggtgtctctaggagggcccacacaggcaccctggatcccccagagagtaga

SEQ ID NO: 8567 - DNA, 6000 bp, Homo sapiens
aagaatgatattaatattttatttagattatatgctatgttcctgcaagaattatgtttattatccttattgctatatgcatggtgctaaatacagtgtctgtcacataatatatagatatttagtgaatgaataaattcatattctctgagctaccacttctgggaagtaaaacaaacaacaacagcaacaacaacaacaaaaactaaaagaataccaacaaagctgactacataatacgggaagcattcaagaagctttattcaaggtgtatttctgatattaataaaatgtgtgacttcagactagtcacgttttctttctctaaaaatttttcatttgcaaaatacggtaaattggagtagattatttgaatgctcctcccagctccaacaatcttaaagtctctaattataattaaggagcagcaagatgatgaccagaaagaaggtcagagatcaatattcataggtagaaacatgtcacaagggcatattcagacaaagtgcatcctgaccatgtccactgacaatcaaccctccacctgatacactaattctattctgggtctggagaaggcaatgtggagctcgtattgaacacacatatgtcagggtctaaaagtaccaaagcaacataccttataatcagcaactgacttaaaacccgagggctaattccatgtgagtggagtgacaaggatttgatgaattgttgacatttttgtattacctacacacggatggcaatattaccaattgtaccttctcttgacatatccaaagagcaaaataggatttatatcttcagactatattattattatggatgtcaatcccttaaaaaatgaaaaaaatgatataacctttagtctttcaagtcttctgctggctttgtctaaatctgtagactccttttatttttactgtcaaaagtttatcaaacaagagtcagaaaaaatccaaataatcaaatcagtatttaaagcttatattgtcttctgaaacttataattgccctcagtcatgctttttgccataatatttatgtcttaaaacatttacagatagtaacagtaaagagaagctgaaaatataaaaagagaagaccaatgtaattgtcttggaaatatttttgctttccagatgtaattagataattgcatcactcttaattttcttttcaattgtgcatacctcctaataattgcttaatagtaaaaattaaagttacaccaaaatcttatttatctcaaccaaatctttgtatcctaattgagacagtatgctgaaaaacagaacccacttttgaagaaaagcggttaaaaatgtgccttgatctgttgcagtttgagaaataacttgcatctaaagttttttatttttcttagaggctttgtccagagtaactctgtttcaagttaaagaactgatgatgtttccttaataatcctttctctctctctctctacctcctccgccccctgtctctctcagtctcttccctttctttttcatcttgtgtctgctgctgcctggcaacttttctgtctggaaaaaggcagggtaagaaacttagcaggccttgcaatgatagctgcagaaatccttagcaacctaactttcaggccaactctccttcacacacatctcttccatgagacagactgtcagctccagcttgtttagacacacgtcctctccctaacttaacgatgttcagatgtgtagcacaaattgttactatctacagtaagaaatccaatctcacaaaaataattaagttagcagaaatgaaatgtgatgtttgatcacatgtatggaaactgtggctctaattgggaagtgtaagattaccactgactgataattagcattcatgtgttgttttaaaacaaaaaggaagaatgattggttctactttgtttaatttatcttaatgagagatttcataatattctatagtttgatgaattaatttaacttgtcagtgttaataactctgattagaatgaataaattataatggagcctagtaacaaacaaaattcgaacgctcactcaagcttttccctcttcactaatagtgcactttattaatttattttttcattaaagcatatattatggggaaacaaaagtatttcatagaaaattatacttaagcttttcatttatttatgatccattaacattcaatggtcatttaaaacctaggagcaaattatttaattttaaagctcaaatttggtctacacttttatcaacctcactgatgctcatagaaaccaatcttcttttataaactggtcattttcaaagaatatctggaagaagaaccactttatataagagatttgatgtgggacagacaattttatcccatttcattttgacaccggctttatttcagttttggagcaaatatatattttctgcttaatatttaatctgtttatttcatattttggcttcttggtatgaatcagtgtccttagtataaattttagtcttaaaaactcttaacaagcatttaagttcatgtgttgttgtccacttaagtactggtgcatacctaagcacctatactttcaccaaatttttgagagaggttttataccatttagatctttattaatcatggtcttaaaataaagcttcaatttttttttttttttttttttttgagatggagtctcactttgtcccctaagctggagtgcagtggcgcgatctcggctcactgcaacctccgcctcccaggttcaagcgattctcctgcctcagcctcctgagtagctgggactaccagtgcatgccactacacccggctaatatttgtatttttagtagagacggggcttcgccatgttggccaggattggtctcaatctcctgacctcgtgatcctcccacctcatcttcccaaagtgctaggattacaggtgtgagccactgtgtccagcctaaagctgcaaattttattttatagataatacttcattaagattaattcacagtggaaattaggcttatcatgttaccttttattggtgctccagcctatactttagtaactaatcttccatatttactatcactattttatagtaactgttttgagtcctatgtcattcatgattactgacttaattggtgattacttaagaattctattttgctttattattctggtcacaatgtgcagacaatgcatttttgatttttttccactcaatgaaataaaaaagtcaaccagatgatctaaaaagatcatatggtttttactctggctaattcatttaacaggctattaggaggctctacgtatttggaatgttgtatatttagaatacaaaatctcctgagtatttgctactcttatgatctttcctagcttttcccttttccaagctgaccatggaatctagggctgctgcacgtactacagaagtgaatgagttagtgatttttaatcatagcattggggcactttagtatgtggtaaaagtctttggtgggtcatactgttcctggctgctttcctttactttgcagtgaagtggagggcgattggtggtaatctttcagaagaggaagaatctggatgtccttagtatggtttgtaagcactcctcattttcttgccaagagttaagtggatacagatctcctaatagctgaccttctagttgactgaatgggatcatgtaagaaagacacctgctacgttgtcccagtgaataagtttgtcatacaatacagaggtctgtggaccctcgagaaagaaacatttattacttggcacatcattcaaatctctctctgtctctctctctctctctctcacacacacacacacacgcgcgcacacacacatattctttaaactctgccactcatttcaaagtttgtgaattttcagtatgaagtaaaatatgtaaaaaaatctttttattctatattgtacactatattatgaaataataaaaacatctaggaaaaattagacatgtaacaactttagaagaaaagaagcatacacttctctactaaaagtacaaaaaaattagccgggcatggtcgtgggcgcctgtagtcctagctactccggaggctgaggcaggagaatggcgtgaacccgggaggtggagcttgcagtgggccgagatcgcgccactgcaatccagcctgggcaacagagagagactccgtctcaaaaaaaaaaaaaaaaattaagcatacacttttgaatgtaggagtcatatttcaaacacaaaatggttgtattttcaagggaaagtaaactttataatttaaaacatggaaaaagtgacataaaatacatttataatcacagagtaagaataaaaaggtgaaatccacagattattgacaatgttctgcaaagtcatctctgtgttctttcatctagtccagtttttaatggcttcaaaggagcatctaaagatatttctggataattttactctcataaataggtagatagtaatgctggcattcacttataagtctcaaacagcaaagtaaataaagcttttaaagcatcttccttcacttttcaatcgttctcttccttagttctgttcccttctcatagttttcctctccactcatgtccagtttcaaaatattaaatataaaaccttttcaactcttgttcttagaagagaattcctgatgttacaaggaagaaagtaagtctacaactattaagatttctgagttttaattccgtagccactttgtaatggcaaactaaaattttagggactgggatgatcatgttgtaaacttaagtggtcataaaaacaactttactaatattattattccagtgattcccgttgatgcctccgatggctcgggaaagttcttacaccgcccctgtagtatatggaaaaggaaaacaaaacaaaacacaaaacaaaaacaacaaaaccctcaaagcctgtttaaaatggctcgaagtacccttttaaagacagaaccccagagaaaaacgctgccaattcgttgctttattgttccctgcctggggacctcaatagccttttccattaaccttcccttcttacgcaacggttaatgactttgggggttgttttgctttctgtttctgctgagtcactaaattttgcctctttgtccccaggtgctgctcagcataaaagttaaaagtgcaattcaggaagtactgggattctgtgtagagccgaggaaaccatttccctaagagaagctctgttccttggcttgtccttccttcccgggaaggaagcttccgaggaacgaagggagaagctttgttttgcctgcagaagcagccctgtgctcggctgagggttctcagctggctgtgaactgcggagcattgtaggcgcctggctggctcaggccaatgcagaagtctctcccttctccaaagacccaaatccccacagaaccagcttcgagttactttcccttcaaggggattaaaataattgtgatttgtggcgctctccgttcgcggtggtattttcctgttgtgttaaatgcctcttattaagtaatagatgtgatttatgtgaacgacgaaggggtgtgtggtggattcggtgattaatcagtgaattcccatccgctggcatctctcactgcccctcttgcgtgatgtaagatcagacgtaccctgcattgaaaagtcaagacacacgggcgtctcgctcgcgctcacacacgctctgcctcctctctcccgcacgcgcgcatccctccaccttccacatcctgctccaggcaggagaaggctgactggctggactcattgagctgaagaatttccagtgacatttgtaaatgacgccgctcgattccaggctccaagcggcccctgccgccgccgccgccgccgggccgaaggtgccgccgagcagtctccagcgcaggcttccttaccgggcgaccacaatgtccgagtttctcctcgccttactca

SEQ ID NO: 8568 - DNA, 6000 bp, Homo sapiens
gtctgggcaagcatgacagccttggcacgaggagcagtcagcctggccagatagagcaggtaggctgccggcaggagctggcatgaaggtatgagggcagcaggaggctgggctcagctctggcggctgagacctgagactctggtgggattgagaggaccaggccggcatcaggggcaaggtttagcaatcccaccctagaggcaagggcatcagggctttaggccagaacccaggcggagaatgatgagaactaccatagcagccctgtgcttgcttgtggagcacagttggtgccaggtacccatccgaacgttttattagaccaaggcttttaatttgcacaatcttcttgatagaatcctcattttgtaagtgaggaaatggaggcacaggaaggtagagtagcttactgagcgttaccctgctgggaagtggcacagctgggatatgcaggcagtctggctccagggtccctgctcataagcactttgcttcatggtattcttgttacatatcacagggaggaccattcacatggggtgcatggggcccttggagctgggcaatgtgggctgccctgattccatacttcttcccttaaaaaaattaaaaaggccaattcttccacactgcctcctatgtatctttcatatcttaactcattaatttcaaaactattatctccatggtcttcatggggcctggagagactctggacatgcctgcctagttggtaagctgagctccgcctcagagaactacagcagaggactaatagaagtggaatctgttgtctgtagtttttttgtttgtttgttttgttttcattcccttgtctgccctgttgctaccacctatctgatgggctccagggaggaaacagggttatgatattcattcttgcaatgccacacagatttctagaggcaaaggagtggagtactattacttgcagagcagaagatgagaaaattcatctagcacactgtagtcacttagtaaaatttaaacaaaaacaaacaacaaaataattcccaaggctgaattggcaaacagagaccttgggcttgtgttctagcccgtggagccaacaggagggctagccttggctgagtcccaacattattcctttgtctcttctctgagttcttgcagttctgctatagaacgcataactacactggctttgaaaagttaaattcccgagaaatttaggtggaaaattagaatcagaattgccttttgcttctaaatctgcaccagtttgtcttgatcatggctatttaaatctcatagctaatagctaatcttctcactttggcttttctctccttcttctctctgtccaaacaagtggaaaacagaaatacctgtcctttgtactctactgtcaatttcatgggttcactctatgataaagcccagcacgggtaaggaaaagggacttaatatccctaagtttgaagcccatgaaaaagaactgaaaataatgtgtccttgtgatacaaaatagagctgtcctaatttgttgagggacatgccatttcctccacttaatttagctcagtggaggcatttgtcaaattgcaaggataccttccccatcatgaatcacgtggcatttataaacagaatcatagagatgatgctttttcatagggctttttttgactttgaactgttgatcataatgagagataactggaaaagagttgagtcagaaacacatttaacagggcattctcagaatcagaggcagcctccttgaggctatgcagttttggaggctactcagtaatgagaggtaggtgggttcctgggaagcaccagcacaagatgagccccaaggttttcaaacttgttctcactgtaacctcaggtgggagaagtaggccagaaacggggtggtttctctttcatcttcttgaccatcattcagctggagaactgttaaagtcaaaaccaagaaggtgccagtgtcttggttgcttttcactacctgctgcagtgaagtgtgaaatttggccctaggaacttgaacttgctggaatccatagacccttttactaaaagctggggactggagctgatctgaaacaggctcgggaagctcccagggacgtctcactacttctcagcctggtctcagtttagagaatcttggggcagagatagtcagttctaagatctttctagagttctgagctcacttttctggaactccttagagttcctctggggaggttcagagctgagcgtctcactggggttcctctggaactctgggatcagcccgagtattgggttgaaacccttaggtgactcacaggtgtggtgctgattctgtgtagatccagaccctaggggaagactccccaacctgtgatctgatttttagttatcagctgtgggtgaacaaaatgacttctgatgggataattttttagaatggaaggcgtgggaaaaataggaatttccccaaaaaagtgacttctctctatttcaccaaattcctcttgggaacacgcctactgcccctcatcttgaaaactcttatcacggaggaagtgggggaaggaacactccagtatagaacatatggctttgaataaagtaattgaacctttgtaggcactaaaaggccagataaggcaactcctggtgttttcccacctcttacagtttatgattctgagtccagcacatttctgacttcctggaaagcaggcagagcctgccccttcacatctattcttagttagaggggttgggtgcaggagcaaccacaggctgctatatgtgatccagtgcctccctgctaacatccctccctggtcagactcgctgactgcatgcattagggtaccgtaaagtgcgcccctgctctttaaaacttcctttaggccctcacattggctatagggagcgctccacggcagccatccacagaagagccgagctatgtacagtttatccagttgggaacaatttgtctcatcttggtgaattgtgaaagtgggctgcctctgtcttctccccttaatttagatgtccattttaacacaatcggggaatatctatacttgcaattgaagtggtaaagtcgggaaatgatctggagaatttaagagaaaaaaagaacctcttgtctcagttttctgttgattctggttgaaataccgtatggctgtaattagagagttaataattaaaataagagtctgacacatgaatttgagcacagcagccctttgatctggtcctcttggtgtatgggggagggaaccgaggttccacgtggccagggactttctccaacatgcatccttgtcgacaggtagagccagcactgggtttctctctatggaatcccgttgactgcactcatcccctgctgctgtcctccctccatgggggcacaatctcagaggtgacaatctgttcaaaccctaccattttaggattctgaaggacagcaatatcttcttgctatcatttatatttgacagtggactaggtattgatgccactcccaagatgtgcgactgtgattgaaagacatgaacgggtcagcacagacctggaagaactatgctctgctcagctgttgtagctgttgtgttattattttgactcaggtttgttcctttaagagttacgcttttcagagatactggctggaaggacaggcctcctttcctagatccagggccagccagttactcttgtgctgagctcccatgaactgcagccagtgccttccagctgacaaagcagcttctcaatggtaagtgtttatgttgcactttagatttgcagagttctttccctaagttatttcttacctcattttggcgggtgaagaaaccagagcccatcaagatggtgactgactggtccagagtcatctgaccaattagtggcaaagctgatacaggggacttagagcctctgagtttctgggtcattacttacccagtcagtcatgcagcttctctaaaatatgttctgtgctcctcaccagcttctttgtcctcctgaatttagctggctacttttagagtgggccataaagctctcctgtttcaaagctgcagctttttttttttttttttttggttgaccagaaagttctaagtacctagagaaactcatcccaggctgctgcaatgtgggacctgtcctaggtcacctgagttgcggtgtggagcagcaggtggagggagtctgacgtttctatttgggttttggggaaaagaccaatgccacttcaggattattaaagatttgtgcatgggaaggggatgaagaatttacgtgaagacattggctgttgcttaaagttgatttaaaaacattcaactaaagagcattaaacatttcacatctaaaagttgagaagtttttggcttccttttcaaacttcaccagttgggacacagagctcttttcttgccagtgaggcagagagacttcaacgagaatattgaaaacttttactatagaaattcccacaagaaatcttaccatctgtttattctagtcatttttttcttcacattgggtgtaaagattttttttatgactcattgcccttttgacttaaatgcatctgttaagtacagatgttggatgagattagtatctgtttacctgtctttacatgatattctctgaaaataaaatctttcctttgctcccttctccaattgtgaatttaattaagaagatgagcagttgtgtttggagtattcaatagtttgcctttccaaacattccacgcagccttttggatattgataagtgtttattgtagaactaacaatacaggcgaaacaggaagcagctctttgctgggtaggatgctccgaggcgccctccactctccgagggaacgctcttcagctgactgaagcagggaagccgagccaatcagaggccgctttcctagctcagtcaccagtctgtggttgaggaagggttttgctttttgtgctctgtattgggaaggcagataaaatgccaggtctggactgcctctggggataacctcaccctgtgggatgtgaatgaatagcatcttgcctggtaaatccacaggaattgataaggcaggcgcagttctcccaaacaggccttttctctttaagctgtagctgtggtttctgcagcaattttgtttttgccttgaaagaggtgctctggattatcacacctccatgtatgacaatttgtacctgcatggaattgaagactcggaggctgtaagtattttcatagatagctaattccctctcccctcctcttcctcctcccactatcccctccacccccccgcttcttatttcttaggcaacgcagggaacatggagcagaaagctaacatcattctggggcttgctggctgctgtgtaaatgttctctgtgtagtttataggtaactaaaattatttattgtcaagcaaaaaagaaattagggtgatggcaaagcattcaagagtgtaggctgtttgaatttatacattaccgggtccacgtttgatctcaccaggggtaactgctccttgcagactggtttaaactatgcagaaagtgcctatgttttccaatagcagggttcatagaaaagcctcattcattatataatacacattgtttgttgagctagcatgaatggaagttcctaagctgtggctgtattattatgtgctttctggccaaacaagcagtgcagatatactgcttctttgttaaggaaatcagatgctaggcttgtggccatacagcaatccagtgcagaggcagtgggcagtgttcctatactctaccttggaagagcgaagcagactcacgtgtgttttgggttagagaactggactccttctcccccctaggtcaggctcatgcaatctgttaaaatcagggtgaaataatttcctgaaatccctgaaatcataccatagagtgctagcttttaaatataaggtaaagctgata

SEQ ID NO: 8569 - DNA, 6000 bp, Homo sapiens; identical to SEQ ID NO: 903

SEQ ID NO: 8570 - DNA, 6000 bp, Homo sapiens
attttcatgaattatcaccagctgtcaaatatcccaccaatattctgaagaatttgcttctggaagttgataattaagctgatttttgctttacagattttaagaaaacatgcttttttttttttttggagacagagtctcgctctgtggcccaggttggagtgcagtggccccatcttggcttactgcaacctccgcctcctgggttcaagcgattctcctgtctcagcctcccgagtagctgggattacaggcacgtgccaccacgcctggctaatttttgtatttttagtagagacagggtttcaccatgttggccaggctggtcttgaactcttgacctcaagtgacccacctgcctcggcctcccaaagtgctgggattacaggcctgagccactatagccagctaagaaaacatgttcttttatcccattatgaaataaaacctctctctgaaaccaaaaagaaatggttccaagatgaaagaaaagtactcagtgtggttaaatatgttaaataatttttaaaaattatgacttacttatcgtatcacttacaatctcagtacaaagaggatgtggttattgtttgtaagtctaaaagcttaacacactgtaacagagaagctgtttttatttatttataaaatttataatttatttatttataaaataaattcccccaattttatagaaaaatatcatacaggactcttaggttgctcaagaccctgtttcctaatagtttttgaaagctgttgacttttagaaatgaacatgttgatctgggcgtaaaggaggaggatatgcagaaaacagaagagatgccaattcacaatgcagcaggcaattaattagcaagagtcgtgctccttgaaacatatgattgaggagatctgaaaatcttagaataacagaagatatatttcctccaagtaactttactggtgtgattttccaccagagttcaatcaatgaattagagtaaggttgtggttctcaacaggaggtagtttggcaccccctcccagaaaatatttggcactgtctggagacatttttggttgtcacaactgtggcgggagggtgttctggcagttagtaagtagaggtcaaggatgctgctaaacatcttacaatgcacaggacagcattcacaacaattacccagccaaaaatgtcaatagtgctaaggttgagaaaccccggattaaggtgtccaagccaaagggctgtatccttgtgtgcacagggcttgtgtggaaggctgtatcctgctggaggagtggaggagccttttgcctcttgctttacacacacacacacacacacacacacacacacacacactttatgtcgaaaggccacaagtactgttacaggaccccaacacttacccaaaggtagccgttgggtcagggtttctgcactaaagtcccttctgtggttgccaggaatatgttttagggcaggggtcccaatccagaccccaagagagggttcttggatctcacgcaagaaagaattcagggcgagtccgcagtgtaaagtaaaagccagtttattaagaaagcaaagtggtgaaaggacacctactccatagacaaagtaggatgttgccgaaagtaagaggaggaacgattccatgctaggtacatcgctcgtatatatagggagatgtgctctgctacaagagtttgtgataaataaataaattactatattttgcaagaatcaatattatctttaaagcaaaattaggaatgcctttgttctccagatatcgggatatctggacactcccaagtctgggtttgtttagtaaacactattaatttgttcccttagctgtaaacatctagaggctaagaaagcctaacttcccgagaatgcagcccagccagtctcagtctcattttcctagccctcattcaaaatggagtttctctggtttgaatgcctctgacagtaccatccagaattctcccagtctcctggcacactagtaagtcacaggaggttgagttagagtgtttttcactgagccagccatacaataagaccactattgaaggaactgcttaaggaacaaataataggaactgttcagagcataacaggattcattaattcatttatttacctactcagcaaaactttattgaacacccacatgaacccttctgctaaacattgtgatacatgatgaatacaatcagacctggtccctgccctcttgcagcttacagcctgggagggaactctaaaggttaccaagaagggccagtttgtacaatgaggactccatgaatgtacatcattgagcttcacaagctttcacgtttgtaatctcatttgaactgcacaaccacctcacgagacaacctgtattcccttcttaggttaaaaatgtgccccagttcaaaacagtttgtaagtggcagagctgacacttcagccaagtgacaatgagggccctgttacatcattctatagagcagggatacatataggtgctcttgccttgattggtactgaacttgcctctcctgctcctcaccaatcatacaggtacaaagctctctttatgaaaaaaatgctcccacctactccatccttttgcttacagctggggattctagttttttcacgtatatatgccttgtatttctaattagattgtaaactcccaacctgcagggaccagatcttccatttcctttgcaaccttttgcagtactgcagtcacccaataaatgccctctgcatgaatgaacctgtagagataaaaatactttatggcattcccatttataggtttcatgtttttattctgctttgtgataggactgtacattataagcttctagagggcagagaaaatggcttagtgctttcctttacactcagcaggaaccatgcaaaatttgatccttgcatgcctttttgatgctctgggtaatattagcacactggggtgtttttgtgtatctaaggaccgaggttatcagactctctgcagcggagaatgttcctgcatttccactgtaagctcccatggcgcctaggacagggctagatcactgcagaagcccctccatgcttatttctgttactaaggaagccaaaggcgaacatggcaagctctgtcataaccctagaccttgcaaggaaatgagcaaagtggaaggggatctgaaggcaggtcagagatggcctggatgagaatgctaaggcttctctctgagaatccagcccaagtctgacatgcagggctcgagtaggtggccgcccgcagtcgccgggcccgggatgcccgcccgtccgcccgcctgccccgcgcgccctcgggagctgtccagacggccccgcccgcgcctacctgggcactcacccgtgccgcgcggcctcttctcctcccaccccggccacaggagcccagctcgggcctgccccgccgcctccgaggagccccgctggcggcgcgctcatagcttccacccgggccaagcgaccggccagacagcgccaggcgcgccgggggcggcgcggtcaggctcggcggggctcggcgggctcgccctcggccgggcgcctgcagggggcgcggggacggccccgccccgccgcctcctctctcccctcccggctccctggatccgcgccgggaggaaatgatgtgttgctgcctggttaatcacagctccagacactcattggccgagcgctccgcagccacttcctcctcctcctcctcccgctcctcccgctccggctcctgctctttgcagccgccgccgccgccgcagcctccccctcggcgcagggggaacttttctactctctgtgacggtctcccccgccgcccccgggggcaagcccagctggtccgcccgccccgcccgcggtcgtgctcccagcccgagcctctgcgcctcgggaagtttattctgcccgccctcctccccttcctcctcctcttcaccccgcctccccgccctcccccggctctttcccccgggtggctgccgctgccgccgctgccgctgccagcctgctcctcggccagccgcgccggccccagggccgggaagctcccggccccacgcaccgctccgctgcagccaccgcagccgccgccgctctgggccggccctcggcccccggctcccggccccgcagagttccgggctccctcgccggctgcaccgccccgccccgccccgcgccgccccgcgccgcgccgacctgcagcgcccggctgcctcgcactccgcctcccccggctcagcccccggccgcggcgggacccgaggtgagcgcaggtcgccggccgcgcctgctggagccgggaggactgagggaggaggtagcctagcgggagaagaggcagggatcgggggtggcagggtgggcgtctgcggtgcctccccctcgctttcattcctttctcccccaagcttgatcccctctccgtgggggaagcagccgcggaacaaaactgtcttgctttgggcctgaactgctggtgggatatggggggtgggggggcagaggcgtggagcgggggtctcaggtttgtattggggtgtgtgtgagtgcgtgtgtgtgtgtgtgtgtgttgtgaactccttcagggtgtgcgactctgacttgtaaatcgatctggccgcggggccacggggcttaccttcctagctgagcttgtagagagtaaggagatagataggcgaatttcccccaccctcaaaatatccatctcttccaagaggaattttctgctggagagacagccaataaactctgctcaactccctccctccctcggttcttcctagctgcagtttcaaaaagcttcaaagccaggaatgtgggattcatcttccgatccccagaaggcaaatgtggttacagatgttgcacggtactttgccaagtttaaaacccttccttcaacactgtaaccaaaacagtgaggctagaacctcgggcgcactaagaagagatgtgggcctctggggccgctggattcagtaacttccgtcgggttctagactggctcggctctgtccagtttgtgccagatagtctcccaccccctccccacccctcctttcccctggagatttgaacgctgcttgcatgggagaaaagctacttagagaagaaaacgttccacttagtaacagaagaaaagtcttggttaaaaagttgtcatgaatttggcttttggagagaggcagcaaggtaatacaatggacttgtcaattttattgggcttttctttcttttttgagggatgtatgataagagttagatgatgggcaaaggggcccgttccatacatgtttttacatatttttgagaagaggcccatgaattgagacataacccagtggttttaaagaatcctgtcccagagatgcagattgctctgacagcccaagggaaggcggtggcaaaaaatagacaccacctcccttttccccaaaaaaattcttcctggaaaggtggtgttaagaaatttcagagatgggctgatccaagtggcgggccttaaatggaaacactatagtatgtcctggcacttgtctctggaggtgggttgctggccaggggcccaggcttgggcagccagcagacactagacttgtgctgacctcagacatcggcctcgccatgcagcttcatagtgtgcagactgcttaagtttgaaatatgggcctcatccatttcactgatggggacataggggtcaggaggttatcttatgcctggatgggacctcgatcacttattttatgattcacttgtttttattttctgtcttggaattttaaaaaatggaattcttttgaagctgaaatctaggccttaagttgatgtaactgggtgttggataatagcatttctgctattaccccttatgcaggtactcacaggtggtgaatgatggatagataaattctggataggtgacaaagactaaggattgggat

SEQ ID NO: 8571 - DNA, 6000 bp, Homo sapiens
aacttgctagtgattttacagagtcgtaggcagaagggacttgctttgtctcagatgaaactttggactgtggacttttgagtcaatgctgaaatgagttaagacttgggggactgttagcatggcatgattggttttgaagtgtgaggacatgagatttgggagggaccagggatggaatgatatggtttggctgtgtccccacccaaatctcatcttgaattatagctcccatgattcccatgtattgtgggagggacctagtgggaggtaattgaatcatgggggtaggtctttcctgtgctgtacttgtgatagtgaataagtctcacaagatctgatgattttataaaggggagttcccctacacaagctctcttgcctgccaccatgtaagacatgactttactcctcattcgccttcaggcgtgattgtgaggcatccccagcatgtggaagtgtgagtcaattaagtttctttcctttataaattacccagtctcaggtatgtctttattaacagcatgagaacagatgaatacacactgcaagcttctccttggcttgtagctgccatcttttcctatgtttcttcacatggttttcactctgtctctttctgtatccaaatctctcctttttataaagttatcagtcatattggattggggcccaccctagtgacctcattttaaattgattaactaggtcgtggagacacgtgaaggttggtgcggagttcgtctctgcaagcatggttgtcctgggatggattcctcctgctcttcctctgcggcgggtttgggtgcagtggacccgcagttgcagcattttcattgaggtagagactcaaaagcagcgcttccagcagctggtgcaccagatgactgaactttgttgggagaagtgcatggacaagcctgggccaaagttggacagtcgggctgaggcctgttttgtgaactgcattgagcgcttcattgatacaagccagttcatcttgaattgactgcaacagacccagaaatccaagccagttttctcagaaagcctttctgactgatctcagcattacctctttggaaaaggaaggtagttcaataaatgaagagctgttgatgggatgattgaagaaacagctatgagaggactggctcccatcttttgttacttttgggacatcctgtcatctgagaatgaacaaagaccaattttttgtgtgtgaagcttaagggtcatatgtttgcttgtattttttaatgctaatcttgtgaaaataattgacaggtgaatggaaaactctatttagatgcatattactgtacacgggactatgcttttctcaaagccccattaactgcttcctattattttgatagtgggaccacatacataaaaatctctcatttgtgtggagtcatttcgatttcaagggagatccttgtgtttttcagaaagggcagaagtgggggaagaataatttagtatccttatctagtgtttgattatcaatgctggagaaaaatatctgtaagagtgtttatacagtacacttcagttttcttgatgatctccctttcctatatgatgatttgcttaaatatccatattaagtatagtctcaaggtaaggtaggcagcctgagagtctagaggtctttagttttaaaggaatctagccagtgaacataattcttattactagactgccacaaggaagaaattaacttaccctgtatatcagggtacaaaaaattcaatgatgtgcctaaataagttataaagatttaggccaatcataagctaacagcagtttcaggtagaggtgcatgcctaatgttaattagtgtagattccatttactgcattcttttgatcactgaaataaaagctatataagattcaaaaaaattgattaactctgtaaagaccctatattcaaataatgtcacactctgaagtcctaaaggttgggattctaatatatcttttggagggacacaattcaatccataacatcaagtaactgcacaacctagctaccctaataaactgagtgttgcctaatctaccacatgataaaattgggcatttgcaggagcatgctattattaagcgaaaattgtatctatatgataaaggagataagcccaccaggtccacaaggcacaagaaactcagactagcagaaaacttagactctatgatgcctgctcccattgactcaatgtctctccctcagtgcacacctatagcttcacaaggagtttcctacaactaggcaacagatgagggaaaggagtcaatgttatgcaaagtaagctggcactagcaataagtagatggctgctgcatcagagtccctcccagggatgtcctgaaacacagcagaaagggaaatcttactgacaaacagaactttgagcagaacatctgcttttctattttgcaagaaaaaagagatggcccaatgtaagatctacactgactcatcagtggtggctaatgtgttggccagctgctaccttaaggatttggaaaaaacaagattgaaagactggtgacacagaggtcaaggtgggggaggcatgtgagagagtctcttgaaatgggcacagggtgtgaagatatttgcgtctcatggagtgccctccagagaacaaattgacctgtcccgtagatgtcagccagcctcctgccagcttccttggggcttgctgaatgtacaatgagtgccatggtgctggcatggagatgaagcacaggcttaactctccagacttccttcaccgaggctgatgtggcttaccaatgctgagtgagcaaaatgctgagagtgaagggcagcactgagccccctgtggcaccattccccgtagtccgtgttaaatggcctctcttcacagcatcagttcacagggtccagtaacaccattgactcatcttcctcagcagttggaagagggaggaggagagttagtttcagcctctggagttgggggtgagtgaggatactgatgtatcacaagcaactagtgggcaagggggaaaagatgactgagttcaaaagcaatgcctggattggaaataaaagatggaaaattgcattaattcataatcatgtggtaatgccccatcggactctgcattcttaatcttttacctctactgacagagaggctttgcttttcagctgctgtgaacaagctgaagaggccttatcctcttatctgcaagagtggaagtaatcacagggggccctaaaggcaaatgtttacctgtgtattttatcgtgaaagtgccaagggtccagacctcacctctcttgtcccactttatctccagtacctagaagggaggctggcacattgtaaccactcaaacatctgtggatgactggaataaatgggaggatgtaggaatgaatgaacgaatgaataatcctttagggaacaatagagagctgggggagggagaagccatacctgatcttttattcttctccaaaacccttgaaaagactatgagaggccgcatagagtagccattaagaccttgaactcttaatttaggatctacaacttcctagctgaatggcttggccaagttatttattctctgtgtacagtcttccttcctgtaaaacaaacacagtaaatgcttagagcagcacctgggaaaaagtcaagttccacataagtgttactgtcattatttttgtcatcttgatgagtgtgtaagcctgcaagacaatcgggaaattccctagggagggtgaatccagatactcagcttccaagggccattcaagagggaacaatcaccttttctctttgcctttcatactgctttagacccctcactgcttcctaacataactttcactggcaagagacggagtcctgggtttcagttccagttgcctgcggtgggctgtgtgagtttgccaaagtcccctgccctctctgggtctcggttccctcgcctgtccacgtgaggttggaggagctgaacgccgacgtcatttttagctaagagggagcagggtccccgagtcgccggcccagggtctgcgcatccgaggccgcgcgccctttcccctcccccacggctcctccgggccccgcactctgcgccccggctgccgcccagcgccctacaccgccctcagggggccctcgcgggctccccccggccgggatgccagtgccccgcgccacgcgcgcctgctcccgcgccgcctgccctgcagcctgcccgcggcgcctttatacccagcgggctcggcgctcactaatgtttaactcggggccgaaacttgccagcggcgagtgactccaccgcccggagcagcggtgcaggacgcgcgtctccgccgcccgcggtgacttctgcctgcgctccttctctgaacgctcacttccgaggagacgccgacgatgaaggtgagtgccgcgccacgtacgtccccggggcgagctgtggggacctcttcgccaaactccccaaatggcccaaaagctggcgaaaccggaccagggactccccttaggcggaagccccaaggccaccctctgacaggtgaagggacgtcccagagctctcgcttagctttcggaccctggcttctgctaggaccctggcgtcgagctttgaatgtcccggagagccactcacagaacgcacgcccgaacccgggcaggggtagagaaaccaacgctaatgtgctctgaaggcacaagttcaagggcacccgccttagagaactccaactggcgcactccagacgccacccccacccccagcccgcggtctccctcttctaacgcactcccacctgcaaatcctgctgcctctggagcagccccgaccctcctacggaaactggggccacacgcttccctctaattggacttgatctgctcggcttgcagacaccgtggaaggttcttctgggactgctgggtgctgctgcgcttgtcaccatcatcaccgtgcccgtggttctgctgaacaaaggcagtaagtttgaaacatttgaaaaagataggacagttggagctcaggtcaggctccgtcttaccacgctaagggaaacgagggattttgcgtggggttggaccagtgccccgaagtgtagctgagaaggcttcccagttgttgttgctgcttgtagagcagcagctggattcacttcgcggggtcttcagtgtttaggctgaaactcttgcggctttcacgtcttgttatgtataataaatgcatgcttcctgaaattagggagagtcgggatttttaaaatttcaattttaaatttaatttgtaaatttttaaatttacatgtaatttttgagaaaagtttttgggtgtgatcgaaaaaggaaaaaaggcagtgtttaaagagcccaaagacagcagtaaggatatctgaaatggaaaggaaaaatgagaaagcaagccccaaaatacagttttgagaaatgatgttccacagggaacccagactgttttccctcaagggtggtgagaattcagttggagggtggggaggcagggaagtaattgaccaatttagcagtattgcagagctaaataataaagctggtatacacgataatatttaagaagggtctggaatcagtgatgttttggtggattcttttatttaaggactttcatgtctttttagcttgcctaaatgtataaaacactcacataatggaatactcactgtaggatgcaagcaagtgagaactactagtttcagtctcccctggccttactttccttttaaacacttgctttcatttcagcattacacactataaattagtcagccagttaaagcattctctctggaagatttagtcaactgaggaatgtatagtcagtgcttgcatactcaaggagtcttatctagattttaggatgacagttcagaattagattgtagagctatgaaaaccatgcttgctgtgcaattcaaggccagggcaaatgt

SEQ ID NO: 8572 - DNA, 6000 bp, Homo sapiens
gagatgcaactcgctgtggagtacagggggacaagagtggataattatggctgtgggagctaagggaggattccaaaataagttagcatttgagattggtgaagatagctgaggaacggagcattccaggcagagtgaaaaccacattgcccaggacctgagttaaagagcatggtgcacacagggagactgagctggccagggatgcctgaaacttcaaaagtctaaagtatcttgaggaaagtatagaaaatgagtctgaataagcaagtatacagataatagtctttaggccacctaaaggagagggatttgtgcatgcctgtgacacctttctcttcattcttctgtgcctctatgattgttacaccttttttattttttttcttttttgagacagaattgctctctgttgcccaggctggagtgcagtggtacgatctcggctcactgcaacctctgcctcccaggttcaagcgattctcccgcctcagcctcctgagtagctgggattacaggcacatcccaccacgcctggctaatattccttttttcgtttttgagacaagattttgtcatgttgcccaggctggtctcaaacccctaggctcaagcaattcacttacctcagcctcccaaaatgctgggattacaggcatgagctaccgcatccggcctccatttattatttaagtattggtgtttttctgggtctggatctcgccttgaccctcattagtcttcctttccttcggcaaacccttgtggtgtcaaagatgatgatgacttccagatccctggcaccagcacacacctctcttctgtgctccatgtttcaaatgcctgctgatcatctctcccacatgtctcacatggacctcaaacttaacttacgcctaaggtaaacttgttaaagcctattttaaaacaagtcttaatcttcattaaggcttctccacacacttattcacccaaattcgaaatctgagagctgttttcaacctccccctgttcctgttcctgacttcaacattccattgattagtaagttctgtcaattctacctttaaacatcaaagtctgttctcatcatccctactgacactgccttagtttgagtttctccatttgtaatttaagccagaaattctcaaactttagcttgcacaaacatcacctggagagcttgttaagacaccagagattctgagtctgtgcttctggggtggggcctgagagtgcatttccaacaagaccccaggtaatgctgatgtttgggtccatggaccacaggtttcgcacttcaatttattctaattgcttcttacctgtcctcctgctttggcttcacaagctccaatgtggttaatgaagttatcgttccaaaacaatttttactgtgtggcttttctgcttatgtattttataggactctgcattgcctgcaacacaaagcccagatacctttcctggcatgcaaggcctttggcagtctgactccagcttagttttccaatctcatctcttgccacttctccctgtaccttaagtaatttaaattatggccaggagtggtgcctcatgcctgtaatcccagtactttgtgagaccgaggcaggcagatcacgaggtcaggagttcgagaccagcctgaccaacatgacgaaaccccgtctctactaaaaatacaaaacttagccaggcatggtggcatgtgcctgtaatcccagctactcaggaagctgaggcaggagaattgcttgaacccgggaggtagaggttgcagtaagctgagattgcaccattgtactccagcctgggcaacagagcgagactccatctcaaaaaaaaaaaaaatatatatatatatatatatatagatagatagatagatagatagatagatagatctgtgcttccttgttcccatgttttgtacatgctatttctcgcatctgcaatgtccattctcttcttccattccccaccttttcctcactcccaaatggataactcacacttgctctttaagattcaacttacatattattttctttgtgctccagtagctctttgcatttctcttataggaattaccatgttgtgtcttgtctgtctgttagtttctctcataagaatgtaagttcatcaaaggaatggactgtgtctcattttagctttgtttctgagcccaaagctagaattgtgtttgtttagcacaatgcttggccacagcaagcatctatgatgttgtttaaactgactttaatcctataaatcaatgtctcccctcaaatgtgtcccactagtaccaggagatttttcaggaaaatgtcctatagtctaataatttggcaaatcacaaattctatgtaatagtgtatataggctctagaaagactagcaaaaaaaaaaaaaaaaaaacctgtcaagttttgtttaacacagtattaccaaaaagtatttgattccacaattccttattcctccaccatcccagaacacatattgacaatgttttctatggacatcaatttttaaagtgctcttgaagtcaatagggcaaggtattggtgtcttagaaagataatcttggctgcaaagtggaggataatctgagatttggggagaggatgggccaaggggctaggagagtagtaataccagggacagatatcaaaggcctgaattagtcagtgaagtagcagttggaagaggtcatatctgtgtgtgctcttatacaatataataagcagggacctgtgggaaattggagatggaaaagagaaagacattgaaaattaccatgaggtttacttagctcttattgcgttttgtattagggaagaatatatgtgtttccatgaagtattagacagtataggagtttgggaaatacatcgcacccaacaaaattttttggagtcaattggtcaataagctccaaatcccacattactctccattatcgagttcaagaaatggggaataaacccttttatcttcccctttcattttctggctcacataaaacaaagcccactagccctggttttagtcccttgataaatattcactatgtgcccaccacagtgcctaagaagtatcagtttatggcagtggttgttaaccgggcgattttgctccttgggacatttgacaacgtctggaggcatttttaattgtcacgctgggggagtgctactggcatctagtgggtagaggccagggatgctgttaaacatcctgtgatacataggacagccccctataacaaagaattatccatcccaaactgtcaatagtgtcagagttgcaaaaccctgatatgcaatgaaaactcaacacaattattctgacaattgaagagcagcgagggttttgcttaaattattagaataacagcctcatttctgggcttcgctttgttaatataggcctagccaggtggtgttgaataagcattagttcatgatttaatcttagttcctttctctcccagtgactaattataagtaatttgaattgctatgtgtgatcaacgatgtaaaagtaggacaaatgcacctctaatgagactatattagactctgaacttacagtttccccgaaagaggttgccctaagtatagggatacagaggaaggggcatgggttgctgagacaagtgtcctgagtttgagtcccagctctgctgcttactgactccatagccactataagtttactctgagcctcagtttcctcattgtgaaatgcagcaataatttcctcaccaagacaccgtgaggattgcacaaagtaatagcaaagtcatatactcaacaaatatttattctattcctattgtgtgtcaggccatattttcagtgctgggctacattcattgacaggacagacaaaaatatctacccttatggagttgggaatggttggagagaaagacaataaacaagataaataagtaaaatatagagagtgttaaatgacgttaagcgctatggaaaaagacaaaacaagaaagaggaatggtgcaagttggtacaattttaaatcagaatggcaaagaaggctcatttgagatgacatttgactttgaagaggagaggaagtgaggcatgccagtgtctgtggaaagagcattccaggcagaaggtcacagcatttgcaaacgtcctgaggccagatcatgcttggagagttcaaagaacgtcaagagagccagtgagcaaggggaagagaaaggaaggggagaagtgaggtgggagaatggagacagattgtgtgagaccataaaggccattgcaataaccctgaccacataaatgttagctagttattattattgcctataggtaaaatgttccagtgtgcattatgcctcaaataagagtgtttcgtaaaccctccttcaaaatcctgtgcccttctaagaatgtttttaaagatatccctcatttaaacaaaatggcaaggcgtctaagtgcaaaggacaaaattccagaattctcatggccaatctgctctgtgggttcttttcttgcaacagccacccactctgcctgggagccccactcatggagggggggcaggaaaaagtcaactcgggttttcttttttccccctcttcatttctacaataggaatagcttttccaagctgcccgagaatttaaagtacaccttcttttgttgtgctgctgatacagtcgcttttgctcttacaaattcccagagaaaatttatattcattctgaaaacaggaaagctttatttaaatacaacactatcacccaatgactgaatagatacagattaataattcctaagatttttagcagaaatattcaaaaaccttttcatgatatacaaaggcttttattttaatgtcaagtctcactttatttccttctctggggcataggaaaggagaagcaggacccagtatttttacttgcagtaaacacactttgccaataaaaccataaatgataataatttttttctaaaggtctctggcttactctgctctcatttgaacttgaaattcagaaggaaggaaagccttcccatttcagcaggagttgctgcaaacctgctaatcaaaataagtcatttttttaaattataagtgaaagtttaaaccagacagagaattttcacttgcaataaggattttcaaacccaaatgtatcttctgtttttaaaatatactttttccctattaaaacatggttcagttctcctccaagtataataaaaagaggccatggtacaatctgagccccctcttttattctgtgttttgtagctaaaggtcttcaataaaataccccagagctaaaaacaaagaactgtaaattagtttgagaattcttcatttaactgttagattcagcaagattatttagctgattctcccattccatgcatttcatgaattaaaaatagacctctgccactgacctattaccagcaccatgtctgtctacctctctctctctctctttctcacactgtcactcattctccctgtctaaagaatgactttctctggtaaagatgatatgatctatcctgatctgagggaagtgattcccagaaatctgtggtcataaggtcctaaaaacatggtatggctttagctggagagtcacactgtccccttatgatttttagggacgttcttgcatcagggcaagaataaacacagagagtcacttcctaatctagtgcacacatttttttttggtccatgtcccagacaactgcttagtccacgttcccaggagaagcacctctctcacagcatgtttgtacagaccaaacttgcttctcacgaggcagtgcaaccttatttggatgccctgttcatttcttcatatttaagaaaaggttcaaatttccatgtgacatgggcagagatctctttctcttaacaggatcccatttctgaatcacctcttgattccttggagaagaaaatctatgagagctaaac

SEQ ID NO: 8573 - DNA, 6000 bp, Homo sapiens
aattgattataactgcaataggtatttacatttattgacgcaactgatgtgtttgttttcttgatactaacatattctaggttaaatatactttcttgaagtacttcattatgttatcttttctttgcccttttaaaaactggtttttgttgttgttttattctggtttcggggtttttttggtatttgggaaaatttatatttttttccaacagttatctttataagaaaatgttatatactctccttaactctttcctcttttcctcagtcagtgtattttggttccctattttgagcaaaaataaaattattacggcaaaaacctcaattattttgcaccaacctaatagcttataatccttttcttctgcttcccaccatgcagttttcgtcaacaatattctatttcttaaggctcatctttgtgctcctgagtatctttagtctcctgccattcagtgtgtcagtttaaaataacatcacttgactctcatctgttaccagtaaggtactcagtgagcttatctattttcttctcctctccctcccattttgttgggatatggtatttctagcttgtcaagtagataatgtgtatatacttcttacttttcttttggcctcaaatttctagtgaaatgtatgcatgactgtctttttgtcagagattccccaaacacagcttcttaggtgaagtatatcccctttgggaaacgtgtgtgggtaaaatattttcagagttctctcgtgtttaacatgtttttatatcactttgacatttgaaggacagcctaggtagatatgacatagtatttggtccatattctatgccttgtgactctggtcaatattgtttcattcttttcttacatcaactgttgccgacaagtagtctgacgtcaacctgcttgactatccattgtaagtgactctggtatctggggtcttgtgcactttttaagccccttctattgtctctccaggaactggtgctcatgttacagacctgctcttgagatttcttactcagtgagaggccctcttctgctgaaggtgaactctgtttaataagtgtcccaacactccagggagacttctgtactcctcttttcttcatttagtttcaccttgactctctgttgcagtgtgcttttctgagccaattatgcttgtattagcaaattccccatctacatgtaaataaaagtctgtaagttgtctttctctagttactgcataagcatggtttacgggtacttttatttgactcctcctttattaaatctccaaggtttatataggggtccatgaggatttggtaatttagatatctgtcattatctatgggaagctggaagccttatcacaaaactttaatatttgagaaaggaaattgttatactgtgtataaattcagatagaaaaatatgcgtataatgaaaaacatggtcccaaaagcctattttgtaaacctaagtataataccaaatcaaacatacctcagctgataatttttcttaatagcaatttttccttaggtatgtctaaatgacagtacaatattcttttaaagcaatattgacacaaatacattaatgtaatatgattctaatatgttaaatgtttttccctgaacaatattatacttggagaaaactctatcagaattactaattcatcaatcttccaggtgacatatttagaaaaaaaaattgagctaccataaaaaacttcttaccccaaagtcttgatcccaaagttgatgactgttttgattttcttatactttccactaacaaatgcaatcattaatgaatgattcctgagagtacacttctaatgtcaacctctatttgtcatgaataccaataaggtaatttgtttggatggtggatacctagtttagtttcttcactgtcttctcaaattctcatattttcccacggaatagttgtctttcatggtccatcaaattggatggaagtgaaaaagggagggtatatcagcagcatggcagagaaggggacttttaaaaaagataatgtgtccgtttaaaactgaaatgtaaatggagaattgaaaccttggtttcctaaatggaagatagtctttacagtagcctccaggatataatacacaatttatgcaactttatattgtgattaaaataaagtcctatgtacaagttacaacaaatgcagtagagattctgcttcttattttatgaacataagttgtttccctatgctttagctgtcactcatacagggaagcgttggacagagtaaaaatatgcagataaaattatttccagagcattacaaaggcccattatttaccacctgtatatcggttttgattacacccttctgtcattatatgacctagatttcctcttacttggtgtcagtttttgaggaatggattgttaaatcaagcagaaaagttaaagaaagacaaattatgcttgataccttctgatactactcaatttcgacttcatattttttctcatctttggcaaacccctgctgattttttttctttgaagtataatgttcctaccagtgtaaaataatgatactggctatttcaaacattgttgttccagtgatagccacttaaaaaaaataaagaataaaaaattctgatgcacctcttttagcagacacatcttaaccttcaaaattgtgatattattgcttcaaaacctacattgtaactaccagcttttgtatcacttgaaatgatctgaaataaaaatatggttacaaagaagtatacaatggtattcacaaaggcgaattttaaactgacatttccctttaaccaatgcttactctctcactaaagtgtttgtaattgtgtgtgtgtgtgtgtgtgtgcgcgcacgctcgcgcacactagcgtgtctcagagtggtaggatttcagtgacagtaataagaaaaaggttgttgtgtgtttgggaagatgttactttctgaaaatttaaatacctctattgaaatagagacaaaataaaggaaaagatgtgacatgactacacaagaagcatagcttcaaacaaagggaggtattaaattacaaagattaagtaaaagaaaaggagggaaatacacagtagaaaatatggattataaaaaggcattatgatacattgggctccatacattctgaaaacttagagacttcttttatatagaattaagtggtggatcatttctcagtacaaatacctagtttcagagccaggaactctacacaagaaaagtgagcagctttctctcagaagacctaatttttcataaacttattctctgtagaagacctggaactagccacaattagatgacttatgtcccctgaaatgaagcaaatacagaagaaagtgttattttgataaatcttactatcaaattttgataagtactgaataaatgagccaattaattgctacataatagatataaacacaaaataaaagatgaaattgaacactttctcactgaagtcttctgtaaaaagtttgcagtctaaaaaatggaaataatacggagtgaaagagaaaattgtgcattccctaccaagcataaggggccacatttaaaggagccaatagtaatggaaaagtgtgttctcttcttttcagctgtaatacttgatgatgtagaatatatgtgaaaaatggaggagaaacaaattatgcattcttgtttacgtgattaatgcccgagtttactgtcatcgagtataagaggttttcacttttactgttttaaataaattatttttgtttcattttaaattattgaaaactatatttgaatttcatatgtcttctatagcatgaatctagtatcatactctgattcacacacagatacatgcacacttttgaattctctaaacatttcttgaagggattgggggaacctaaattaaacaaaaattggtacttaaattggattcccttcttttacattccatgtcaccgcattcccttgagtctttccacctctgtaacagctatttcagtaccatttgttgttcctcttactctactcttaaaagctgtttgtttctcccctgggagctgcttttaatattcattccttcctagtcatctctatatacgctgcttaggcaaactcattgtttacttacagcgtaaagaccctctcaaaaatcagtatctccagctcatatctttctttaggcttacttacaacctcatatatcccactagacatctcctttagaagattttagtatttctgggcgatttagcatttcaagctaagaactgcctttccatcttcagctaccatccatttcatcccaccaaaaactcttccttttcatacattatgaatagtcattatccaaagctcccaagccagaacctcggcatgatactaaacttctccttctctctaatcctctattctcccaaccaaaggctagccaagtctatgaaacacatctcttaactatctctctcatatagcccactataattgtcctattcagaccctcaacacatctttcttggactgatataatagtctcacaattagtattcctgctttaagcttcttttcttcaggattacatgttatattgccgtacatcacatcataatagtccactgtctatatcttttacaatggtcctctattgcctaaaatataagactccaaagccctatgcatggataatacaatccgcctatcatgatatagcttctgatacttcttcagcctaatttcccatcacatcccatattttagtgcgggttccttgaagctaccattcactttattccacctaatttgtatcatgtggtgtcccctctactaaaatgcttttcttcttctagcatacctattccaaaggactcttcatctgtggagcattcttaactcacccacatgggtcctgtgagatcataatacctcatacctttctctactaccacgttggtcacatctgtttgcttagtaaacaagtaacatgaatgaagaaggccaggagtaaaaatatagagagaagtgaagactggaaaactggagaacatctttatcttatttgaagtggcccataacccttcagctctacttcatggcagggacattttattttcttccatatagacctaatattttgcaaatagtaagtatctaatacatgttcgtagaagacataaaaagttatttttttcctttaataattaagctacttttttcctactgaatgggcattactcagattgcctgccaatggttcttcaagtgtgagaccatcagcatcaccttgcaatgtgtttgaagtgcaagttcttgggccctacaccagaacaactgattcggaaacacagaaattcaccaagctgtgttttaacaaacacttcaggtcattctgatgcccaagaaggtatgaaaaccatggtctaggttaatgaatgtttagctagaactataaaaataaattttaagtgaaaataaatgtaagaaataacctaaaatttctgaagtatcttatagtaatttttaaagtgtactttttcatttaatcttattaaggattaaaggatatccattatctttgaaaagattaaaattacactttccaaatcaaagaggattttacttttacgcttactaaaattttgaatttttctaaaagcttcaactgaagctaagcctaaccacacaaaatatagttgataatttagacaattatctagctaatttaaaccattaaaattttattcatatgctttggactcaatactctagataattgacacataaaatacacatttgcctcaatagctacattacttcctcaaatttgtatctcagtttttagacctcaagctaaggaacaaagaaattttccatagagctggtttataagagggcttttacagtgtttttactattctccactggagctgaaagtcattctttattttgaagatgaagagctgcaa

SEQ ID NO: 8574 - DNA, 6000 bp, Homo sapiens
taatagaattggaatgtatttgttaaaagatgtcatacggcaaaactccatttccattctctggatgtcaacaggaatgtagtctaagtaataggaagctaaacttaggaatgttagcattttccaaatcacccatgaattgcatcccaaaagtttaattataagttggtttggcggctgggcgtggtggctcatgcttataatcccagcactttgggaggccgaggcaggtgcgtcaccagaggtcaggagttcgagaccagcctggccaacatggcgaaacccccgtctctactaaaaatacaaaaattagccgggcatggcggcggatgcttgtaattcccactactcaagaggctgaggcaggagaatcacttgaatttgggtggcagaggttgcagtgggccaagatcacaccactgcattccagcctgggcaacagagcaagactccgtctcgatttaaaaaaaaaaagaaaagttggtttggcaaaactgagcagacattttcctgcagaagctatacaagatagcaaggatctcagggcagttggcaaaagtttaaagtacttaactcatgatgtataacagcccctcccctgcctggctattacatttttgaaaaaccactaaggtaacaaaattctcagtggaggagtctagggccttacagtcacaagtgaacaaaagtacttctaagttttttttatatttgttaaaaataagtaaatggccaggtgcggtggttcatgcctgtaatcccagcactgtgggaggctgaggcaggcggatcacttgaagtcagaagttcaagagagaccagcctggccaacatggcaaaaccccgtgtctacttaaaaatacaaaaattagccaggcgtggtggtgggcacctgtggtcccagctactcgggaggctgaggcaggagaatcacttcaacccgggaggcagaggttgcagtgagccaagatcgcaccactgcacttcaccctgtgctacagggcgagactctgtctcaaaaaaaaaagaaagaaaatatgccctcttacttgctgtattagtctgttctcacactgctatgaagaaattcctgagactgggtaatttataaagaaaaggggtttaattgactcacagttctgcatggctcgggaggcctcaggaaatgtataatcatggcagaaggcacctcttcacagggtggcaggagagagaatgagtgcaagcaggagaaaatgccagacgcttataaaactatcagatctcctgagactcactcattatcacaagaacagaatgggggaaactatccccatgatccaattacctctacctggtcctgcccttgacacatggggattattacaattcaagctgagatttccttgttcctcttcatattcactgggatcttgcttcgtggcccgagctagacctgggattccagtgaagcgagggctgggagtgagactgagataggagagagttcctggggccccagggtagggattctgtactctgaggaagggatttcctgccagcactaatacttgggagtattttagtcccttaaaggcccttgttaccttctctcttggttccaagaggctgatctgtcttttcctctttccaatgtcactactcatagtttctacccaaccctccttagaccatgatggaagagaacaaatcttaacagcctctcaattctgtatacttttaatgagcttaactttgagccaggtactgtgcttataaagacagaaagatacataagacaaagcttctgttcaacaagaattaataatctagtaaggagcagaaatggtgagaggagctaggtaactactgtatacagggtatactgtgaccaaagccacaatgagttgaggcgtcacaagagaaacctcatgccttttttaaaaggttaaaaaaaagtcttcctctatttcaagaagaaatgatgctcataaatgctgataataaatcctggtacatgaagacttgtaatggattgctttacataaatctagatgggtgaaagggaggaagagggtggagagaggagtcttcgtgaatttacccttcattttcaattcttgggggtggggagcaggaaaacctctctgcaatttaaaactagctatgggtagtccaaaaaggggccctttctccatcattaaaatagcttcctgatgacacatttttcttctctcctctaatcagaggatccacttcttggttgttgcaacactttgggatacagtgggatggattataggaaccaataacttggcctgacttccatataatatattttctcaagactgtctaaaccaccatttgtcaaaataataagtgatcaaaaagaaagaaaagattaatgctatttctgttatctgcaaagagatgttatatatacagttggtgcaaagtaatcacagtttttgtcattgattctaaaactgcaattacttttgtaccaacctaatacatatatacacacatataaaaatacgtttatacatgcataggtgtatatatatatacatacatacacctatgtatgttttcaggttgttttttttttggctcctcctctacattgactatctcctcagatccttctcaccattacctgaagcatacaaaaatgaagtctaaaagccatgatttcttgtgaaaagaggaaacagaaaagtaattagtaaagaaagtttggactggaacccagatctttttttttttttttttcagctcactacaacctccgcctcctgggttcaggcgatccctcccacctccacctcccaagtagctgggattaccagcatgtgccaccacacctggctaatttttgtatttttagtagagacaggtttcaccatgttggccaggctggtcttgaactcctggcctcaagtgatctgcccgccttggcctcccaaagtgctgggtaatattacaggcattagccaccttgccaggcctggcacccagatcttgagagatgtaaattggctgtcttttcacaaggctacactctcatgctgatgtccattccttcatgcaaccagtccaaaatgctcgctacatcaccttccccatacacatctctcccctcaaatcttcctgtggcccctttctcatctccactaacactgaaatactgaagtctattcgattaccaaccttcttcctctctaaaaatatcttcctcttcacttcttattttttattatttttatttattttttttttctgagacggagtctcgctctgtcgcccaggctagagtgtagtggtatgatctcagctcactgcaacctccacctcctgggttaaagcaattttcctacctcagtctcccgagtagctgggattacaggcatgcgccaccacacccagctaattgtgtatattagtagagacggggtttcaccatgttggccaggctggtcttgaacttctgacctcaagtgagccacctgcctcggcctcccaaagtgctgggtttacaggtgtgagccaccgtgcccaggctctcttcactttttgtacacactcatcctgcactgtctctgctgaactttacacactgacttctatggagtgaccacgtcatgcagtaccgagaaatgagtcttaaaaaaaaaaattagagtcatgttcaaatgagcaatctgcctcttaccatttatgcgaccttagtaatgttacttaacctctctagccttacttttcccttctgcaaagagaaaataattcctaactcactgggtttttgtttttgtttttgagacagggtctggctctattgccaagtctggagttcagtggtacgatcacggctcactgcagcctcttgacctcccaggctcaagcgatcctaccacctcaacccccagaatagctgagactacaggcatgtgtcaccacgcccgactaatttttaaaattttttgtagagacggggtctcattcattgagttttaaaaggaagcaagcatatgtaaggcgcttaacacagtatcgtgtacttaaaaggcacttaataaacagtagctgttactatgaaaataatatttacctcacaaaactgttcctacatgcctgacgcttaagtagctcctcaaaatatgatagttttcctcttcccccgtccttggaaaaactttctagttctttccaacaaagattcagcacctagttcaaatccaacaaagatttccccaattctgctgcaaaggcatttgtatatttactaaaatctcaacactcacgcaggataaaacctacttagaactacccagtcatcctttcttatcttcttaactttaagtcactggaagaaaaccatcacattttgcaagtccccaaaaagcatgcctgcataaaagctctagggaagggaaccgggtgtccagatgcatttcagaattaccataggtttccttgctcggcatacagaataaatgttggttacactaatgatacaaccgaagttggggaaaaaaacttcagacaatggcccgcaaatctcaaggagtaattgcgaaaagatgccacgtggtgacgtgttctaggcgggtgatcagtgaacaaatttgtatgtgtgatcctgtggtgtgtgaatgtgtcatcgtgtgtgcctgcgtgtgttcgtaaacactgaaagtacagtcgtgtgcgccgagaagtctgagcgcgggtgcgcatccctttggacccgggtgcgtacctagtgagcaaccgtgcgaaccctcacggggctctcctccacgcgcttacctctgcggacgagcaggtggacgccactgggcgccgccatgttggcgtcggtcacgtggccgcgagcactcgctcgccgccccgcccgctggagccggccagtcgcagccctgccgaagccctgaggcgtcgaggccgcccgaggggagcgcgcgtgcgcgcgcggggctgactgcgggagccctggctgggaagcggctagggcacccgggcaagcagcagaacccgcggccggctgagtcctctccagccgcgagaggcgggctccagccgcggctcgcgcgctcgctctgagcccccgcgcccaggtgggatggaagaagcctgtcaggtaagcgtggcatccaatatttatagcatcaacattttggtgcatggaaacgtgaagttgggcggaaaaaataaagcacaatctagtgttcaacatagcactttgtatcgtctgccactctgttgcaaattattcccctggattcagttgaaaggtaaaatttggttcaaagtcaccagctccccttttgctgtcccagaatctacattactcagcagagactccagacaacacaggatctgtgtgtcgctgcaaaatctattctaggtaccccagtgggtatgttcaggagacttctctttctccaaggacgccttctgcttggcagtattaactggagtcttaatcctaaatttggagtttaagtataaaaggatgacgcctgccaattgcattgccaagagaagaagcctacagaaggccaattgtgaatcagatgagggagctgatgtatgcctactgatgacggtgcccatttttaccaaattcactgtctctcttacctgtgttctggggtagatgccatcctgtcatggaccaggtgttattcatcttagtagcctccgtgcccggcacagaacccgatacccgaggaatgtcaggtgaagcaattgaacactgcatgaaaccagtcaaactgagaatgtaaccgtttccagactttaaatgcagtgaagattgattaggattctcagtgaatgtgtgtgatgtcttctaattaatttttaagcactacacactcagtgaataatctagacaattcagaacaattcagaaataaggaacaagtgcaagccccttcctcgccctctgtacataccatagtcccactccccagttaaccaccgtgtgctcaattgagatctttgccttttaca

SEQ ID NO: 8575 - DNA, 6000 bp, Homo sapiens
aagaagactgaaattgagccctatctcttgccttacataaaaatcaaatcaaaatggattaaagacttaaatctaagatgtcaaactatgaaactactacaagaaaatactgggaaaactctccagggcattagtccaggcaaaaatttcttgagtaataccccacaagcacaggcaaccaaagcaaaagtggacaaacagaatcacatcaagttaaaaagcttctgcacagcaaaggaaacaatcaaaatggagagacaacccacagaatgggagaaaatatttgcaaactacccatctgacaagagattaataaccagaatatataaggaagtcagacaactttataggaaaaaatatataataatctgattttaaaatgggccaaagatttgaatagacatttctcaaaagaagatatacaaatgacaaacaggtatataaaaaagtgctaaacatcactggtcatcagagacatgcaaatcaaaactgcaatgagatatcatctcaccccagttaaaatggcttttatccaaaaaaagagcaataaaaaatgctggcaaggatgtgaagaaaagggaacccttgtacactgctggtgggaatgtaaattagtacaaccattatggagaactgtttaaaggttcctcaaaaaactaaaaatagagccaccatacgatccagcaaactgctggatatatacccacaagaaaggaactcagcatgtcaaagatatatatacactcccatgtttactgcagcactgttcacacaacagccaaaatttggaagtggcctctaagtgaccatcaatagatgaatagatgaagaaaatgtggtacttacacacaatgaagtactattcagccataacaaaaaatgagattctgatatttgcaacaacatggatggaactggaggacattatgtcaaatgaaataagccaggaacaaaaggataaacatcacttgttctcacttacctgtggaataaaaaaatcaaaacaattgaactcatggagatagagaatggaaggatggttaccagaggacaggaagggtagtgtcgggtgggggtaggagagaaggggggatggttaatgggtacaaaaaataaaaactaaaaagaatgaataagacctagtatttaatagtacaacatggtgactacagtcaataataatttaattgtacatttttaaataggtaaacgggccgggcgtggtggctcatgcctgtaatcccagcactttgggaggctgaagcaggctgatcccctgaggtcaggagatcaagaccatcttggttaacacagtgaaaccccatctgtactaaaaatataaaaaattagccaggcgtggtggcacgcgcctgtagtcccacctactcaggaggctgaggcaggagaatcgcttgcacctgggaggcagagggtgcagtgagccgaaattgtgccactgcactccagcctggtgacagagcgagactccatctcaaaaataaataaataaataaaataaaaataaaataaaatcagtaaatgggtataataggattctttgtaaaacaaaagataaatgcttgaggggatgggtagccaataccccatgatgtgattattacacattgcatgcctgttccaaaatatctcatgtaccccgtaaatatatacacctactgtgtacccacataaattaaaaataaaaaataataaaattattgccaattatttcatacatactatttattattgagcaaacatttattgagtgactactatgtttaacactctgttaggtgctgtgaaggacacagcatgccttagacataatccctgcccttgagaatcttactatctgtgctagttattaacttatgacttctcagctagaaatccacccttttttcccttgctttgttattctggagctggaccctgtaagcatttctgctttggcaatggtaaaattataggttctgccaatagagggtgatggggagacactaggaggccaaagcaggaggaaagaacttgacattcttcttctggtagacttttttgtgtggagccagtggattggtttgcaggcggggcctggtagtattcacctctacagtcctcacagttcagttacagcctatgcctccagcaagtttcttcagcataggtggactgcacattcctgtggcagccacacactcccctctaaatttctcagcttctttcttgttgtacattctttttcagccaaggttagtagctgtgcctacaggactactactagaccccttagagtccactctactccttttaggcatctttcactggttaatgttttttttatgttaaattttccctattcaaattacaggtatgttttttgtctcctgattggtccctagcagacataccatcaaataaggaagaaaagacagatgtaagttaatgtaaatttggggggagaatggtcacttcagctgtaaacacagcccaaaggccaaagatcttcagagacgtaagtctataaaattatctgctagttagggttgtgtttagctgaatataacagaaactgacctcagtgacttaaccaaacagagatttatttttttcatgtgacatgaactccataaataggcaattaagggctgatactccaaaaaaaaaagtgaaaaattcaggttcctactttccagattctctatccttaacgtgtgacttttgttcttgtagttgcaatattgctgcctcccatctagacattagatctgtattccaggaaggaaaaaaaaaaggtaatggaaaagaaagaatgatccatttgaatcaatcccttttctgcacattcttaggggcttcatggagtaacttcaactcacatgtcattgaccattcctaatcataagagaatctgagaagctcagcatttttttaactggggacagatctctgtaagtaagaaaaaaaggagagaatggatattggataggcaagtagctgtgtctgccacaaattgaaaaattaggaaattacttacatttgagatgggcaagaattagcagagggatttgatttcatttccacatacttgttcattttcttttcatgtaagtagtcttttatattaattatacactatgacatacaattgttttatcctcaataactagcatatcttaccagaaaagaaggacagaataacatttattttattatgacattgttttcatgtaactcttttataaagtttagcctagacctaaagaggacatggagacatacatttactttttgtttcttactaaattatttgtggcccatttagtaaatattctagtccagtatactagatgtcattaaagtggttaaataatttgtagaacagtcaaaaatgaaatttaagcacaaaattttctacactagaaattgattagcagtgtaggcagttgatagatctgggagtgttaggatctatttaagagatacctagaaattttttctatccaaatcatgccatctttcaagtcctagctcaagtttctcttcagtaagctactttctgaccaggacaatctcttttctaatgcgatttcccttagtgcatcacacaactttgtcctgaaatgtgtactaatttgtatttttctctaattttttatataagtcagtccaatttctcatatgccccaattatattgcaaactcttaccttttccctgtgtcctcacaatgttcaaagaaagggcatagtatttatttgagctaacctcaattgaatgtcctgtaaaactagtgcaggttcagaggtttttttttcaaagagaaattgataacaaattaaagccaataataagacacaaaagcttttataagaaaaactaaatataataacagaccccagaatattttaaacttatatttctgattttcatttcaacaatttttttttctcacaccagcatgagaaggctggtgaaacttttgcaggctattaacatttaaaaaaaaaatttttaagacagggtttcatttacatcacccagtctggagtacagtggtataatcttgtctcactgcaacctccacctcccaggctcaagggatcctcctgccccagcctgccaagtagctgggactacaggtgtacaccatcatgcccagctaatttttgtattttttgtagagatggggttttgctatgttgccaggctggtctcaaactcctaaactcaagtgatccacccaccttgacctcccaaagtgcgggtattacaggcctgagtgagcatgcctggcctaaaatgttcaaaagtagataatttaaatatctttccatgtggtcagttagaattaccttactaaagttaatgatgacaatcctactccacctcaatacttcaaggaaagggagttagtaaccaagacctgggcttctttctatctggtttgctatgagctacacttggaattttaaactgaaattccccattttaagatgctgctaccagatggatgtggtggctcgttcctgtaatcccagctctttgggaggctgagatggatcgtttaagcctaggagttggagaccagcctgggcaacacagggagactgtggctctataaaaaatttaaaaattagcaggtgtggtggtgcatgcctgtagtcccagctactcagaaggctgagatgggaggattgcttaagcccaggaggtcaaagctgcagtgagctatagtcgcaacactgcactccagtctggatgacagagcaagaccttgtctcaaaaaaaagagatgctgctacctccacgtagatctcaaagaagtagtgaatatttagcagacaatgtttcctgttttagttatgtattactaaatagatattagcacttcataataaacaaccctaaaacttaatagcttcaaatgacaaagtttcttttttttcttttagcaccagagtccatgaggcattttatttgtaaatatgtattacatctctaaaaaaagaatcccaggattttacctcctgtgtgttttcttcttgcttcttcatggtccatgataccagctgaggttgttagtacaataaaaccaaaccggccggatagaagcagattattctgccatttttccagatgtttgagttgcacatcaaatctggggctgattactcaacgcttgtttagcctacctgtgaggttcacaacaatttttcccagctctgtaatcatcagtgattcaaatttgccaatgtaaccatacttcaccattacagtgagaaaccagatgatgattttggagcacagcctaataagaacctggggtttgcctcttctttcggcattgttgatgctcttgagagcatcaggcaggacattcatgtgcaccattgtggcggcacgaaaagatggcggaaagagccaaacgacaaccctttcattgctcttgacaccgtgggtcaggaatttgggtaaagctcatttggatggctcatttttgttcctcgtggtgttgggaaggcttgacgagagctagagatccaagaaggcctcactcatgtgttggacacctcagttctctttggacttttttctatccaagtggtttctggagagggctatatttgggagtgatctgtcatacttctctttgctatcggatttctatcttcatcatgccatcatcactcaggctatcatcatcacccggtcttatcagatattgccaaattatgatgtcataacttactatgactgtccccactgtccatgaaaaaacacagaaaagattagatacttctcagggaggtccctgttcatctttatggcctcactttagtcctctcagaaggtactctttttcttcaatcttcctcagtgcaaatatccaccctcaatcaacatcaacatgggttggtgttactccaattcactcctctttttcttttctttttttttttgtttttgtttttttgagatggagtctcgctctgtcacc

SEQ ID NO: 8576 - DNA, 6000 bp, Homo sapiens; identical to SEQ ID NO: 916

SEQ ID NO: 8577 - DNA, 6000 bp, Homo sapiens; identical to SEQ ID NO: 3153

SEQ ID NO: 8578 - DNA, 6000 bp, Homo sapiens
ttataaaattatttctttaaatcacagctcattgtttatatgttatttgccattgtagaaaagggtgaaaaaatagcaaatttaattactctcagtttgaaaaattatccagaaatgaagatgacgactctgaaacattgtcaatatcatttgacctataaataatgttctaatacatttactacacactgatagatactttttcatatgaatattatacattaaaactaaggcaataatgatttagaacattctatctatatctatgtatcttaagtaggctagaaattaagatatgagttattaagtatgagatgttaaggtgtggggttagaaattatactgtacttcattatcaataatcaacatatacttcaatatcacatacatttaactttaatttgtacatctttaactatttttaattatgtgtataaatataagtacacacatctttatgtatttatttattcatacctccattcacttatttatataggggatccccccaaatccactaccattaaaccatacatttttattttaatctttagaacaagcccaggaggcaggtattgttattactcacattttacaaatgaggaaattgtctacagtcacaaagttactgtgtcagacatattagaagcttaatacatatttggtgaacatatgcataaaaacagagagacagacatgtacaacagctcatctttacactgagtaaaagcttttaacctgtctcagaaacctctctgtgaaaactgagcaaaaatcgaggtatcctttcatttgtcatataggtataggtggtaccttacttctccaacaaggatgaatattgaaatgtggatcccaaggcccaactccagattttctgaatccctgatagtgggacttggaatttgtctattgtttcaaagtttctcaaggaattcatatgatcaaccaggttcagaaatcactggatcttattgccgaagtttgagaattaaagtttgggccttactgcggctccacagaaagggcaaatgaagtatcatggacagaactgatacgttcccagttagtttcccctctcagaagctaacaggcagcaatacagcagaaattagtgacttatgtcttgtgctctgaagtcaggcagaatttcacagagtcccagcagtgtcactgacgagatttgtttcttggggcaagttgcctgatgctttcaaagccatattccttttatataaaatgagataatattctttgtctcataggggtgttttaaagattaaataaaaataacatgttctatcctacatggcacaatgcctgacacctaagaagcaaaggatacatcttacctttattgaagcaatcagaaagtatgaaatcatgaaggagataagagttctgattggcagtgtatcttattttcccaggttcatttatttatcttaaactattcttgttggagaataactcccaagccccctacttaagctgtgagtaatctcacactttataatgatgttctttccatgagaaaaaaaaatgttcttaagttttctggagaaaatatatctgcactatttctactgaaaaatctaacaactggactctgctcctctgcatcaattctagagtgtatatgccacaaataaagtgttctagctcaagaagattgaaagtaaatatggtatagtattttaaaataagaattttgcaaatacatggtatgattgtgtcatattactagcaatcatatgatacgcaatgcaaagtacagttcatagacttaaatttaattctaataagtaaactgattttgccttgctggggaaaagttaaagcactaatccaattgctaatgcagtcttgtctacttctttggtacctagtgacaagtctaaataatgtatatatttttatttacatattcagtaatacaattctctgctcaatgagtgatgttcttctgccacttggtggtgcttgccagtttcagaatttgtttcttggtggcactataacactaagtacagagtaagtgcaacaaaattgcagcattcccattgaaaaggctttgcttcaaactgtttaataatttaaaggacctctgtggaagcaaccgcatttgttaaccagttacaaccagtaattaactcctttggagttttaacttacttttggcaaaacgtcttaggaagagcatatattattagaaagtatgccaaaaatttacttagcagaaaattcaaaaacagttttcctctgctaagaggttctctaaaattctacttacatagccaaactctgaaatcctagcaggtcctgtttcattatcataattactgcataaacacttttaaggactttgcctttagtttcaagcatgacttattttcataagcctgattagttaccacaccagccttgctatggaaaatgacatgttctcattctctgctgtagagttgttaaatcttgatctatatttatgttgccttctctgctgaaagcctgtagcgaaagaaatttctaattccttgttttgcaatattagttggcagctctatctaatgggtattctgtttccttaaagaatttagctgctctgtctagaagccgattttctgatgcctccaacgtctggtctaattgatctgttttaatggagtcttcgtcggtgaggagcgagatgccaccgactagaatgctgggatctgctgcttaattgccaggagtgagagacactgagattcagaaatctttggaggtgggaggggagagggacagtctcggacggaggcggagatgtaagataaagggatggatttcacacaggaaaaaaaaaaagatttcgttgaggcactgaggtgctgcacgatcacatctctcaaaggagaagttaaaaagcaaggaagtgggaggaggttggaggttaaagtacttaaaaggattactcgggtacaatttgtttttctgctggtgtctgcaaaggatagatagtcccgttttcaaagtatatgaatgcctcttttaagtgattgggaatggacactaattgcctgttaaatgttatcaaatgctctcctaaattcaggggacacagaaagaggggcacaaaaggagaatttaaatagaaaaagggaggatccggaggcttttgaaagcggggggagaagaaggaggagggataacagagaggaatagagaaggagagcggagagaagataaacaaaaacaaaaacaggaatcactgaataatcacacaccaaaaagaaagctcttccctatggggcatccaaaacactgagactgcaatagtgaccccggtcatggaagaaagatgttcctctccacccttgtccccgaaagctcttggtcccgttactggcgactaaaattccattaggctaaagagtgtgtctaactgcctgaagaatgcagcagacggaaggcgggtcccgctatgccgtttgcccttcccgctggagagaatgaaagaaacgcgcagagccagagactcctgccgagttagaccttctctcgtcgccccaggtcaccggccatccggcaaagacccgagtaaggaacgcagggtcactgcctgggccaacaaatggagcccgctctccccttcccggacgccgctgcccggccgatgctcccggcaacccacccgcggcgtatgcagaggagcctttctctttctctcagaccacttgtcccgaccaatctgaccttccaaacacatctgaccgcacctcccaggtggacacactaataggctacgggctggagaggagcgggtgatgaggagagggattcaaacctgcgaacgcttgggctgggtcggagctgcggggggcctgggaggagagaggggagaagagagaaggaaggagagcgcctgccgggatggctgagctgcctcggcgagcagccttggggttgcacgctcttgtgggagatgctgctgttgcttccaggtcggcaagagcggttctaacaccatcgcctctcaccctctttcctgtaaatccctagagaaacgtccctggcctctccgccgcgacattcccagcctgcatccccctacagcctaggcggcgcgctcccgcacgctggagcgccggtcgccagcaggacgccctctcccgcgccgactcgcccctctctgccctgctgctgctgctcctctgacacctccgcccccaccatctccagctcggagagacgccacccagccgcggcccgcactcgcggcccggggtcacgcgcggaagaggggcgctagtccggaccccgccttcggtagggggcgtcctggagcggagagtgaggcgaatggtatatgagtgtgcgggtagcccaccctgaagcccgagcttctcatttgagccatccccgcctagccccactcgggccagcgcctggcgagcgagcccatctgtggcttccgcggccgcctcctccttgcatccttgcacctcctcgtcgacccctccctcccgggacctgcatcctgctccaccaatcagagcccgactgcctcttcccacgtgaccccgggcgggctgaggacctgctgcttcccaaacgccagagggatgcgggcggcagagctcgagaggcggctgccgggctgcggggcgccttgactctccctccaccctgcctcctcgggctccactcgtctgcccctggactcccgtctcctcctgtcctccggcttcccagagctccctccttatggcagcagcttcccgcgtctccggcgcagcttctcagcggacgaccctctcgctccggggctgagcccagtccctggatgttgctgaaactctcgagatcatgcgcgggtttggctgctgcttccccgccgggtgccactgccaccgccgccgcctctgctgccgccgtccgcgggatgctcagtagcccgctgcccggcccccgcgatcctgtgttcctcggaagccgtttgctgctgcagagttgcacgaactagtcatggtgctgtgggagtccccgcggcagtgcagcagctggacactttgcgagggcttttgctggctgctgctgctgcccgtcatgctactcatcgtagcccgcccggtgaagctcgctgctttccctacctccttaagtgactgccaaacgcccaccggctggaattgctctggtaagtccagaacccccgtccccgaccctttaactccgcagaagaacacgcgtatccagcacagaccagcctaccctagcgcgcctcctcagcccctcacctcctactgccctagacccctaataccacccacctctatccagagaaacaaggggaactgttgcaggcccgggggtgaggggtggttctgggatgggcagaaagtgcaggtgtagcaggaaacctttgcatgcttgcgcttacattggagctgcgaggattttgagaaatattaaacgggatggttttctgggttcactgttttgaaagagcaccaatcctaggggaaacactgaaacagaagctttgtcatcattaaagaaaaaagtcttactaggatgaggaagaaataactttatgagaaagaatgagcgagaaagcaataaatcaaatggtgactgcaggggaatcgctgattcctggcaaaggtgccatgaggtcgcactggtctcccgttgaagaccaggtcacacagattctagaggagctgggtttcaatagaatttctctctctctctctctctctctctctctctctctctctctctctctatctatctatctctctctctctctcattcccttctctcctaggcggcaaaagacattggttttgcagtccagatatgcccctctctttgcttccctaagcttcaaggtagtacaggggagttgagaaaaagaacactttgcgggtctcccaggccggagtgggcatgactgaggctggtcaggctccatgtaggcgagccgagggcggaaccgacttcagtgggcgctga

SEQ ID NO: 8579 - DNA, 6000 bp, Homo sapiens; identical to SEQ ID NO: 2108

SEQ ID NO: 8580 - DNA, 6000 bp, Homo sapiens
agctgaggctacagtgaactgtgattgcaccacagcactccagcctgggtgacagagcaagaccatgtctcaaaacaaaacaaacaaaaaataaatgtgcatttaaattttctgtgtaggatattcaaggggttcgaacccatgaactgaagccctatgtcatatttataaagccatcgaatatgaggtgtatgaaacaatctcggaaaaatgccaaggttattactgactactatgtggacatgaagttcaaggtaagagcaagtcaaaaactactgtattgctttcagtggcttctgcgtgggagagatctgggttgggctgggccaaggatctctgatctcattgtcctcctcctcctttttgaccccctctccaaaaggccctcaataaaatggtttactatggttttatttaaaaaaaaaattaaaactgtattgtttctacaggatctgtgttagagaatgtaatttttgtttctaatggataatgcccttacgatttatccttttggatggacatcacttacagatataaagtttaataaatgttatgatgctacccttattttttactttcttatttttttgggtctagcttaaaaaaaaatccttgagccgtagtttgcaaagccaaacagaaattgggcatgtatgagcctggtgtttgtattttaaacagaatatcttttacttaaaagcttactttaaaaatgctcagtgagtatatctcatctgtaaaatgatgatggtaataatagagggggcaagccaagtgaaattaatcagtgatctcatcctagaacaggtgattttttttccggttgcgtacatatattttacattaaatatgctttaaatattgtgtcataacatacattcagtaaggtgtacagagtgtacagtttaatgaatttttatgtgtgtatgcacccagataaccatcacccacatcaagatattacagccacttgtgtgtgtgtgtatatgtgtggtaaaaatacataaaactcaccatattaaccgttttaagtgtacagttcagtgttagtatttagtgttaagtatattcacattgtgtgaaacagagctctagaatttatttacctggcaaaattgaaactaaaaatatgaatgattcactaaatatttgtatgtcatgcttgtacaagggccatgctaatctctgcattgtttcagttttagtctgtgtgctaccaaagcaagcacaggtatctttaaattatcctttctcttattatttttattttcatattttttgcaatgactatggaggtctgattttccagtttgccttgtgaacagtggagtccatgaatgtatttgctgagtcttatgggcatttaaaattgttctcatttttatggcagtctaaacaaattaacaaaattgtttctggatcatatgtatggtcactttgtaaagccacaagattttggtgcctgcatttgtgtttcagattgtattggtgacaagttgtactattttcatgaactaataagaaaataacagcaatgaatttaatgcattagtgccaagtgaatgccaaattaccttcattaaatgaacatttcacaatagtagaaacataatataactggcttataccatcctcatgttgaaagtggccattttgtatctttaatgttatccctatcagattaatgttcacttgaaatttatgtttaaattttatttaaactggtacattttctttggttttatgttgtatatggttaaaaagtttcaagtgtttaggtaagagtaagataagttcacacgggaagttgaggggagtaatctgtctgcaaactatgactaaattttgcaaaacatgacgagacattaagactaaagattaaaacataagttttgtagtttagaagacatttattggacctcattttttaaaataaaaacttcagtcttttattatttaaaaaaacttccaaattaaaatttctttatctcagtaatacatttctaagaaataaaggatgacatactgtggatagtgatatacttttcccagctttgcttatgcttcacattaatttagaaggatatgtttatacctgttataataattatattttctctacaaaaattagctgggcatgatggcatgtgcctatagtcccagctacttgggaggcctaggtgggaggatcacttgagcctgggaggcagaggctgcagtgagctgagatgatcctactgcatgccagcctgggacagagtgggaccctgtctaaaaaaaaaaaaaattattttatctatacttagccacattatttcaataacagagggcaaaaaaattactattttctagtttgctggttttgtagaattttgaaaaaatatttttgaaactttattgaaaatcatctgtgcaaaattttcggaccttactgtttttatacatagtttcacaactgaatgtgacagcataacaaactgtattttttccatttgtccaattaagtctgtactatccatatttttctatttctcctaaaggatgaagacctacaagagatggaaaatttagcccaaagaatggaaactcagtttggccaattttttgatcatgtgattgtgaatgacagcttgcacgatgcatgtgcccagttgttgtctgccatacagaaggctcaggaggagcctcagtgggtaccagcaacatggatttcctcagatactgagtctcaatgagacttcttgtttaatgctggagttttaacactgtacccttgatacagcgatccatagttgcaatctaaaacaacagtatttgacccattttaatgtgtacaactttaaaagtgcagcaatttattaattaatcttatttgaaaaaaatttttattgtatggttatgtggttacctattttaacttaattttttttcctttacctcatatgcagctgtggtagaaatatgaataatgttaagtcactgagtatgagaacctttcgcagatttcacatgatctttttaagatttaaataaagagctttcctaaataaaataagcaatagttaactttagaaactgtactctatgaaacgtgttttatgaaaacatcttttacaaaaagtgcttacttgactaactcagcaagaaaggtttaatgtacacatttcacatctaaaatcaaaacctacaagaaactgcactgccttcactatttacaaatcggcctacaaggaaaaaattattctcatgagaggtgtgacaaacactaattttccttaacagccaatatctacatgcaggcctaaattagaaaaaggcaatggattaatcccagagacctatatatagaaaatcacaagagtgaaaccgtgtctcagagttaaagaaaccagggactaacagaaattcttgagcatgcaggacggcagataaaaaacaacttgctaaataaaacgcctaaacttcttccattgtgagattaaaaaacaaaacaaaacaaaacaaagcaaactggctgaaagtggttagtactaacacggatggctacctggagtctgtacaaaatgagcttgctggcgtcacagcttgaatctttccccatgtttcacactgactccctccaaaatttgcacatgcgacccatgaagggacatgaagaggtaactgcgaacgccagaggattttccagatggcttctttccttccaccaatcacctactaatcccagaatccaccccctaaacgttttctaataaaaatactgtcttaaagccaacacagggagacagattagagctatactcctgtctccttgttagctgactcacaatgaaaacttttctcaaaaaatcagcgccataatattggcttctgtgcgtatagggcaacaagccccgtttgtttggtaacaagattaggatgccattacaaagtgctgtttctctttctttccccagatttgagatttccaggcgctttccctgtccctgtatctgttcatcttctgcatcattctcttctccatatccacaccattcttccatctttcccatttctttcttaactgtaaaacagaatgcatgattcaaaatatttgtagttctctgttacttaaagtgaaagttatctttaaaaaaaaacaaacccaaccaaaccaaacgatgcaaatcaggtagtttgtagtgatatttatgtgaggttggatttgattttaaggttgagaaaaagtttttccaaatttgatttacacagttgtgggatgaagggtaagcaatcggagaaaatgtgagaattgcctatattaatacacatccacacacccaggcctgcacagactcgttggtcctggagagtaaacgcattcctcccaaacccagcagcgcctggcaggacagaggcgggcggggacctggctcagggggcggctgcctcgccaggcgccacgaagccccggcgtcccacaggtcccggaggccgctgcgtcgcggggagctgggctcgggccgccggcggttgcgccggggcagccccgcggggagagcaccatgaggactgactcgggggctcggctggaggagggccacctggtgagcggcgaggggcgcgtcggcctcgagaggtggcgggtaaacagctacacttggcagtgggggtgggtgtgtgtgggggggcgccaacgagctgggaatcactaagggagggccttgctcgtggggtgcgcgcatccgcccctccagtgttcacaggaatgggacggagacgcaggcgaggccgggaccgaactcccggagtgggagagagaggcctggcatgaagtttgcggggacctgagcccgcgttgccacgacgacgcctcactcatctgaggcccggggcccggcgggtgccggggcttccagccaggcctctcctagactcctccgaggagaggtctgtagctgcccagaagagatctgttcgcctgcggagtcctttaattaaggtcttccgtcacgccccgcttcccgcaaacaaatcaccgccaccacttaggaaaccacgggaaagctgtgattgcagcgccacggtcgccagatttctgctcctgggcacattacccccaactccgaggccccctttttggcagggctagtctggactggccaatccaggtccctgcacgcctctcaccgcaacatccccgcagggcgctgcgcgcggggtactagccaggcggcgcggcccgatgacgcattgcgcctgcgcgcgcgaccgagccgggaggggtggggcgccaggtgcttgggggccggcggccgccgaggccggctaaacgcagaatggggaagaatcctgtggtaagcgagccttagctacttttaattgttaggatttttgtcttcagttgagccgtcctacttttgaggattagaggttgggtctctgggtgggtggaacgtcatttttgcgggacttttgaaatcagttacgtgaacagagccctgggatcgatcgcgcgcgcttcgtagcatctttagaacaatagcgcgttcctgtgactgtcattcttctccaattgtaattttgactactggatggtattacggcagcttgcctcgtcctaatcttgtagtacttgcattaatctactgttcgaacgaatggattgctaaatgggacaaactacaagagtgtctaaaatttaacccttttgaataaatgtcttatgcaagcagcatgagatacttggaacattaaattggcttctaggcatttctgttactatatgattctaaaatacttctcaactgtaatgctgtctgaactacaaacacttttcttattcatgtaaatgagggtttagaagggttccccccacctttctttctgccctaaaacgcattcttcccagtgtatgcaactggcctttttaaaaattgtgttagtatgtggtttaaaacctccatttgtttcccattgaattaaaacaaaatccaaacttcccttggtctgcaaggccct

SEQ ID NO: 8581 - DNA, 6000 bp, Homo sapiens; identical to SEQ ID NO: 3343

SEQ ID NO: 8582 - DNA, 6000 bp, Homo sapiens
tgaaaacaaaacagagaaacgggaaaagggaaagcaagtggagagactggggcaggagccagggaccagtgggaggaagcagagggaggctgctgggaggccaggccctggccttgtggggtcggcaccaattcttgtcctatggggtctccatctcctctccctcctctgtggcctctacgtggtacccaggagtttggggttctacctgagcaccctggacatgggataagtaggcctgggaacgcaggtcagagccagatgtcatggaagggccctcaggtgtccagttctctgggctctgaaatattcatctcattagtgagctttggtttccaagctggcgactttgggctggccagtggtggcaggggagccaggtgcctcctggggctgctttattggcgcaaagggggagccatacttccttctcacctgcctcctctctctgtctctccagtcatgaggatccagagaaccagtttatagcttaaatggaagaggcaggaccacagtgtcaggggccctgtctttctgtgctatgacctcaaggcctcacttgtaaaaatgagcccttcagagaggtaatgatgggttatcctgtaagtgttgggagagcctcatgtcatgagctggggtaatagccacctgggctcagcctcctcccctgggaatgggtgcctcagccagacgctgtctacctcagagcacctccaaccgcaggcctcaccctgggcctttcagaaaaagcagaagccacagagaagggaaacacacatacttgtgtgttttcagagggctgaactgggacgaccagagagtggaagctcatacaattctctgggaagaagttctgctaacaacatgtctgatcatgacatgggccttctggacctattctgttggggacacagtggaagggatgaccttgacagaatcttccaaccctaagattctgggattctaggccaaaacctgggtcttgttttgaagtagaaatgatatccagaagtcgacaggctacagtggcaggtacctccattggtgggaagggagatattaatgagctcccacttttgtctgtaatgatttgtgctttgccccgttgcacagaggtgaggttaggggtgcccgtttcctggttctgtggtagctggatatgtcccccggcccttggcagtaaatcccacggtgggatagcagctgtgtggaatgggggaaggggaggaccctcgccagagatcctggcactgggctgaccccctgagagtgagagggcatgtctagtacttcatgtgactgctctgaggggcagctgggtgtacgcacagaggttataagagacgaggagttaggatatgaatgattctcagggttgggtgtctgtaatacaaaggtggcctgggtcagcatcccacagggtgttaataggtttgcctcgataaaagtggctcaggcttaagggagtttgaaggaacactgggttaaacaaagctgaacagggttgcttactgcaggacttctcaggggcagaatatgccattgtgaatttccaagaagggggtgtggattgtttctcaagagtcatctgtttccagcactcattcattaacgtctcctggggcgtgttctttagaacagtctgggaaatgcctggctaggtgattctgtttctccactgtggctcccataaacaagtccctactcctttcccccacgtgggctgatttagggataaaaggaggccaggggaggtcatttgcctggattcctgcagctagttcatgaacccaggtcagtggacttcctgcctcctactctttctttcctagagtgttatatactgtttagctcgggcgtaactgatcacccaggaagagctggccgtagggtccagacagcattatggggacagtttgggagggtgtggacagccccatactgagaacatgccatgtacttctgcctctgaagatgtccttggaaacagttgcacatcagtagtgaccccctggtgtaggttcttggggagccatgccattctgccctgaagcctcctgttaggctgttcattcagaatcagaaactggcagagtggactttgatctttcagtttttttttttttttttttttctgtcgcccaggctggagtgcagtggcatggtctcggctcactgcaacctacatctcctgggttcaagtgattctcctgcctcagcctcccgagaagctgggattataggcatgtgccaccatgcccggctaatttttgtatttttagtagagacgaggtttcaccatgttggccaggctggtctcgaacacctgacctcaagtgatccgcctggctcggcctcccaaagtgctgggattacaggcatgagccaccgcgcctggccattctttcatttgaggggaattgtcttactgatgttaaaactgggtctagagatgtggctctcacagtggagtgagtcccaaagccaggacaagaacttcaggtccccacctcctagcccaggacccaggcttcagatcaactttccgcaggggaaagaaataatggtagcaacaacagcttgctcagctcctttctatctatcgttttgatctttactgccttggccccaccctggtgctgcctattcacgcaggtgcgtgctacagatgcctcaggggcttctactcctgcctgatataaaagcaaagaggctgaattttaaatcaggtgtgagatctatgcttaaactcatctctgctgtttgcctgctgtgggaccctagatctctttttttctgaatttcagttatctcatctatagagtgggatgagggtaagaatacctcacagcactgttgcaaggatcagatgtgccttagttactataggttgagtgtctcttatccaaaatgggaccattttgacaatttccttccctcccttttcttttacccaccccaactcccttccacccccaagaaaacactttactctcctactcgagcatatagtcacgatagccatgggggcagacatctacagtggcagaagcacatggattttggattttttcggatttggggctatgtatattatacttactggttgagcgtccctaatctgaaaatccgaaatcagaaatgctccagtgagcattcctttgagtgtcatcttggtgctcaaaatgttttagattgtggagcattttggattttggaaatgagggatattcaacctgtacttccttagttatatagtaagtactggaagtggttcaactactctaagtggttcccttccttccctagttattttatttatttattttttgagacagagtctccctctgttgcccaggctggagtgcagtggcgccattttgactcactgcaagctccgcctcccgggttcatgccattcttctgcctcagcctcccgagtagctgggactacaggcgtccgccaccacatccagctaattttttgtattttttagtagagatggggtttcaccatgttagccaggatggtctcgatctcctgacctcgtgatccgcccgccttggcctcccaaagtgctgggattacaggcgtgagccgccatgcctggccccttccctagttcttttttggggttagttatcagtctcctttgtctgtctctttcccctcctaatcttgaagttcaatgaaaagacaggagatgaaacaaagaaggaagtgaacagggactgtgctcagaagtattatagcatcagcctgctaatggcttcctcttcccttatctgtactcccaggccatcctgacttgggtggggtaacccgagattaccattctgatcacaggattctgctccagacaagggtggcggagctgcggtgcctgggtcctctcgtgatccccaggacagcctctccctcctgggagcttggagccacccctcggtctccatgggtccagagagaggccaccctggctagagagggggctgggaggggtggcctcgagttgggggccagaagtcgagggctggctgtctttttttttgagatggggtttcactcttgttgcccaggctggagtgcaatggcatgttcttggctcactgcaacctctgcctctcgggttcgagcgatccccctgcctcagcctcccgagtagctgggacttcaggtgtgggatatcacgcccagctaattttttgtattttttagtagacatggggtttgaccatgttggccacgatggtcttgatctcctgacctcgtgatccacctgcctcggcctcccaaagtgctgggattacaggcatgagccactgcacccggcccggtcttaactgtttctgagctgagaggtcactagagaactgagagaatggtagcttgttctggcccctccttgggagagggtgtgtgctggtgtctatcactcagagagtgggcggggctgggaagggaagttccaaacccatgacgaagaagagggctgttctggggtggagcaggaactttcttggctctggggtttccttgtctgtcaaatgaccaggtgagatccaaagtctaagccagctctgatattttagtgtttagatccctgtggcttcatcctcttagtcccaaagtccaggctgatggaaggatatttagttgattctgggcccccttggtgcagaatcaggcctggtgacttgcccagacactcctgggtgtatctttttactcatttgctctcgtggctatgaggtcagctgtgccctggggtaggaggataaagtgttttcttgtgggggcagataaaggaaaagggaggggaacaaatcgtcagatctgggctgtgctcctgcgcctgctgggtggggtttcctgagatgtgcattctgagctatttttttccactctgggcatccgtctctggcagggaggagggcaggctgcctggaccagtcagctgctcctttccatccctccctccagtacacatactctcctcttgctgtaaccccagtagctcaggcctcctctgcagattccggagccttaacccttcaaatacccccaggagagccccagccggggcctcagtaggcagacagcaggattaccacactgagagggctccaggggaggaggtgcttccgcctctgcatctgaaaaccttgacacccagcaagtcctgctgtctgagctcacccacttgtgccgctgctgtggtagaaagcaggggctctggttccttcctaatgggggactggggccctgagagaggagcaaacttagatctataatgggcaaggatagggcacagtctgaatgccttgataacaggcattgtgaggcaaggaagaatgttctaatcgagctgtctgcagacaaggggcttgctccatgttgctggagttccttcaagcagaaggtgggccagacacagtggctcatgcctgtaatcccagcactttgggaggcctcggtgggtggatcacttgaggccaggagtttgccagcctggccaacatggtgaaaccccgtttctaccaaaacaaaaagaaaaacaaaaacaagcagaaggtgaatgcctactgtattttgggaaaattcaggcttccagtggggaccttaaagtccctgcagactgtgagcccctctagtagctgctggcagaacccagatctgatttctagtcctcactctgtgtcagtctcgtgatctctctccccttctccctccttcccttaccctccattcttctctagcctccacccttagacatagctacgaaagtaaacactgaccctttccccctttgctgctacctaggcagatgccagccccaaacctcatccctagtggaggccttgctgatgtggaagtggccagggccctcatggaggctgggcagaagcccaagagcaggctctaaagctgccaaacccggcagccctggtccccggaggctcttgccagtctgacagtgttcttggcactgctcagaggtg

SEQ ID NO: 8583 - DNA, 6000 bp, Homo sapiens
tctcatcctgctaccaactgtgagatgaataccttggcccccgtccactttctcaaacccccagtctcagcccacaaaagaatgaaataggcattcggctcccaaatcgagtccaacagagttaaaaatcactgagcttgcctagccgaactttcttcgttacccatgcgaccagcaacaactggcccgcgtaaactcgcccacgcccttagaagacgcaccaaacgtcccgggagctgagcggctcgcaagtcctcaggtcgattgccggatttctgcaacacaacaatccccgtcactacggagcagcgaagaggacaaccggcggcgtccgcacctgagccccgccccacgtagagcacactattgggccgctgactgtccaagacccgcctcgagactttagtcccgtccctgaagccgagaattggccgttgtgtctccgccccccgtgcttattggccagcctggctgcgggtgacagtgagtggcagacacccggcctagcgccgcgggtcgcgccgagccgagccgagccgagcggagccggcggagcctctggaatcacccgggtcgctgttcctgaggtaagacgtgagaccggttattggaatcccaggccccgtgtctggccttgcccaggggtgcctgcggagccctaagtgagctcgcggcgggtaacggaggaaggggcgccgccggcggggcgggggcgcgcagccggaatgttttgattgctggcgcgcgcagacgggggcgcgcgcgggcgccggggccgcgcgcgaggttgtccgctgttgggagctgccagcccttggcctggggccgggcgaccctggggcgaggtggactccggtccacggtcgccgcggctgggtgtggggaggcaagccaacccacccgggctatcagctgtaaggctgactcgatccctgcaacatccgcaggaacccctgagcccaggcccagccggccggggctccacgggccctggtccacactgaccctgtgagtggtgacttccctgaggggcagggctctcactagcccagggaatcccaccggggccaggctgggccaagatccacggcccccaggggctgcacggacaggtgagtaccacctcgaccatgcctggcttacaggacctagggaacccacaaattcacctaggatcgggggtctacactgacccagtcaaggtttcccatccagaaggtttgctcaccggctggatctttggtgctagggaagtaagagaaggggttgaccagaaaggtcctcttcaggaaagactcttgaggttttgtggaccctgagaagtatgtcatttctgaggctaaggtagggcaatggagaaatagtccagaggcgcccctggcctcaggtctgtacccactcattctccatggggtccctaagttacttcttgagaccctggagttggaagagtggcccggtttagcacagccagaggaagtgctcgtagtcctgggctggaagggtgcttcttccccactgcagccttcctgccccatgcttggcctcctcttggtggggtgtggatggctgggagggttgggttcctttttatccccactgcccactctctggggcctgacatcttctcctccagcagctgcagagcatcgagggctggagaggagcacatactgtccatggagctggtagggccatgtgcttttctcaaacatttgtttgtgaagtgcttccaaactgttagtctcttgggagaccagggttcccaggatgggcgggggagggactcttctgtccgttaaatagaagatgaaacagcccccaacaaagggacagattctggctttgggccaggaaagcagcagtagacacccagactggccagagttaaggctcccccagccctgagcttactgcctttcttgtgtcactactcctctgcctctgagccaaggaggctggtagtggacaaagcccaagggtactttctccttttggcagtaggcagggcagcccatgggcagcagctggaactgaatcagggtctcttcttcctccttattggcaggtggtcaaggtggacagggggcggtggtgatggcgcagtttgacactgaataccagcgcctagaggcctcctatagtgattcacccccaggggaggaggacctgttggtgcacgtcgccgaggggagcaagtgtgagttcttggatatgacagccatagggagagttgatggaagaacatggagagagcaaggggcttgtgttctcccagggctctgacatctctgttcctatcccacagcaccttggcaccatattgaaaaccttgacctcttcttctctcgaatatcctttgtgtttctgagttggagctctgggacctttaatgtctctctaagccggggctctggtgggaggtgggggtaggtttgactctaatacctggaaacgggaatggagctcatcctgaggctgaaagaggctggtgaaatcatcgttaagtaatgatagcccacatttaccaagatctgtgtgcctgtgtccactttgtggtgttaatttgtagaagcctttctaagggtgagcctccttttttttttgtttgagatggagtctgtctctgttgctgctagagtccaggggcgatctcaacacactgcaacctccacctcctgggttcaagagattctcctgcctcagtctcccacgtagctgggattacaggcacctgccacgatgcccagctattttttgtatttttcatagagacagggtttcaccatgtggcaaggctggtctcgaactcctgacctcaagtgatccacctgccttgccctcccaaagtgttaggattacaggcgtgagccaccacacccagccgagcctcctttttgatgggatgtaaataatcgtaataagtaacgtcttttgactcattctgtgtcagctctgtgttaaatgctttacatgcattatcttagacctaatactcctatgagacaagtgttatttattcctaatgtaccaccatggacagacaaaagtttagacaggttaagtaacttggtaaagtcacacagctagaaagtcacagagccaggacttaagcttgagtgtgttgacaccaaagtctgtgctcttacctgctttctttactgactactttttcttaacaattacacgtttataatctgcaccagaagaatggcttcacatgtatgctcatcggggagatctttgagctcatgtaagtataagaagggacagatgatgtggtgaaagaatacatcttagtctttcctctccttgcactcacacttggcccaacctgccagtacaactcagtcctaggctaaaactccgtaaacctttgtagttcagggactgggtgtggcaccaaaacttacagcttcacctttctttttttttgagatggagtgagtctcactctgtcgcccaggcaggagtgcagtggtcttggctcggtgcaacctctgcctcccaggttcaagtgattctcctgcctcagcctccttagtagctgggactacaggcatgtgccaccatgcccggctaattttttttgtatttttagtagagatgggatttcaccaagttggccaggctggtctcgaactcctgacctcgggttatctgcccgcctcaacctcccgaagtgccgggattataggcatgagccaccacgcccggccaagctttcttacaagaaaagctttccaagccttatctcttccatgaaaagaacccaagccttggttgggcacggcagctcacacctgtaatcccagcactttaggaggctctaaaaatacaaaaattagctgggtgtggtggcacacgcctgtaatcccagctacttgggaggctgaggcacaagaatcgcttcaacctgggaggtggaggttgcagtgagccgagattgtgccgctgcactccagcctggctgacagagtgagactctctcaaaaaaaaaaagaatgcaggccttgaccttgatcatctcaacgctccaatggaacgtacattgttcagtcaggaggtctcagagatgccagccacagagaaaagcctctgttctgccttgcctgttccatggcctgctcctaggcagagagcctcctgggagagagaagccatatagcattgccgaaggggaaggggttaggaagccctccctcaatcagaaaactcccccaagggcttttaactacaacctcaaaaggaaatcagagactggagatcagagacccacaggatgaaaccttcgagagtccagtagtggtggctgaggttaccatgaggtgaggaaagtaggctgcagctgtggcagctgaggctaagagcaaagagtgggcctgagacagtcctgtggggctgaggagcagagagggcccactgggagttctccaggcccttccagttcccagtcttgttctgccacctccagactctcctcttcccactgggtttcactggagcctctctggctctcagactgcaccccttcttcccaactccccaggcagttcctctttgtggttgccttcactaccttcctggtcagctgcgtggactatgacatcctatttgccaacaagatggtgaaccacagtcttcaccctactgaacccgtcaaggtcactctgccagacgcctttttgcctgctcaagtctgtagtgccaggtaagggctgcaagtcaagaggacaccatagccttgagttctgctagcaggtgggtaatagagtggagtctgaggcagcaactcatactccagaactgactcaggcttggtctagcaaaaatacttcaggatagcagcgtctctgccaagactccttcctcgagggccacctctcctccccttctttttccccaccaggattcaggaaaatggctcccttatcaccatcctggtcattgctggtgtcttctggatccaccggcttatcaagttcatctataacatttgctgctactgggagatccactccttctacctgcacgctctgcgcatccctatggtaagactgggaagttgggcagttagcccatagtctaagacgtattgggaggtgtgggtgtattcctgggcatcagttatccttatctgtcattgacaaatcaggaactgtctcttaagctcacaacccctgaatctcacttctaatatagggcaaaggggtcgaggcaacaaccccaccttccgtaccttgtctcttccccaccccaccccgcagtctgcccttccgtattgcacgtggcaagaagtgcaggcccggatcgtgcagacgcagaaggagcaccagatctgcatccacaaacgtgagctgacagaactggacatctaccaccgcatcctccgtttccagaactacatggtggcactggttaacaaatccctcctgcctctgcgcttccgcctgcctggcctcggggaagctgtcttcttcacccgtggtctcaagtacaactttgagctgatcctcttctggggacctggctctctgtttctcaatgaatggagcctcaaggccgagtacaaacgtggggggcaacggctagagctggcccagcgcctcagcaaccgcatcctgtggattggcatcgctaacttcctgctgtgccccctcatcctcatatggcaaatcctctatgccttcttcagctatgctgaggtgctgaagcgggagccgggggccctgggagcacgctgctggtcactctatggccgctgctacctccgccacttcaacgagctggagcacgagctgcagtcccgcctcaaccgtggctacaagcccgcctccaagtacatgaattgcttcttgtcacctcttttgacactgctggccaagaatggagccttcttcgctggctccatcctggctgtgcttattgccctcaccatttatgacgaagatgtgttggctgtggaacatgtgctgaccaccgtcacactcctgggggtca

SEQ ID NO: 8584 - DNA, 6000 bp, Homo sapiens
ccgcagacatagagtcccagctgggcagagagagaggccagggtttctccgtaagcctagagaagctgattgcagcgatctgatctcctgtaacgggggacagcacggggagggggcagaagaggatgaagaggggagggtcctctcttgtccccctccccacagccaggcctggtgctgactcacatctgtgcggacagagacagtcagcgctgactcacggacagggggtgggggatgggagggtggcgcgtgggggaaggggcgcagcctcgccgcctggcgccctctttccccacccgggcttggaggcccgagaggcagagtacttcctgtgacgctgtgggttggcagaatacaacagagggctcaggtctagtggagagtcctcgctctgtgaccccttcctctctggtaaccgcctccaaggccagcccttggcggcgccagactcagagcttcagcaccgcggacagcgccagcggctcgggacagcgcgaggagagatgcctaagagacaccctccccagccccacccatgccctctttcccccgaccgggggaagtgtgctagaacctcttctgagttccaggccattataggatgcttttccatatttgggaaggaaattcctctttcagaatttggccaaaacctctcctgcagtaattctatgaatctctctccctgcacctggaaggtttcttccctatcactcagttaagcaaacagaggcttttaaggatacagactcacaaattcttaaaatccaaaacaagatcccatgcttccttttaagaaattcaggcctgattcctactctcctcccagcttaaggccttctttagaatgaaagaataaattgcatctgcttctcccgttcccagcctgtccacccatctgcccattctctgtgagtgggtgtctgagcctctgctcaccttttcctctacaggctgtctatttgaccgcaggctctgctctcacctggaagtctgtattcagggtgagtgaggcccaagcatagaactcacaagatcggggggagaggggcaataaaaaacaagaaggggagagaaggcccagaaaggaagagggctactgggcttgagaagaaggaagacttgcctggaggaggagaggtaggggagaaagtgaagagagtacagtccatttgcaacctggactttggaaggcctcttattcaagccccctgctgacaccacttttgtgcccttagatggcttgtttgggcagtgccaggtgggagtggggcaggcccggccccttttgcaagtcacctccccagttctccaacgcttacaaggtgtgctccgacaactcatgtcccaaggtaaggtctgggtgcactggaggagagagattggaacttggttagttatgggtggggaagaagatttctcttcaaggaatattcctatcacccccactgctggagcctcaccttcccatatcttgctagagtaagaggtggaaccctagagatgggctattcacatttggactctctggagaagcccagaggagccttctaagaagaagtcactggaaaaggccagcttccatcttcttaggaccagttcctctcactggcattgtctgagtgctacagagccaagaactctggaatcctcagccaggataatattccactcacccaattcctcattcaacaagtatttattgagtacttactatgtagcaggcatagttttaggtatttggaatgtatcgggaataaaacaaagatctctgcttactggagtttctgtttgggggataaggggaggaaacacgctataaaagttagaaaatacatagtgtcttagaagatgataaatagcatataatattatagcaggataaagtgatcaaaatggtgaggtagaaagctacagtattaaatgaggaaatcaggtggttaaggtggacattattgagactatgaaatctgaacagactttttaaggaggtgggggagtttgtcagaagattatctaggggaagagtatttcaggcagaccaaacagttaggacaaaagcacaattctgaagagcaccatggaggccaggggactgtagaagactgatggagaggaagagtagaaggtgaggtcaggtaggtaatgggggaagggatgtggatcactttagggcctcataggggaatgtatggacattagctttactctgagtaaagaaggaaactattacaagatttggagcttgggggcacatgatctgacttacacttgacaagcatcacttttgctgctgtagtgagactagaatagatggagtcaagagttggtgagggggaccactaaaaaccaccacaataggttgctctgtctatggagtgccattcttttgtttcttcacttctctaataaactgctttcactttactaaaacaaacaaacaaaaactaccacaataactcagataagagatgaatgtggatggggccaaggtgattgcagggaaggaatgaaggatgagagaattctgcatttatttttaaggtagtcagcattatttcgtgaaatattggatatggttataaagagaggagtcaaagtttttttgggtttattttgtttgttgattgttgttgttgttgtttgagacagagtcttgctgtgtcacccaggctggagtgcagtgatgcaatctcttgctcactggaacctccacctcccaggttcaagtgattctcctgcctcagcctcccgagtagctgacattacatgtgcgcgccaccatgcctggctaatttttgtatttttaatagagacagggtttcaccatgttgtccaggctggtcttgagctcctaacctcaagtgatccatctgcctgggcctcccaaagtactgggattacaggtgtgagcaaccgcgctcagccaggagtcaaaggttttatttactgaataactgaatcagtggagatgtcactaattataatgtggaaacttgcaaatggttcaacttggtgggggtgttcagctttgaatatgttgagtttaagatgtctactcaagtgaagcaggaagttgagtacatgagactggattctgagagacagagttctcacctggagatataaatttggaattctttggcatatagatggtaattacacccatgaggtggatgagataaccaaaagattgagtgtctattaagaagaccaaggatcaagtcctagataattcttctattaaaaggaccaggccaggtatagtggctcacacctataatcccaatactttaggaggctggggcaggcaggtcacgagctcaggagttcgagaccagcctgaccaacatggtgaaaccttgtctctacaaaaaatacaaaaattagccaggcatggtggcgagcacctgtaatcccagctactcaggaggctgaggcaggagaatcacttgaacctgagaggcagaggttgtggtgagccgagatcgcaccactgcactccagcctgggtgatagagcgagactccatctcaaaaaaaaaaaaaaatgaggaccaggataaagagaggaaccatcaacttcctctcagggagactgagaaggggaagccagtggagtaggattaaaaacaacagtgttcagtgtcccagaagccaggagaaagtgtatcaaggaggaggagtgaccaacagtgtcaaatgatgattacgggataagtaaaataagatatgaaaattgaccactagatttggacatgcagacaaagctgctcttgatgagagcagctttggtagaatagttgggaataaaatcctgaataaagtggattaagagggaatagaaagaaaggaattggatacagtcagtatagacaactttttctagaagtcttgctgcaaagatatggagtgatccctagagaagaaagtgggatcaagcagtatttttcttaagatggaagaaattgcatattgtttgcatgggaataatgtgaataattcagtagagaacaaaggaaattatgtaggaaagaagagagaattgcaaggagaatgttcctgaataggtgagaggggatgaaatctagtgctcagaggaactggctttaaataggaacacagacagctcatctaatgtgaataagcaaggaggcaggtgtggatgttggtagataccagaatacaagttaagagcagcacagattttaaatccagaactagagaagaaaaaatgagggtgaaaagtgggaaattattcctttagaataagtgactgaactttcctgagagcagagtttttttgggggaaagagtcaaacaggagagctgtctatgaataagatgatgatgataatggtgatgatgatgatgatgacgacaatgaagatgatgatacatgtttaaaacatgtggattatgctttagagttttctaagcactttgatttccctgatcacacttgatcttcacaacagccccctgaaatatgtatcgtttccactttacaaacagagaaagttgaggttcagggtcaacacaaagaataataacaatagtaataataattatggtaatagcatttgttaaaagttcactacatgacaggcactattctaaccgtttgatatgtatatgtgttattttaatgataataacaatcctaggaggtataaatccccattttattgatgagggaattgaggcttggagaggttcagcaacttgcccaaggttacataattcatcagtagcaaaggcaggattcaaacccaggtggtctggctccaatagctgtacctgagggtgggaagaagacagctcagatcacccactgagtttgtccctctactctgacaaaccccatgagctgcagggcagagggtacagttctgatccccagtggtccccgttactggatccccagactcctgaaccaacttacgctgtcctctttcctgacaggattgtcctggcacgatgacctcacccagtatgtgatctctcaggagatggagcgcatccccaggcttcgccccccagagccccgtccaagggacaggtaggcagcctttctctacaactctagcaatggtgaggctgatgaatctgtggttgtcctaattgatggagagaaggggaaggaagtgggcaccaaggccagcatgctggggcacaggtaaagaggtgcaggaatggtcactctctgacatgctcacatgaccaagaggagctgagctcatctctagggatccagaaaaacgggcattttttgaatgttttgaaaaacattgacattggctactttaaaagaagcatcaatgtagtcatcatgggagaaattagaatgctgttggactgaagttgttcaatattccatttcattactatgtgaatttctatatgacaggagccaccatcatctttttgtggttagggcctctaaaggcatcattcagactgcaaagcagaggaaagtaaatgaggtttagggagctcagatgatgataccaggatgaagatggcatagtggtggggggtggaggagcagtcctgaatatttggacatatacttggagagccaggtgtggggacatggcacacaggggcaacggggacagctgcagccacagttcatctagagaaattcctggttgccttcccctgctcctgtttgccccttctccatccccagcctcatgattacccagcctttgcagttgtttcagagactcagccatgctcaccagggaggcagatacctctgccctcagcttggccctctggtccctccccattcccacccagcccatctctcttcccctgaggtcactcagtttctaaagaggtcaggcctgctcttaaccgctgagcctgcctggccccgaatagttctgccttgcaggctctctatgccctttcccccgctccaacacacacactttgctttcctctacaggtctggcttggcacccaagagacctggtcctgctggaga

SEQ ID NO: 8585 - DNA, 6000 bp, Homo sapiens
tcattgttcagatgagaaaactgaggctcagacagattaatgtgcccaagacatcacaattagtaactgcaaagctaagtaaattcacactcaggtgtgcctaatccaaaaacctgtttttcctataatctagagtctagacaatctataaatgtgtgggatgaaagaaaaggaagaattattcatgatggtagagggattcagagaagacttgggggcccagaaaaagaactcggggaaacactggggagcccaggtgagggatgagatggggatctcaccgaagaagcagtagacgactccaaacaaacagcacatgatgcagacgagggccggcagtgcctggtacctgcgctccaggggctgttcacaaggtgcaccccagaaggcatcatctggctcagggggcagcagctggaaccgcagtgttgccacagtccccggcatagtgctgggaatagaagggagtcaccctcccaagttaacctgacagagggaaagttggggtcacggaggagtcctgggtccccaccaggatgggggtgggagagggattgggagaactcagcaaggacagtggacaaaggaatagtatccacatttgtgcagctccggaagcatctctggagtggggagcaaagacaaagggaaacaaaagtgcctggctagtggaggctgggatgaagttaaaagagggacgggagtcggggggatgaagggagcgtgctgccagtgagaaggaggcagccaagagattcatctgtgggcggctcaatatgggattgtccaagatttacctgggctggaggcgacctgagcttctgagtgaaagaggctgtgcagaggcccgaggggccggggttgcggggcgccagaggctccaactgactggggtccagggaaagtccgtcgtgcgaggaagggggctgctgggccggagagaatggtgtcggcgcggtggcggcgccgctccacgtccaacaccggctggcactccagtcccgcggcgtccgggaactcgggctgggcctgaggaaggggaaggcgcaggagccggggctcgggccgccccagaaccgcggccccatgccctgagcccgcccgcggcctttggtgctgatggacagctccggcctctgctcctgacgtcactcagggcgcaccatccaggcaggggcgggctgcttctgacgtcacatgggacgcaccaaccacgccgcgggaggcaggggactccgcccccggcgtctccctctcccgcactgaggagggggcacttccgggggtccttcccctttaacctcccccttctcctccctctccggtagcgagagcccgagaccccaccccgggggcggggcccttgcagtgacacgtcggacagctgcggccgcggctgaggctccagtgccgagcgcaagaaccctgcgcagcccagagcagctgctggaggggaatcgaggcgcggctccggggattcggctcgggccgctggctctgctctgcggggagggagcgggcccgcccgcggggcccgagccctccggatccgccccctccccggtcccgccccctcggagactcctctggctgctctgggggttcgccggggccggggacccgcggtccgggcgccatgcgggcatcgctgctgctgtcggtgctgcggcccgcagggcccgtggccgtgggcatctccctgggcttcaccctgagcctgctcagcgtcacctgggtggaggagccgtgcggcccaggcccgccccaacctggagactctgagctgccgccgcgcggcaacaccaacgcggcgcgccggcccaactcggtgcagcccggagcggagcgcgagaagcccggggccggcgaaggcgccggggagaattgggagccgcgcgtcttgccctaccaccctgcacagcccggccaggccgccaaaaaggccgtcaggtagtgatcggctgcgcccgctctaccccctgggcagcggccgggaagcgcgcggggaggtcgcccgggcccgggtcaggctccggaaggaaggggctggcgagccaggaagtctttgggccccgataacttccgatggccctgccttcccgagagccgtggggccagtccgagactttctctgggccctatcccggcctgggctgaacttactggactgtgtcctaaaccggctcgacccgatggcgccccagagatcctactagctccctggctgggctgctggtgttagagaaatgacttatatatagggtgagtgtatagagacaggggaagagaaaggagagaactaggatttacctggatctcttgttcctgagtgggttacaagggccacctcagggtgagatgggggagggaggaatgtacctatctcattaatgtctctgctgatgagttgaaataacttctaagtaacattgggttcaaatgctggttctgcaatttaccttctgccttaccaaaaggtaagttcctagagcccctgagtgcagtttgcccctccccgcaaaaacactcagtacacccctatgccaaacgttcctttatgtcatttatgtgaggcatttgtggcataatggcatatttatatagaaatgagtagatacatggtgtgtccagcgtttggctgggtgctttaaacagatataatcagtcccattttacagatggctcaggttaaataacatgctcaaggacataactactaagtagcgaaccccggagtcagacccacaatatctctctcctatctgggtgggtattgccatctcccaaatgcaaagcactacctgtttaagaccatttcgtttaaatcctcatgacccctgggagagagggtttatttttaacctattcataggtgagagaacagatacagagaagacgtgacctgccagggtctgtgctgaccacctcccccccaccccccgccccgttgtccttttgataagcttgtgccatctcctcccctaggacccgctacatcagcacggagctgggcatcaggcagaggctgctggtggcggtgctgacctctcagaccacgctgcccacgctgggcgtggccgtgaaccgcacgctggggcaccggctggagcgtgtggtgttcctgacgggcgcacggggccgccgggccccacctggcatggcagtggtgacgctaggcgaggagcgacccattggacacctgcacctggcgctgcgccacctgctggagcagcacggcgacgactttgactggttcttcctggtgcctgacaccacctacaccgaggcgcacggcctggcacgcctaactggccacctcagcctggcctccgccgcccacctgtacctgggccggccccaggacttcatcggcggagagcccacccccggccgctactgccacggaggctttggggtgctgctgtcgcgcatgctgctgcaacaactgcgcccccacctggaaggctgccgcaacgacatcgtcagtgcgcgccctgacgagtggctgggtcgctgcattctcgatgccaccggggtgggctgcactggtgaccacgaggtgggatgataagctatcccactgatacctccttgtcatgttcaaatccctctgagaggcaaagggatgttggagatacaggtctgcttttccatgccaattcggacatttattttctatctctgtgacccccagtaaattactaaatatcctgggcttcagtatcttcctttgtgccaatggaaataattattgctcggggttgttacaaggattagaaaaaatcagggagccttgtacataataggcatttgatgttagttattattttagcccttggacagctctgagacaggacgcatgcccatttcgcagatgagctagcggaggcatgctgaaggtcacacagactcacaactggtcaaggtagacttaaaccctcagactgcaagtccacaacaggtcataggctgaggagatgagacacttactatgagacaacggaagacaatgccagctcatcacagatcccttcccttcctctccccagggggtgcactatagccatctggagctgagccctggggagccagtgcaggagggggaccctcatttccgaagtgccctgacagcccaccctgtgcgtgaccctgtgcacatgtaccagctgcacaaagctttcgcccgagctgaactggaacgcacgtaccaggagatccaggagttacaggtatggtctaggtctgggggtggcagagtgacggggacaggatctgagaagtcacagagagcccagagaaatgacaagttagcactagaatcacagaacaaaactacttcccagcccctgcctgtttctacattctctgatgagcctcttggctgtctatgctggggaaatgataggtatgggcagaggttggcaggggatgaggggcccatcctgagtggcacctactgcctacccagtcccccagctgtgtgctgctccctgtaatctgtcccttgctgatggcctgtttctctgatccagtgggagatccagaataccagccatctggccgttgatggggaccaggcagctgcttggcccgtgggtattccagcaccatcccgcccggcctcccgctttgaggtgctgcgctgggactacttcacggagcagcacgctttctcctgcgccgatggctcaccccgctgcccactgcgtggggctgaccgggctgatgtggccgatgttctggggacagctctagaggagctgaaccgccgctaccacccggccttgcggctccagaagcagcagctggtgaatggctaccgacgctttgatccggcccggggtatggaatacacgctggacttgcagctggaggcactgaccccccagggaggccgccggcccctcactcgccgagtgcagctgctccggccgctgagccgcgtggagatcttgcctgtgccctatgtcactgaggcctcacgtctcactgtgctgctgcctctagctgcggctgagcgtgacctggcccctggcttcttggaggcctttgccactgcagcactggagcctggtgatgctgcggcagccctgaccctgctgctactgtatgagccgcgccaggcccagcgcgtggcccatgcagatgtcttcgcacctgtcaaggcccacgtggcagagctggagcggcgtttccccggtgcccgggtgccatggctcagtgtgcagacagccgcaccctcaccactgcgcctcatggatctactctccaagaagcacccgctggacacactgttcctgctggccgggccagacacggtgctcacgcctgacttcctgaaccgctgccgcatgcatgccatctccggctggcaggccttctttcccatgcatttccaagccttccacccagctgtggccccaccacaagggcctgggcccccagagctgggccgtgacactggccgctttgatcgccaggcagccagcgaggcctgcttctacaactccgactatgtggcagcccgtgggcgcctggcggcagcctcagaacaagaagaggagctgctggagagcctggatgtgtacgagctgttcctccacttctccagtctgcatgtgctgcgggcggtggagccggcgctgctgcagcgctaccgggcccagacgtgcagcgcgaggctcagtgaggacctgtaccaccgctgcctccagagcgtgcttgagggcctcggctcccgaacccagctggccatgctactctttgaacaggagcagggcaacagcacctgaccccaccctgtccccgtgggccgtggcatggccacaccccaccccacttctcccccaaaaccagagccacctgccagcctcgctgggcagggctggccgtagccagaccccaagctggcccactggtcccctctctggctctgtgggtccctgggctctggacaagcactgggggacgtgcccccagagccacccacttctcatccca

SEQ ID NO: 8586 - DNA, 6000 bp, Homo sapiens
atataaatgagggcagtccagtgctgttaagaggacctaggccccttctagctactcatctgaccatccttattatgtggcttgtacctgtgggttcaaatgtctatccagatccagtgatcttctctgtgctccagagagcatgaaggcaaaagagggaaggggaagggcactcccctcttcctgtgaggacactgcccagaagctgaatgtgccacttccactgacgtcccataggaaataagtcaggtacatgctgtcctctcactgctaggatgtgtagattttatcctaggcagcaatatcgctaggaggatggccaactgtcctggtttgccctggaatgtagtggttcctgaaatgctggactttgaattttaaaactggggcagtttcagacaaactgggaagagctggtcactctagtacccagtaatacttggagatattattactgagaaagcagaaatgatcatgagggtatgcccaggattctttgtcatggggatactcttcatttgtctagttggaaatgaaggctgtgccttaagttccaccccacaaatgaagggctactaaagaggtgcgaaatgcccccagaggaacaaccatgaggatgacatatctggtctttgctccctcttggtttgctttcctataccttcccctgttgtctttgttcatccatccatccagttatctatgcaggcatccaatcatctcccttttcattcatttttttttttttgagatagagtgttactctgtcactcaggctggagtgcagtggtgcaatcttggctcactgcaacctccgcctccaaggttcaagcgattctcaggcctcaggcccccgagtagctgggactataggcacccgccaccatgcctggctaatttttgtatttttagaaagatggggtttcaccatgttggccaggctagtctcgaactcctgacctcaagtgatccacccaccttggcctcccaaagtgctgggattacaggcatgaaccagcacacctggccacttttcattcttaaagtatttgttgagcatctataatgtgctcttaagatattgagatgaacaacaccacttagttcctgccctcaaggaactcacagtttaatccatccatatagacaatgaatgatagtacaggagtctaactgtaatcggagctttgtacaaagtataatgggacccagtagagcaagcaactaaatttgctttgcgagtcagagaaagcctcagagaatgggtgacatatactggatcctggagattaagcaggcattttccggtggagaaggaaacactataggaacgaggcaccagaaaggcaagactcagatggcatgcagtgagcatagaggagagatgggccacttctgtcgggctggaatgtgaggaaagtgcagaggagaggggaggggaggtggtgatgaatgagtaaggcagagagaaaggtgtgaagagcttgaaatgtggtaaaaaatcaagttgtgaccagagtatgagcaatctggaaggccatccctggaaatattttcatgggctaacttctcagacagagcctttcctatactagagtgttatgaggacctgccagtgtgatggagtaaacaccttcctttccgtgcctagggtcaggcacaggtgttctgtggcactcaccttgggcaatactcaagggccttcagagggtgattctgagtacctgaggacagcattcctttgtgcctggagacatagcctgtcacagggttttttctttctttaataatttataaagtgtctccttttatctatagaaacataaagcttttagacctggcaagggccttaaagatgatatagtcccaacccaaatgtagggcccaagaggaaatatcactgaggtaatcagggacagagctgaatcagaattcaagtctttgtacttgaagatcataaagatttaaggaatttttctttttcttttctttttcttttttttttagacagggtctctctctgtcacccaggctggagggcaatggcaccatctctgctcactgcaacctccacatcccaggttcaaataatcctcctgcctcagcctcccaactagctgggactacaggcatgcaccaccatgcctggataatttttgtatttgttatataggcagggttttgccatattgccaaggctggtcttgaactcctggactcaagcaatctacccgccttggccttccaaagtgctaggattacagatgtgagccactgcacccggccttaagaaacttttgatataaaaataataccacagggcagttagagtaagcatacaataattttgtgaaaagagcatgatcattgtagcaataatctgaaataaaaacattctagctgattgagaactaaatttaatttaatgtaaatttagttctgagcttcctggcagccaagcaaagacagcgatatgatggtttacatgttttatttttacctggcaaaaggtagcgtagaaataagggatttaggttttgactaggatcagatgaaactgggcagccttcagtaattcacttcacaaacatgcagatccaacagaagttcctggaaattcagtcttcaaggagcttattgtctagtggaagacaaacagttaaaatcccatatggtagattctatgaaagtgggaggcaaaggctgctgagggagtgtggaaaggaaacacacaacacacaacccaggatgagagaggcggcttcccagagggtcgtgattatgatgtgattatccactgaatctcatcctaagggagaaggggtctgttgggcaaagcaaagcttggtgatggggaactgtgttcttagctgaggaggcactgctgtgcattcagagagtcaagaaaaagcatggtgggtctggggagttgcaggtgtttcatgtgctcagactaactggagtgatattcaggcagctgggtagaaagtggcaagtgagaggcacacaccaaataaacgctgctcattatgactatacccctcactcccaaccttcctgccagagatgagcacatcttcattttcacctgcagacctgttccaatttaagaagctaatgagcacttccctttccttcaggactaaggcaagtactaatctagctgatttctgtcatttgaactttagtgagaataaaaagtcggggacaggtttggctctggggagggaagggaagacatggatgtgtgataggtgggtaagagagggagacctccaaacgaggcctggaagacagactgaaatgcatcccacattagtggcatgtgtctccatccactccaggagtcctctgaaaccacagaggagtgagcattattgtcaacgatgattaaatgattgacccctcacagattaaatgcatggtttatctagatgtttctctataggcacagttaattaagagggaacgggatgtcatatcgggaggcataaagactgggcaggaagtgggtgtgtggggaaaaggaggcagttagttcacagcatgcccccggtaatggagactggggttggggaaggggctacataccgtgtgtgtgaatttaccactttgcctagctcaaccttggtcaacattcaagagtaaacttttggggagcagacctgcctcaggggtcatccgatgtggtcctttttattatttcattggcttcacatgattaccctgggagagaggaaatttccttacagatgacaaaatcagggctgaaagacgaagtggctccctgcagggctcagcagggtaagaagtcctgtctgtctctgtctcagatctgtggcccttctctgtgcccactcctacatgcccaccgtggaggcccaccccttctgtcctcagctcctgcagatgcacaggggcccttactggctcccactgtgtgtgccttcccgactgctcacatgttccgcccagaccccaggagaaagacctcactgccaactcttctgcactgcaggtgccttctgcagtgcttagagattctgaacatatttccttctcaagtaaaccatgctggactttttggataaacttagtgattttaaaatgattaaataggtaactgctgggagagatctggaagcattcttctaaggtgttgataaaatgtaaatatatttttagaacaatcttagagcttatgctaaagatgaactatgtaagaaagttaccttcttcagccacttgtaaatagcagtgtggaccaatgctttggatcctcttccacaggagaggagacaagattggaggaaccaaagaaccatggaattagggacaaatggctcagaacagtgctctgcagacacatgcatctgtactttgcttcccagaagccaaatgaaactgttggagcttggtgggctccaggcctcagggggaagaccaccctaggctttatcttttcctctgcccttcctgcctgctgttagcctctcctctggaccaaaactccctttaaggggaaaacctcctctttgaagcccacaagatacggtgaggattactgcctttttctgatttccaacgtgggtttttcattaagcaaagaacaattagaaaacccacacataacatagggtattcagtaagttcaggaaagtgttttccaccatctctttgcccccattccctccccagcgcttggctcaaggtctggagcttgaatctgcatcgtcttcctaggtgcttgcctgaggtgagtggtcagcgggtgctggcttgggggcagctggcagggcgtatgctgcgggtaggaacccagggaacactgggcgccttagcttggagcagctggctccgaggaattgttccacgtctgcacaacttaaaaatctgcagtttgggggcgggagggggagcgcgggggtgggtcccgaagcgtcccatttctcctcctggctgttaactgagcgctctcgctcagtgcagcgaggccagcgatgccttctggaccacacgctgtcctcgccgaggtcctggtttgttcctcaacgtcggctgaaggcatcgtcccctgacttcctcttccattcgtccttccgaaaggggacccgactggttcctcttctacatatgaggcgcatctgcttggtgcaaatgtccaagcacctcttctgactcggtgagtggaggaataagacaaagcatcttgttctgcactgtgcctgagtcttcaggcagcgggaccgatggcaaacattggcaggaactggagctatatgtactctccttcgcactttgttttaaaacaagtttgggcctcgcgatttcctgaggaaatccaggcaaattagcaaagtgtcgcttgggccgcgactttagaaaggcggttgccccagccgccggggccgcgggggaggtcatctttttcccgcagggccacggcgcttccggcccaggagggcgcgcaggtgggaggcgcggggcgcgctcctggtcccacccggacagcgcctgccgctccggggtgactctgcacttgggcctgggcgggggcgcgcggccggcagggcagcatctaggtctatgggtctgtccgcctgtctggcggtcggagccccgcagtcctcagccgcccgcgccctcggcccggggcgcccggctgcgggcccgaagcgaggggctggcggagctgcgaccaatggggcggcggccgagcggcgggccccgccccgtcccgtccggccccgccccgcccgcagctcccgggagcctcgctctagcggggcgggaccgacggacagaccggccgacgcgggccaccccgctctcctcgccgccgcggcggcaggcgcggggccgcgccgcgaggcctgatccctgcagcgcgggcaggcggcgtcgcagagcggagctagctggatgcgtccggactcctgcaggtacctggctggcgtccccacctccctgcgcgctccggagacttctccgggcgaccct

SEQ ID NO: 8587 - DNA, 6000 bp, Homo sapiens; identical to SEQ ID NO: 3696

SEQ ID NO: 8588 - DNA, 6000 bp, Homo sapiens
agagatatctcacagtacaggtagctcaagtggagccaatctttacttatactctgattcatccagctttcttcatagctagcttctgtttcaaataaggaacatgcagaactgctcgttgagtgctcagcatattcagacgttccttcttagtcatgtgttgaggaatggaatggtgaagggctagaaaaattaccccgccatgtgcattcggcattaagacagagcacccgaagatgagccagagcaaatatgttaatcataattctatattacacgattccttccacccagtattgtgtggagatatatgtatatatatacagtaatgttgttgaagccaccatgggaaaggaaccagatatttgtttttaagcattataggctttatgcctgaattttataaatgaggaggttacctgtgtgcctttaagaaaatactgagaaacttttctgtgcctcagacagaaaatataaattgtgaacttatttaatggctataccttccaaagtagaacaaaaagagagagctattgaggtaactaaaacaaagtaagaaatacggcaaaaaaagagaaaaatacttttccccaggtctgaatccagcagctgagaacacacgaaggagatgaatgaactgaaatggtatttgcggtagaagagatagatgctgagctgttacttcttgtgatgctatgaggtatttataacaacaaaagaccctcttgaaaataaaatcagcatccagtttctcagcaacaaacaaccttcagacgccacaagcagtatactaccttaaacactagtgtatcctacagatgttactaattacttcagtaaaattttatattttatttataagctgcgtctacattcggatgctactttcagactattatttctcttaataagctcctttacccttatctataataatgaaggtaaacctggagaaaaatatttttccagcctgtgtctccatcctaaaattcgaatcaaatcatagcatataaaactccttaagtttgaagtgtggtacttagtttttaaaaaggaaatattggccgggtgcagtggctcacgcctgtaatcctaacactttgggaggctgaggtgggcggatcacgaggtcaggagtggagaccatcctggctaacgcggcgaaaccccgtctctactaaaaatacaaaaaattagccgggcgtggtcgcaggcgcctgtagtaccagctacttgggaggctgaggcaggagaatggcgtgaacccgggaggcggagcttgcagtgaggtgagatcgcaccactgcactccagcctgggcaacacagcaagactctgtctcaaaaaaaaaaaaaaaaaaaaaaaaggaaatattaaaagtaagtttttttcaataatgattttttttattttccaaagagtatcacggagttcacttttctcattaaaaaataataatatgcatgtagtgtttgacatttcccttgtgagctgcaaaatctagaaatcaggggacattgctgaaacatctgttatttcacattttccattgaatgacttccatgatcagatggacaaaagacaattactaccatgcttttagtcattagaggtattacagtttctagtagttggctttttgatgtttctactgtctcttggtataggtatatccaaagtggaacagaggtgataagttatcttagtctgcctggtgcaccaactggtatcatattggcctgaaatatttttctgtatgtcataaagctcttggaattaagagattctttgcatgcaaagtaaaacacaatctattgagttgtaactctgatgaaaaattttgctaaaatctgagacacattatttgtcaaataagattttgtgttctatgccatatcaaagaaacatgttgacaaatgaagagttaagtaaattacacatgagataagtgtttgtcttgatttgcttgggggtattgtgtatgtgtgtttgtttttctttgtttcagtttgtttctctggtttgttgtttttcttattatgtcatgccaaacagtaaatttgatagattaattttttttatcatggtagtgacctaattagacaggttgttttatttgcagttgtttagcacacagtcacatagacacagcctaaatcaagactttacatattaaaaaagttagaaattttaaagaaacactacacaaaactgggtagaaattggagagttcataaataatctactctgacttctgattccaaatccacttccaaatttttgttagagttttatgacatattctgttaaaaaaaaaaaaagacaaaaaggtgtaagaaacactcattacgtggcttaaaaatgaacattgaaatcactctgctgattctgttttccacaggcagtcacaacaatacctccatctcacatacccttcttaaatgtgacttggacactattcccatgaagaaatggtctgtgtttcctaccttaaaaatgggctggctttgtgactattttgactaacagtgtatggcagaaatgatgttattgactttttgtgtctaggtcattaatgaccaagaagcttctgctttgttggctaaaatacttgttcctgaaagcttgcaagaagtctgactgcattgaggccaccatgctgtaaggcagactaaacccacccaaaagaagaagctgcatggagaggccatgaggctacacaaagagtgagagatgatggcagcctccagctgcttcgacctcccatcctccagctctagcactagctgtagcaaacaactggccacaacactaggaaagaccacccagctcagaccattcccaaattccaacccacaggaatccatgagaagtcataaaacaacggttatgtttataaccccaaagatttgggagatcatttatagatcattcatttattaagcaaatgtttactgaatgtccagtctgtgctgggcaatatcctaagtacaaaatcctgcaaggatttttttttctcaaaggagtttaatccctctatcctctctgcttccatggctctttagattggtaatatagcatttatttattttgtccatattggtaatacagcatttattctttggtccatattggtaatacagcatatttttccatattctataagttgtatacatgtttgattatacaattctaaattcaggatctgattctgaattaattttatttgcctctatagtgttcctagtgtacgtaagtgttgatatatagcacctatctggataaaaaaaattgatgcaggaaaattaataccattagcccccatgatacaaattaaactaatattcttgagacataatttatttaaaatagctgaagtcttcaactgaaggaaaggaaatactttttaaaaaacatttgaatatgtgattattccttacagcagtcaaaagagaaagaaataagtacttctcaaagattctagtaattagtaaacaagccacgaggtacttaaaattaccttaaaccagttttattttgtcaaatagtctgttactacagctatagataattttgttctaagtgtagcttaaaactaaaatgtgccctggataagataaaaagtagtgtctgggcgtcctcattacaatcttccttcctaccactagtctatgctgttgcactaagtactgaatgcttgttcagtgtccataggaatgtggggaagatcacttttgtctaagatttgttactcagatgggaaaaagtcaaatgccttattttttccccaaaatagaagcaggcaatttataaacaattctgttcacgaaaaaatgtattctgaattcataaatttaagttatatgttttaactatgtcaattagaaaaggaaaatattatgggggtggggcctccctttctaattttgaaaagaaggaatctaatcgtcatagttaagcactcttacttacaatgttgagtttttgttaatttctcctggtcctctgcctcactttgatctgcatttaatgagttacaaatcctgtgaattttacctcagcgctgttttttccacctagcccattttctcccctttgtattaacacagtttaaaacctcaatgtctataaactgcacagtgcaggcaaacatgtattgaggtcttatctgtgtgatgtcttatgctaagggcttcacatatgtacactgtttaaatcttacacaaatatgatgaaataaattctaaaagttttcctgttttacagatgagaaaagccatggaggactttttttattattatttttatttttttgagacagagtcttgctgtgtcacccaggctggagtgcagtggcgcgatctcggctcactgcaacctccacctcccaggttcaagcgattatcctgcctcagcctcccaagtagctgggactacaggtgcccaccaccacgtgcggctaatttttttttgtatttttagtagagacgggatttcactatgttgaccaggctggtcttgaactcctgacctcgtgatcctcccgcctctgcctcccaaagtgctgggattataggcgtgagccactgcacccagctgaggacttttagaactaagtaattcacccaaggtgatagtcagtagtggtggaaccagcatgcaaattagacaatgtgacttcatagcctagtattctactctacttctgtaacttatggctggaagggactttaaaattccatctactccatgtttaatgcttcattctcccttaacatttgcaaagttgtcactagcctatgttggaacatctccaatgactgtcacaatagtcttctatctctcaactccaactcaccctatgctctgccagattcattgttttcaaaaagctttttgtcataatctccctcagctcaaataaacaactagcatttccaaacagagcaactacaaccacttcaaacatcctaaactccctccaaccctggctattcacacgcttcagttcacaacttccatccagaatcctacttctctgattgtcctcatggggaaagtatgctatttccttcatcctacaagatgcttctcactgactctatccatattcttctcatccttcaagagccaagtcaaatctctctgcttccaataagccttccttgctacactcaggtaaatgtaatctctccatctcctggcgaatgtctcgatttctttttctgtgctatgcctggtgtgacagggagtcagggccaaagatgatctaacaaagtcagaacatgataatccaagtacagaagatcatttcatcaatacaggctctaagaaacagtctagcagtgggtgactgctagactgtttatgagaatatgagaatgaaggccaaaaggattcacaagaggggatcaagagattttcaaggaacttctggaaggcaaatctaaggaagaatccaaaatcagaaaccaaaaagcatagtcaggagttaaagaacttagaggagcagagcacaaagttgtacatcgtatgtggttttatcttgggttgattcttctagttttcattaggatgaccacacatcacgtatgatttaaagatgttgctttgcctcttacaatttgcacagcttttgccacccattattttctatgatatattataattatacatctgacaaaattctgaaattggcagctgtgactacttatgctctggacttatctataaatcttttaaggatagtcacaattttgtctgtgtctctctaagaatcttgcagtgttttaacataaaacatgatgaagaagtatttgatgagtgtatgcatgcatatatagatggatgaaaacattaaaaaaaaaacttgagctccatcatttctgaatgtataaccaatcctccaaaatgtctgaagttaaatgactggctcttaataaacctttttgaggcatccacactaccatattttactaattactaagtgttttctaaact

SEQ ID NO: 8589 - DNA, 6000 bp, Homo sapiens
cactttgggaggctgaagtgggcagatcacttgaggtcaggagttcgagaccatcctggctaatatagcgaaaccccatctctactaaataatacaaaaattagctgggtgtggtggtgggcgcctacagtcccagctacttgggaggcagaggtaggagaatcacttgaacccgggaggcaggggttgcagtgagccgagatcgcaccactgactccagcctggatgacagagcaagactccatctcaaaaaaaataataataataataggagtacagtattcactgtcagtgtggatgacttcatgctcttgggtatacaacgagaggataaatcagtgtgacctttctttttggtgggaggttaagggtgagagtgaggggaatagcttgattctatgctaactgactttaaaaggttgggttcccttcgtaatatgtttcctccggaagtaaccagatgatgatgtgtctaggagggtgtttatgtgttttcagttataggaaaaatcagaaacaactcataagctcattgattagcaattgataaagcagttgggtggggtggctcgtgcctgtaatcccagcactttgggaggctgaggcaggtggatcatttgaggccaggagtttgagaccagcctaggcgacatggcaaaaccctgtctccacaaaaaataccaaaattagccaggtgtggtgacatgcctgtagtcccagctactcaggatgctgaagtgtgggggcatcgattgaacccaggaggttgaggctgcagtgagctgtgattgcgccactgcacttcaacctgggtgacagagtaagaccctgtcccccccgtcccccccaaaaaaatttgataaggcagaccacatttacctatattctggcaggggagttagagatccgacagaagacaaaccactcttcccctgtgaactgaatctgctttagagaaattaagtcttcgggacaacaaaaccaactaaagttgtaatcaatgggcatccaacttggagttcttcgttttttcccttatttcatgttcctatgtgatgtggtcagttttctgttttaagtagaggggacaggaaagaaaacacattcctccagtccatccagcagcagcatttgtgaagcagccacagcttcacatactttcttcctagcagccctgggccccaccagctcctccctgcccttctagtgtggcctcagaagctgtctgtccatgaactggctgtgtccatctctgcctgcagacgctctgtgccgtaccccatgtcttgcctgccctgcttctctctacatttctgaaatttgccctgttggaagccccactaaggtcctgccttgacccctgctgttgactaaagggctgtcacgtatttattatctctgccaattcagtgtataggacccatgttttatacccgcttttccccaaaccccagacttaaataaaaatgttcgttgttagaaatgactctgggttggtgatgtagagatctataacttgtgccagtttttaagtattgccttcctgctccaaattcaccctcagttgcctgatctctgaaaatgggtctgggccctttaaatgttttttctttgccttttgtaagtagagggctctgaaggggaccttgtaggaggaagggatttttcttcctgatttcatatgtgtgcatgcgcatgcttttcctgcactcctatattcctgcagggcacacctttctccagcatctgttgctctgttttctgcagctctggcatcggtggtaccaggagcctaagactgggtggtccttatccaacccagatcattgcttcctacagcctctcagcccccatgtgtgtaccccaagcccccctggtgctggccatctggtgagctagccacctgatctttgtcctcagcacaaccctaagctgctctggcctagggtatacattgacgtggtaagctcctatggagggaggcctcttcactctggtccagcagcacctgatgactccctgtgtgtgcccctccttccttctgtctgcttgactgtctacacccagacttgcttgcctgtaccctagagggttgcccctgctgcttggtgactgtgggggatctctggcctaggtacccaggagtttttctgccatctatactttcttcaacaaactcagaaaaaacccctgccctaccaaattttgggagatatttttcatctgttccagggcatcctttagattgttatttcatctttatagtttactcaagtgtcatatttattgtattaaacttccctttcttagattactgtttggtttctacctgctggttgaacccagactgaaaaacattctatgcagctcacctaagcaggcagaaggatgaatcagagagaagtctttagagatttctgagggctcactgagaggctgccagagtacacttgcttgtacacaggtcctagaggttggagtggaagcatttaccaagccacgtacaagctcttaaccaagggcttccaatatgcattaagctccccaaaaagggactgcttgcattccggtgttttttttctaaaatgactgtcagctggggcaacatgaggagacctcgtctctacaaaaaaatttaaaaaattagttgggtgtggtggcacatcccagctgctcgagaggctgaggtggaaggatcgcttgggcctgggaggttgaggctgcagtgatcaggcaactgtagtctagcctgggcgacagcggagaccctgtctcaaaaacaaaaaatgattgtcccaccttaggtaagtagatgcccccaggttgcaaatctgtactaaggatcttcctctagatatgcttcccatgactgtcatggccttgtaggttacaattgctggaggtccatccctctccagaaaggaggtagagatgccccattttgggataagggtgcaggagggataatgggtctgctgcggaagaagatggcaccctcacctggaagcactgctcaatcccacacacctgcacacccatgagtctgctgcctttggtggtctggggctgactgtgggaaatgagggggcggctgtacttctcaccccagtttacctcttcagatcttgcccccaccctcacgtctaacatggagtcagcactgctgaaattcttatctcccctaagtctagcaagttatttaaatttttctgttaccctttagttcttaataagtgagacagttttctataaacatgtctgtaattcagcacacatgtgatttttccattgtcatctcttaggagaaagggtgtatatatatatataatctggtttctactgaacactgtgttcagtaaacttgtccagatgaccaaagtatctgttcctttagcaaatgctgggtaagtctcaggtaccacgtgctggagtgtaatggtggtgcagtgtgaagaccttgactgcggagggttcccaggcagaggcatcctgatcaggagcagataccctgactcctgggcaatgaggctggtgtttaggctggggcatacccttgggcaggaaatctctaagagaaagaagtgatgaaaccctgagttcaacctctgggaatggagaagaaaggagttctagaaaacaacagacacatagctagagttaggctctgagggaacagtagcatattggtggtggtctgggggaactgtgggaacagcatgagcagggagggtgtgtccaggggactgaagacttgggaaataagacatatttgggaacatagtgggaaaggaggctgtaggctattgcaggctctggaatagaggagagatgaggagggagctaccagtggcgtaatagaagcacctggctcctggctgaatgcgcagagcaggaagcaactcaaggtaatgtggggttttcaccaggtgcctgagaacttgatccattgcacacagaggcccgaggaagagggactctgcaaggcatgtggaagctaatatctggagttagtttgttgacccatgaaccctccttttggaggtgatgctcatggcattgaatggaggagtttgtagagagaagactactaaagaggcagtgaaggacggaactttgagaaatgtgcttcgtttagggtttggtggaaaaggcagacccctgaagagctattggaggttgtatcatcccattttacaaaggaggaaagtgaggcttagagaggtcgggtaacttgcctaaggtcacacagccagtaggtagcataaccagaatttaatcctggtcctgtcactccagatgccaaactggttttccagtctgaaaatggatctgggacatctccatcctcaaacgtctgctacccttatttttaaattgcataatctttccacctagacctaaaaccctctttagtttactaaaggcagggcagaatggcctctgggagggttaattcccttctcctcttttcctcaaaggttctgtatgtgtttatttgaagaatacttctagtggctaatttgatttgaaatgatgaatatcatttgagaaaatcggccacactgggctttcggggggttgtaatcagtgggggccagaatatgtcctgccagatgctttgatctataatgttgcctgtgggactgtgtaggtgagtagattcattataaatacgtttcccttttaatttgaacatgaaggctaaaagtaatggctgggaaccaaattccttaaatctagctgacaatagttctgtgacttacagactggagagcagaggtagaccatcatcttagctgagtgccagcctcttggtgagggagtccagggagtcctgaggctcccttgccccggtgaaaacccaggccaggcctctttccgcaatcaaggaacaagctgtaggtgtggcccagctcttctggtcccactgagctgctccactcacacccttatcactccaccatctgccagcagtgctgggagctattctctcccctagagccatttagctgcaaactgtctctgtctctgtttatccgagcagaacctggaaggggctggcaaggactaggcaacagatgggacagccagagaggtgaggacttaggtaaaccactcttgccagactcccggaggtggtggggagggaaagggcagagtgaacgtgctcctctggcctcgtgatatggcagggggcttgggctctttctgaggatttgtgtgtcctgttggagcaggaaagtgaacaggaaccaggatgccctctagagatggaggctgctagctctgacactcctggggtttagtcagaagcttggatttccagcccctttctctcagcctgagtgggtgggggtgactggtcattttatttcacggttacaaggaggccttgcttttctttcatccttaatcttggtagtaggagaaagtgcagggcagccttggcacaggtcttgggtctggcttgtacgtattgctcgttctgtccctggctagttactgtcgggcatctttttagcttgcctgagcccatggcgggggagtcagaccctgcctgagttctgggagagagtcctcatggctgttggtggccacattcaaatgttttctggccagcagttttgcttcagtgctacagggctctcagaattgaagggaacctttttagggtcattgggttcagggattcccagtctagtgtccatgagtgaaacgttggaattgtttcagtatttgagtcctaaggaaaacagcctgtgtgggctaagtaggtattgaagacctttgctttggtcagagtgaaaccagctgaaggtcatctcatgtggatgggtgggagggaggcctgggggaggagggatcatagcttctgatttttctttttttttgttttttttaaagagatagggtctcactctgtcactcagcctggagtacggtggtacaatctcagctcactgctgcctggatcttctgggttcaagcagccctcccacc

SEQ ID NO: 8590 - DNA, 6000 bp, Homo sapiens
taagaactctttaaaactactctcttagcaacttgcaagtatacaatatattgttattatctacagtcaccatcatgtacaatagatctcttgaacttattcctcctatctaattgaaattttgtttcctttgaccaacatatctccaatccccccaatcaccagcctctagtaactacctttctactttctgtatcagtgagttctacttttgtataataaattccacatataaatgagatcatatggtttctctttctgtgcctaccttaacaaaatatccttcagattgatccatgtggttgcaaatgacaggatttccttctttttaaaggctgaatagtattccattgtgtttatgtaccacattctctttatccattcatcctttgatagacaggttgtttccatatctcaactactgtgaatagtgcagcaatgaacatgggagtgcagatatctcttcaacatactgatttcatatcctttggatatacatccagggattgctgttttcattgctaattttttgaggaacttccatactgttgtccataatggctatactaatttacattcccaccaacagtgtgcaagtgttctcctttctccacatcctctataacatttgttatctttcttctttttgttaatggccactctgatacctgtcaggtgatatctcattgtggttttaatttgcatttccctgataattagtgatgttgaacattttttatagacttattggccatttgtatgccttcttttgagatatgtctattcaagtcctttgcccattttttaatcgggttatttgttttctttctgttgaattgtttgagttccttatatattttggatattaaccgcttatcagatgtctggtttgcaaatatactctcccactctgtaggttgtctcttccttctgttgattgtttcctttgctctgcagagctttttagtgtgacataatcccatttgtctgtttccccttttgttgcctgtgctttggggtcatatttttaaaatatcatttcccataccaatgccatgatgcttttctcatatttctcatattttcttctagtagtttaacagtttcaggtcttaaatttaagtttttaatccattttgagttgattttcgtatatggtgtgagatgagggtttaattgcattcttctgcatatggatatccagttttcccagcaccatttattgagagactgtccaaagcaaatttctagtagagttgtctaaagaaacaccagagctagggcaagtagtgacttatgtgtgctgcgctggcccacaaaacacgagtatttaagcagtaatgttactgtggattgaagatggctgcaaattcttgattattcccaccatggagtgatgggatctaattctcctcctttgaatttgggctggccttaatgatttgcttgactgacagaatgagaaagaagtaatgttctgggacttctgaggttaggtcagaagaagtcttgcagcttctacctacatttcttaagacactcactttgggggaaatcaatcactacataagagatttgacttcaccaagattgccatactgtgaggaaacccaagctagccacactgagagagcaacagatgcccagctagccccagcagatccaaacccactagccaaggtgccagtcgtgtgaatgaaagaggcatcttggacattccagactcaatagatgcaatgtgggaaagaaacgaggatcctaatagatagccagaacctaggcctcaggcaaaggaccccaagtgagctgtcctagccatctctagccattaagccaccccagcttggggtttcagtcattgtgaaacagaaatgagacctcctgttatgccctgtctgaatttctggcctataaaatcatgagcataaaaaaattggtggttgttttatgccactcctttttgagatggttgttgttttatgccagcgtggtttaggctggtttgttatgcagcaacagataactggaacagatgctgaagtgagcatttgtattactcagttattgctacaataacgcagtataacacatgactccggaactcagtgggtttcaataagcatttatttttctcacgcatgggtctgtgggttgactggggtgttcttctttaggctgtgaggcagctgggtttgatcagggctgcaggctaaattcaggcacactcctgtctttgttctggtgccaggctgaaagggcagcatctacccaaggcatgctgggtcacacgtatgcaggagtccacatgcgattgtgtgaaaacattttgatgcctccgcttgcatcacatccacttagtccactagccaaggagctaaatggcaaagctcaaaggcaatggggaaggtaaactcctatctaagtggaagaaacaagggaataaattttggctgaacaatactttagcctatcacgggatcagatgacagtagcggtaatgctgtcaggctggatcacttgtaaggcgttgctataattcagtacttacgcatccagaaatcagggaaaacacatataagtactgtgggggaaggtgtctaacacaggaatcaactttttttttgcacaaaatacctacaaacaggaggcatgtaaaattatcaaaagaccaaaaaatgcaaaaggagaggaagaaagagggaaaaaggtggcagaaagtgaaccctttcatagagagatatagtaataccaccaaatgtcacggaggccagaagaggacacctatttcttggtttgcctcacaagtaggcagaatggctacagggcagccctctggagataaaaggccccaagagaccctttcgctaattcaatgacagatatatgtggcatagtataaggcacccccaaacagtgctctcacactcagcaccacacgatgtctagtagttcagggagttccccactcccaattgagggttgactgactgttattgcagctttggagtgcacaggtacagcataaaaagctgcaagcagcaagcagagttggtgcaaagaggattcagaaaggctatgggaggaatgtggtatctgaactgggactggatggagaggcaaaacaatgtggaaggagcacacagcgccatttttgcaggaggcatagagggcacatggctagagagcaggctgaggccagatcatggtaggtctcgaatgccaggatgaggaacacattcttaattcactgggagccactgaaagcttttgaacaagaagtgatatgaaggagttgtcctccaatatcatttttctgtgtttccttagtaacagaaactccaattttttaactgggtggatgcctgtgtaaaacaaaaattacattccctaacgtttcttgcagaaaagaatggtcatttgactaaattcttatcgatgaaatataagagaaataatgtgtatgacttttaggaagtgtttttaaagagagatgccatgccctcattgctctttcttttctgctgggtgaaagctgaactttatcctaacatgtatattactcattaggaagattagcctggggcaaggcaaaatacaggatggttggaacaagaggagcattggaggtgggaagactaattgggagaacatttcaatagcccagataagaagtgaggaaataagaactgagccagtgtggtagcagtgggaatagatgggatgggcagatgtgataaatattgtgaaaggaatctctgtgggacttggcaattcattagatgagagaaggcaccacagagggaagaatcaaagttcgctttgaagtttcacacagaggtgactgggtcatcaattatgttttaaccgaagggatgagcaggtttgaggaaggcaaccatgagtttggttttgaacattttagttgggacgcctgcaggatattcaggtgaagatgtaaaacaggcagccgaagactcatttctggagcatgatttgagagtcttttgcataaacgtggtagtcaaaacaaagggaagggctgattggcaaaacacagtgtgtgtctgtaggaattactctttcttcagtgcacatagagaaatgaactgcattctggaaagccagatataaatatgtgcagctcttcatctgacactacctcccccgcccaccccccccccccccacacacaatccttacaagttctagccaatagctggctggctccaagcaataaaatactcactgtctcaaaatttggacagctccttaaagttccttatgaaggcattttgatttgcacaaatatgtcatgacatgttttaagatgactcctttatagcaagaaatctatagtaaattgccttcctccttaattgaggttagccacaattaagtcttcccttgcctggcacagtgggtggtgccagctaccaaggaggatcccataagcccaggaactgggagaccagcctgggcaacatagcgagaccttgtcccagaaagagaggaaagaaaggaaagaaagggaaagaaggaaagaaggaaggaagggagggagggagggagggggggaggaaggaaggaaggaaggaaggaaggaaggaaggaaggaaggaaggaaaaagaaaaaacaaaagaccacccacggaagtctttaaagaacaattcacaagcagaataaaaaaatataaaaatataataactgtgatacagtaaaaagactcagcagaagtttcccttgtaactcgcgtggccaaagcagatatcaaataaaagatgaaataaacaggaaatccatagaacgtgaacaataaggaaccgttcaggatggccaaaccgccgtctgcgctgttttctcgccagggctcaggcctgggaacggaagaggttaaaatccagtggcttgtgtttcagctttggttacgtggcagaaaccaactggaagtggtggcgtgagagctctgtttcttctagaagagctttgcgtcttaaacgcccataccgcagacagctgcctggcgggcgacccagccccatcctgatggccccaggacacaagcccaggagcgccccggtgcgcgcggttccgcggcccaggggcgccgggtttggtggcacagcgagccccctttctctagcggtatggctgcgttagagccctaatgagcgcgtgcgaaggctccccttattcatccatcctccggtccgtcctttgtctcaaggccggggccttgctgggcaccatggcgtgctttaccgcacaagcccctgaggacccctggaagaagggatcttccgcaggaggggacgcgacggcaggaccgccccgggccccctcaccgcgcccggccccctggcgggagaggccggcgagctctggagaggagcgcgggccgcgcggggcgaaagcgccacccgggagagagggatcctcccctctcctcctctcttctcccctcccctccctcccctcccacagtcctcaggaggaggaacgccgctgcgttctaagttctcccgggccctctggccccgaggactcagatcccggccgcgggagagggcccggcaggtgccaaggagcccgggcggtccttcagcccgcacttccccgcggtcgcccggagccggcctccgttagccgggcgggtaggcggctattggcgccaggattggccggcgccgcccgcgcccccgcggcctcgggtggagcctcccgcccggccgccccctgcggcacccgcgacacgggtggggaccagaggctcccggcggcggctcccggcggcggctcccgggctgtgattggccagcgccacagggggcgggacggcgggcgtgaagtgagcgggctggggccgctggcgcgccctcctacttccccgtctgcgtccgcgttcgcggctcccgtttgcatcatctccagccggcggctgctccagggaggctgggcgcgatcctctccgcccgcggctccaacccgcactctgcgcctct

SEQ ID NO: 8591 - DNA, 6000 bp, Homo sapiens
cacagcacaatgctctggattaggtgacccatgggcgtacccctagggtgttactgaccagaggaaggaggactctttgcctccaccatcaccattttaccccaccccatctccatccctctgctgctctggccaagacaccacggcggcagctggaagtgctgacctcaggtcttcctccccacctcactcccccacagcccccactgccctctttcatcccatcttcaggggacagatgtgagagaccatcttttagtctgtggatgctttcaacttttttgaaaacccctgggaatcctaacatggattatgaacagagatattggcagaagaaggctgggagctcccgattttgtctctggacaaaacagcctctggtaaaaacagtagagtgacttatttcaattgaagagaataagtacatgagcttccggattcattaattaattagcctcccctctcggccagcctggtggccagctctagaagacatctgaagccagatgagcactcaaccccaggcaccagcagctccttccccaggatgagggtttcccttcatctttcaaggacatgaatctcttgagcctctctgtctgactttgcatgtctaggaacgaagggcagaacagatagcacagtaaatcccagctctaaattgtcgtcatgggaattcatcacagatggtaatcattagggccctcacatcttaaaggaaagctttatccagaatcataaataaactgtaaccaaggcttagatttataaagctataaaagagggcagcttgaacagccgggaatgtacagtactgggttacaaaatcggcatcatgcctgaaaggctggacataaacccgggagctctgggcagtgcagcgaggagggggtaaattctttctgcagtgggtggaaccccagtcacagcctccccggcttagcacctggtttaatcacatgaaatgcaagctcagagaaacaggggtgctggcatctaaacatagcattgcaactcctaaaccaattgcagtcccatcaagtttggcccttcctcaccaagatgccctctgactaatgctatgtcctaggaattaattttcactttattgctaaggtttcccaccccctacttttcctgagtggctcaaacaactccgtttttaccaaaagtccctgtaccatgcagaacaccctgtgaggctgtgagttgtggagcagcaaagcacaaaacaaggctgcagccttccagaagtttcttgtctggccagggaggcaaggcatttacagatgaaacaactgtagtatgcaggctgcaatgtgtggtgtaggctgtaactagagaactcaaggaagcaaagggtaagtggaggctggagtcactgtgggggaaatgtttgggggaaaagggacatgatttatgacttgaaggatgcacagggctgtgcacaaggagggaaggtttgctcagcatgtggcttgtcccttctgtggcccatcctgagccaagtctctaatagcacactctcattttcctcttgtcctagagctaatttaagcagcaattgttccccaaattccacacctcaccctcttcattctcattcaagctcatccctaaaaggcctggaaagggaaactctgtgctctctggacatatctcgttcaggctggacaccacaggataacttccatcctggagcatgtggccaggaacaattccacaccccagccccaggcccagcatagagggcagcctcagagaggagcaaccccacctcagccgctgtggggagcaattctgtaggcatccagacatgccagagagagaacaataagataccccacaggcatgggaagtgagggaggccaggagccctcagaggggtgggtacccacccaggcaagtggccaagcgaagagagctcacgccagcatggaacatggtgagcaggagaacccctgtctcccctccgttgcagagctgagtgttgcacagaagttcctgagtaccagatgagactagtgggtatctactgggggacagagaaagcatgcctgtgactctggagagcagagcagatactataggggagacagggctacttaaggctggctttggacgctgactttcaggaggctgctttaaggggttccagggtcttctctgcattgttcagttgagtacccaagaagggtaggagaaaagcagaattcagggcagatgcctgcttggcaatagaatgtccccaggttgtatttcttaaggtacacaggttgtcagttcctgtgacaacaactaaggctacctgcacaggtgcagccgcgtgtagaagagggattcccacagccagaacaagggcaggacaaactgtttattatttactagcactttggagaaggcaaggcgtggatgaggaagctgtattgatcacatcagtagagatagctgcctccttcattcattaccgggaacaagtgtttgagggggcacagacgaggtaaatgcatcagggcctccatgacaactccaatcacagaatctagctacatccttgaattacaatataggagaagctcgtggtgttaaccttctgccatttccaggcatgtaactgaactaatcaaaataaattacttttgtttatgaaatatgaggatcccttccagaaggcaaagtagcagcaggaagaataattctggagtctattttgggttagaatcaccaaccccatctcttcctagttgtgtggccttgaaaaagtaactccgcttttctgaacctctgcttcctcatctgtgcagtggaacagctaataatacccggttagcagggctgttgaggagattcagtttaatgacctctgtacacagcacccagttaaggtcagtctcattccctttctcccacttgagagagttagactccaggaaaagatgaattttaacagttttgcaacacagtccaggaaaaggaagtggggagctcacttgtcctcaagttctactatgtgccactagagagttgtcaccaacaggggccagctttccacatattgcttgcaagccgcccaccacagcaccacaggccctgatgtgaggccgtccgctcacgtttccttctctccaattcttttctaggggcgctgcatcaacttcaccagggtcaagaacaaccagccagccaagtacccactcaacaacgcctaccacacctcctcgccgcctcctgcccccatctacactcccccacctcctgcgccccactgccctcccccgccccccagcgcccctacccctcccatcccgtccccaccttccacccttccccctcctccccaggctccacctcccaacagggcacctcctccctcccgccctcctccaaggccttctgtctagagcccaaagttcctgctctgggctctctcagaaacttcaggagatgttagaacaagtctttccagttagagaagaggagtggtgataaagcccactgaccttcacacattctaaaaattggttggcaatgccagtataccaacaatcatgatcagctgaaagaaacagatattttaaattgccagaaaacaaatgatgaggcaactacagtcagatttatagccagccatctatcacctctagaaggttccagagacagtgaaactgcaagatgctctcaacaggattatgtctcatggagaccagtaagaaaatcatttatctgaaggtgaaatgcagagttggataagaaatacattgctgggtttctaaaatgctgccttcctgcctctactccacctccatccctggactttggacccttggcctaggagcctaaggaccttcacccctgtgcaccacccaagaaagaggaaaactttgcctacaactttggaaatgctggggtccctggtgtggtaagaaactcaacatcagacgggtatgcagaaggatgttcttctgggatttgcaggtacataaaaaatgtatggcatcttttccttgcaaattcttccagtttccaagtgagaaggggagcaggtgtttactgatggaaaaggtatgttgctatgttgatgtgtaagtgaaatcagttgtgtgcaatagacaggggcgtattcatgggagcatcagccagtttctaaaacccacaggccatcagcagctagaggtggctggctttggccagacatggaccctaaatcaacagacaatggcattgtcgaagagcaacctgttaatgaatcatgttaaaaatcaaggtttggcttcagtttaaatcacttgaggtatgaagtttatcctgttttccagagataaacataagttgatcttcccaaaataccatcattaggacctatcacacaatatcactagttttttttgtttgtttgttttttgttttttttcttggtaaagccatgcaccacagacttctgggcagagctgagagacaatggtcctgacataataaggatctttgattaacccccataaggcatgtgtgtgtatacaaatatacttctctttggcttttcgacatagaacctcagctgttaaccaaggggaaatacatcagatctgcaacacagaaatgctctgcctgaaatttccaccatgcctaggactcaccccatttatccaggtctttctggatctgtttaatcaataagccctataatcacttgctaaacactgggcttcatcacccagggataaaaacagagatcattgtcttggacctcctgcatcagcctattcaaaattatctctctctctagctttccacaaatcctaaaattcctgtcccaagccacccaaattctcagatcttttctggaacaaggcagaatataaaataaatatacatttagtggcttgggctatggtctccaaagatccttcaaaaatacatcaagccagcttcattcactcactttacttagaacagagatataagggcctgggatgcatttattttatcaataccaatttttgtggccatggcagacattgctaatcaatcacagcactatttcctattaagcccactgatttcttcacaatccttctcaaattacaattccaaagagccgccactcaacagtcagatgaacccaacagtcagatgagagaaatgaaccctacttgctatctctatcttagaaagcaaaaacaaacaggagtttccagggagaatgggaaagccagggggcataaaaggtacagtcaggggaaaatagatctaggcagagtgccttagtcagggaccacgggcgctgaatctgcagtgccaacaccaaactgacacatctccaggtgtacctccaaccctagccttctcccacagctgcctacaacagagtctcccagccttctcagagagctaaaaccagaaatttccagactcatgaaagcaaccccccagcctctccccaaccctgccgcattgtctaatttttagaacactaggcttcttctttcatgtagttcctcataagcaggggccagaatatctcagccacctgcagtgacattgctggacccctgaaaaccattccataggagaatgggttccccaggctcacagtgtagagacattgagcccatcacaactgttttgactgctggcagtctaaaacagtccacccaccccatggcactgccgcgtgattcccgcggccattcagaagttcaagccgagatgctgacgttgctgagcaacgagatggtgagcatcagtgcaaatgcaccattcagcacatcagtcatatgcccagtgcagttacaagatgttgtttcggcaaagcattttgatggaatagggaactgcaaatgtatgatgattttgaaaaggctcagcaggatttgttcttaaaccgactcagtgtgtcatccccggttatttagaattacagttaagaaggagaaacttctataagactgtatgaacaaggtgatatcttcatagtgggctattacaggcaggaaaatgttt

SEQ ID NO: 8592 - DNA, 6000 bp, Homo sapiens
gctttcatagcccctccattcccaagcaatgttcaagataggctgttttagtgtctcaatgcatggagctcacctagcctccccttgagaatattgctcatcttttaaagaattttttccttctaatggctctaaaccttcatccacggaagacttaaaacaactggaactcagtttttcttttttcttttcttttcttttcttttttttttgagatggagtctcactttgtcgcccaggctggaatgcaatggcacgatctcagctcactgcaacctctgcctcctgggttcaagtgattctcctgcctcagcctcctgagcagctgggactagaggtacccactaccacgcccagctaattttgtatttttagtagagacaggttttcactatgttagccagggtggtcttgatctcctgaccttgtgatctgcccacctcagcctcccaaagtgctgggattataggcatgagccaccatgccccgcccagtttttctttttcactgtggtagacccatgccagacacagacccatgagcttgaaagatattcaataaacacttgctcaattaataaaggcatctagcctttaggctttctgcttctagctctaagtgccttgcagagaagagtgggtcccaaaagcataacggtcattgtttttcattgttcatctcagtaatcagcataattggctaattacattcctgtaaatcattttggggacagtgagacaatatttatctcaacaacatttgaacattcaacaatgttcattgagtgtcacatctggtttcgcaagccattctaggcagtggggatagagctgtgagcaaggcagaaaaggatcttaactttctggaaattatattctagtggggaatgaaagacaataagcaacccaaatcatatcagacagtggtaaggattatcaagacaattaaaataagaccaactaatgaaggatgactgggtggctccttagaatgggtggtcagagaagttctccttgaggaggtaacatgtaaactgagaaatgaatgatgaggcagagccagccaagtgaagatgagggtaaaagcatcccaggaaaaggagtcagctatgcaaaggtcttgagtggaaaagcagatgtttggatggtgtcggtggagagtattaagcaaggagattgggagatgaagtcagaaaggcaacaggggccgagtcactctgtaatccccagtaaggagtgtggatgtttattccaagtgccatgggaattcactgaagagttttaagccgaggagtgatggaatctgatttttgctttaaaaagatcattagtggccaggcgtgatggctcacacctgtaatcccagcactttgggaggctgaggtgggtggatcacttgaggtcaggagttcaagaccagcgtggccaacatggcaaaaccctgtctctactaaaaaatacaaaaattagccaagtttggtggcgagcacctataatcccagctactcaggaggttgaggcagggagaattgcttgaacctgggaggtggaggttgcagccgagattgtgccactgcactccagcctgggtgacagagcaagacttcatctcaaaaaaaaaaaaaattagctgctgttgtaagaatgcattgtagtaggtaagaatgaacgcccttcctgtactaatgcaattgtccctctaggtatgtcacttaacacaagagtaccaaccttgcaagtgaaatacacctagagtcttccttgtttttaccctccctgacccccgaactccgctgggtctgtatttttccttttcttctttttgctttttagcaataggagtctcactatgttgcccaggctggaatgcagtggctattcacaggtgagatcatagcacaccacagccttaaactcctgggctcaagtgatcctcctgggttttttgtttgttttgttttgttttgtttttttagaggtctcactctgttgcccaggctggagagcagtggtgtaatcatagctcactatatcctcgaactcctgggctcaagcgatcctcctgtctcagccttccaaagtgctgggattacaggcgtgagccagcgcacctggtccaggcctgtgttttctaaaccccgatgttacatttcagattaagaacttcaccttctaggcatcttttgctgctgcccaaaaatgagcaagtaggaatgagcatgcaggagtgcaggagacctgacgttggcatatgcaagcggccagatggaggctgctatattcaggaaaagtgttcatggctgggagtgagcaccggaaggaaagagcatctcaattcctaacctggtctagtctgccaggtgaactgctgaagcctatttgctgaaggaataccttccacgcttagcctccaatctttagggcaggggtaggtaggatattctcatcagttatgccaagaatcttttatagctttgatttcctgattgtgtatacaaaattgtttagtttttaaacttttccagttaaacaagaaatgaggaatgtaaaatttttaccttggccaagattttcttatttcaggtccctagaaagctgagtattgaactttgccccagatatcaaaaactctggtcaacatttacaaattctctccctaaaaagactagatcctgcttcctatattcacttagctattaccttaagaactgctagcaactgggcatattaactttctaatatcaggaacagcctctatgtggcgctagctatgtttacgactatgcacaccccttatatgtgtgtctcagttatagcttcttaaagtcttctcatcataatcttaaaatctaggatgtttgtaaattttctttacttgttaagctaaacattataaaaaaaagaactactttagagattgtgctgaatgggagcagatgcccctccctaccccaccagctgtacttctacctgtgcttccaccattagagtatccacctgctgggtttgtttgctgatgtatccctaacacctagaacagaacctggcacatagtagacactcagtaaacatttactgagtgagaggttgaatggatcagattttgacctgtgttgcctcctgccaggaccccatctgcactataatgcccacccaatgaccagcatctccagtgcatcaatttctttaggcccaacccatcatgtttacattctgaagagagtcagtagagagagttttgaagacacagtagagtgccctatacaattatcttcccagatttatctgcagtagatccatgagagttgatagtagacccatgcacattaatgcttgctgggggcagaaggggaggtgatatgatgcaagcaagtactttcaaccctaagtctgaaaagttgatgactacacaaaatcacttcaggtaactccaacagaaatatacacaacggaggttgggagaaatgagagatctggaggctggctaggtggaggaggcaacacctgaattagggatttaagctagaccttgaagaataggtcatgccatcacactaacaaactcacagggaggctcccaaattttgggaaagtgtcccccagagacttagacttttaaaccaaagcctaatgtttcacaaagtcttctgagacagaatgattagcaagcttgtaggacctttttgtaaagaggatgtatatggattcgtacagacacacatctacatgcagaacgtgccattctgtatttgatgcataaaaccaccttgtcccggtctcagggcaggaacagtgtcatacagatttttgtgtctccactgcttttgcatagcggctcttagagattaaacgctttttttccaaatattttataggttttttgacattaaaacgttagtctcatctgggtgcggtggcacacgccagtaatcccagtactttgggaggcagaggcaagaagatcgcttgagccctgaagttggagaccacagtgagctatgatcacaccactgcactcctgtgacagcctgggtgacaccgcaagaccctgtcttaaaaaaaaaaaaagttagacttatgttcttttctaagcaataaaattagtcttagatattgcctaatatctaagactaccaatttttgtgtagaatgtaatacaagctaaaaaatacattcgaaagactttctgtcccccaatttataaatcctggttagtttagctaagtctgcagttgtgctgggatcagcaatccctccttaaatgcaggagtattgtgagtgtgatgagggactaccccaaatcaaaataattttaaaagcaaaccttagcttgctaattggttccactttcttccttgttccttttcctttaccaagatggccgctgtgtcgttcgctcctcattggtcggattttccgcaggtgccgattctagccccacctactagctctccgttccaagtcctaaatcactgggaatgtaatagacagacgaacgggagtgggcggagcgggcgccggatgtgacgtttccggaacctccgggtgtcatccgcggggaaaggtggggaagggtcccgggaacgtggtggggcagggcctccgagcgtggttggactttgaaggggatcggccgccgtgagtgtggggcctgcagcctactctccccgagtcccctgcccggcctgcctcgctcgaggcacccgacggcttctgtctccgcgggctggcgcctgaccagccaggcccagcggttccccgcctactgcatttgaaagatcccgaaaaccctggatgattgtgcctggggttggcaagttcgtcttgagtgccttcaagaagggttcctcaagcagttgtcgatagagccctccctactgtatacgccccctccgctcattcctgctacttcctttctcctcctcgtatttccccctcggtcctttacgccgcctttccccctcatttgcagatgctgcatcccctttttggaattgctcaaccaggtggtaaccggcgccgcttcctggccttgggaggtggttcctttcttaacccacaagaacctctcccaagaggtactgagatgcaacaagcatcctctgtttcagttaactttcatgggccgtggactaggtttactaattacttggggaggttttagatatgcttgcggctttctgagtccctaaggaggcctcgtgagagatggactatctctgcatccctagtagtcctcacggcttttgtgctattagtgagggtgttttagaggggaaggtttgtggaggaattgtgacccgaatattgaagagacctaaagatggaattggctgagagaagactacccctgagggaagagttgtagtagaaaagaaaaactggatagataaatgaaactgaaatgtgaggatgcctgggcggattggaatcctgactgaagcaaaagatctctgttggggagggccagttgccacagggccttgaattccaagatttattctactgtagtttgtgtattctagagcatactgattagggtttgctgtaatgcaatgtgtgtcaaatgcccagttttattttggagatgatagtggtgatatctggttggaatttggaatctgattctaacagcaactatatctagaaagactagaattactggagttttgggacaccaggggtttttgcaatgcaagttaccatcgtgcctttttgttattcagtgtttagtctatgaagatgagtaaatggttgttttcaagatttaagtctcttgccatgataatgatgaatgaatgattttatagattgactatagtggtttagtgagcagagttacaattatgagcattaattcccagaccagttcccctaactcaccttgtgctcaaatatgaaaaaggataccacagaaaatgtcagttactctcagattaagtaaaaatggtcaaccttgaagttagttaacaatcctcaagaaagttcactgagtgcactc

SEQ ID NO: 8593 - DNA, 6000 bp, Homo sapiens; identical to SEQ ID NO: 885

SEQ ID NO: 8594 - DNA, 6000 bp, Homo sapiens; identical to SEQ ID NO: 2081

SEQ ID NO: 8595 - DNA, 6000 bp, Homo sapiens
aaggccagtgggcttcccgcccagctgatcatttggtattaccacatgcacagacacgggagagtgcctttcttctaacctcatttagaagtttgtccatttggattgtattttggtacttggttaccctaaaaggcaagaaggaagctcggctgaatgtttcagggcagctatcctctctcccggggtcttcagttggcctgggagcctcctacccggccctgctagtaggggttcccttctacatccccactcccaccccgacctccaaagcctgtttgacaattagagctgagggatccagaacatccacggaccccgagcccccctcccctccccctggagagcagagttggcctctagcagcaacaggactgaagcagagcagactcgggttgctttttcatgttttcattacggctttccataggggagacactcgatcatgacagtgtctttgcccagtggttctcaaacttgagcccgcatcagaatcactggtgggcttatgaaaatgcagagggctgaatgtctgattcagtaagtcctggttggcgacctgagaatctgcatttctaataagtgtccaggtgatgctgacaccagtgctaggggaccacactttgagaaccctttccttaggagacgtgtccagggccaagcctgtgggggagctatctcaggacaagggccttttgagatggtgccttcacatctcctgagggtcttgtgaatatttggctgaaggccttgtgaatatgtggctgattctgattctcttggtctgaatttttcataaatggtgtttgtgctgccggtccatggaccacactttgagtagaaaggatttagaaagtctgggaagaggtcttcttatttgggggcaaggaagaagttagtgtaaagttttggatggatcctaaattttctagagctaatattcatgagaatgttttcttaaatgtctgtggtaggcagaattctaagatgactctggctgatccatgcccttgtataattccctccttgtgggatgtgtgaatagatggaacatcactaccatgattaagttactttatgtgacaagggtgaaggaattctgtggaagtaatttaggttctcaatcagttgacttgaagttaataaaaaaggtcacatgctgggtgggcctgacatagtcaggtgagctatttaaaagattacatgtgctgggtgggcctgacataaccaggtgagctgtttaaaagaggatcaggaggtcagtgtcaagtggtcagagacttaaagcagcagcagatgttgttttttttccattggccttgaagaaacaaactgccctggtgtagagaggacctcagggcaggaaacatgggtggcatgtaggagccgagagtggccttatccaggaagaaattgggggctcagtcctgcagtcataatagccctgtgggcttggaacaggaacctgtgctccaggaaggagcacagcccaaacgataccttgatttcagtctggtgggaccctgagcagagacatctcacctacagcaatgtgagctaaccaatgcggttgtttttaagtggctgagtctgtgctggtgtgttacacggcaatagaaaatgaatacaaggtcctgatacttcactttgattgtggtgcctgccctccaaggtgtactgtggcaatgacctcagtagcttcatacaacatgagctgatttcttgctcatgctacagcatcgtcatgggttaactgcgttggactatgacgactcatcagagccactcggggacccaggtcattgtcaaaacagaatttacggagaccagcagtgggacgcccattgttttgacacaagtgccggagggtggagattattcctatttatcagaagcagaagcaggcatagcaggagcaagtgagtggattgatggatgcaggaggacctcagcctgctgcccagatggcttgactgtgccgtgctggcagcatggatgaacaagggctcagcctgcaccatgcaggagagagctggcaagagagcaccagctgtgaaatgcacaggcctggaatcggcacttgtttttctcagtcacgtgccccgcccgacttcaagggttcagagaagtgaatattggtgaacatgagtgtacccaccatgtagggttacccagttagctcatttggggtgggagggagggacgcaggatttcagctcaccaagcttcacagagctgctcccgccaccaaggagcgagctggccaggcatctgacagctgagaggagctggaggggctaagaatgcaaatggaacacttgcccacagacccagggcaagccagaggtttcctctggggctttttgggtctggtctgtggaaacccagcaaatctgggctatcttcaagttgaagatcaggttttcttttgctgagggtgagagattttcccacacagtagagataaaaatccctgggtgttttcagtgttttttttttttttttttttgggggggagaatggctgacttcttgttacttggacaccctggacacagggcttgggacaattgccacccttggtgcccctcagaggacaaggtgggcacattttccagagagtggaagatgatctttcaaagcatacaaagaaaatcccatctgttttgacatcttaaaaactttggaagaaaatatttccaaaacatacatatgtatatatagtagtgagtatatatatatgtgtatatatatactgattatatgtattatatactcagacccagtatatacacatatataatatatactgctataatatatatactcactacaaattgacgccaaaaagatacctttaaagctttgccaggaggaatctcatttggctctaaaggccctttcccactagggcaggggaattaagcctgctgctacatgtattgctgtctgagtcggctcaaatctacctctcttgctttcattttgtttcttttggggagatgttcactcttccagtttctcaccagcaccttcttctagccaggaagaagcctgagaagagggggacattgtgtccccagggagtggtgggcagctgatccacacgtgctgacctggggtaggcactggcttctgtggagatgtccctggaccttcctggtcatgaggtgtcctgtggaatctactgctggcgtctgtgactgggaaaacccgaggtctggtgcctcagttgtcagagccagtgctccatccgaggtcaccccgctgtgcctctccctggctccacaggttctctgcatcttggccatgaccttgtttcttctgtggcttagactgtccaggtgatactcaaaatgtttagcaaccagcagggcatgagtaccagcccatcagaaaagatgctacagcacctgttgctgcacctgaagagctccgaggagcaccaggaaagccaagggagcagaaggtggagagctcagggccttggggaagtggttatctaccaagaggtggggcagtcttcccccacttggcctcactgctccttactcactgaatatcctgaagctgtggctacaggtcatcttgtctttcatcatggcagccccatctcagcccagatctcagtttaccttccattctctcctgggagtgcaggggaaggtctgaatctctcccatcagtgaagcacccctttacctaacagccacaccattatttccattcttctttagtgccccttacttcaccaaggtgggattcctccagagatgcaacttggaagcagagcaaaaattcttctgcatccagccctctctcttttacctcttgtccctttgccttcaggtttcaaacccagaataagaagcaggactgcctgcctgattcctcttgtaccttccctcctttagccctggagcccaaagggtctttttcttctactgacacttcctaccaggaaggaacttcccctgcatcatattcacttcctttcctctttctgaggaggcctttgctctctccctttcctggggctgtagtggcagaagaatccagaatatcaaggaggaaaacacattgggaggtaattgcaatattaccttcattgcgtctgtgttgcatgtactgtcccatcctagagaaagaggagtttgaacaaaatttaaactgttctttgtgattcaaggaaatcattaggagcatcaattgttttgtgctttaatgtcctgatatactcagtagggcacagtaacatggaagggactgctggtgtctgcgcttaaaatcccgaaatggctgtgtgctttggttctcgcacctgccttaatggttttcctgtctcctctgttactgggcaatcagctgccgcttttttcagtgtgtgttttcttctcctagccttctccctctttccaatttgccatctggaatctgcttttgattgagcattctgttcacctgttgttgcatgaaaaactatcccaaaacttagtggcttaaaaatgacaactattttatgataactcctagtttctgtatgtcacgaatttgagggctcaactaggtgattcttctgctccatgtgtctgattgagttcaaacagtggtgctcagctggtgaatggactcatctggagggtccacgatggcttcacttacatggctggtgcctttgcagggttcctgggaggctgagcatagctaggattgtcaaccaatgccctacatgtggcctccctagcaaggtggtctcagggcagttggactgtcttcgtggtggctgactttccaaggaagccaggcagaagcaagcaccccttggaaaccaggtggaggctgcatggatttttctgatctagctcaagagttcacacagcatcacttctgctgcattgtattggttacaccaagttacaggccagcccacattcaagggaggtgagttagactccacctcttggtggcagagtggcacagtcacattctagaagaccatgtgggatgggagatactgttgtggtcacctctggaaaatacattctgctactcttaaaaactagtgacgctcatacaaatcaacagaaagagcttctgaaggaagactttaaagctgcttctgtgagtgaaatatgctacatgcctttgtaccaggatctgattggctgtctttcccctactcagatcttcctgtccttgtttcttctgtctttgtcttattttagatgggcaggttttctggatgactgattactcaaatattttaggtgtttcccacactcagattataagacagaaagcaaaatttgttttaagggtgtatgtctgttaacaaccaaccgctgctctaatgccagagcttccagttactaattaactttatccagcaggtagcccagcagagctggaagtccagttcccaggagacctcagaagtcccgagttgtggctctgccgttggtggccatggggacttcggcaagagagttgactgagttcagtggttgtctgctatgactcgatgctttagaaactgaagctgtatctaggactgaggaggcctaagctcaaatccagattgacttagagttccagggttttagacctgcaagagacctgggaggtctcaccagcccaacctctgtattttagaggtgaagaaactgtgactcagagattgagcaaatgactatgtgtttgcctaagatcacatagttagttaatggtagagtgaagacaggaacccagttccaacctccagctccatatgctgtcactgagataaaaaccttagaattcctggcagccttgaagatgtatacgtgtgtatgcatctgtatgtatttagaattgtgtgtttatatgttaagcacgcaacatttatattgtgtattttataaagtaaatatttatagaacacttatatgttctataatatggatctatgaatttaggcttatggattccattaggtaaagttgtacatatttttagtatagta

SEQ ID NO: 8596 - DNA, 6000 bp, Homo sapiens
acgggtaacaggaagacatcataattatgggcttggtttcagtactgtaacacattccccgtacatgtttccaccgattttcagtagaacacatgggctgtgacatttcatgagctaaagaacctgctttagcccttgttttttcaggactcattcatggtcacttctcagttatggcaaataagttggagcctaattttctaagtatctctccattacatcagatctacacatatgcacatattggttaatatttgggatgaggggctgtattaaatgatgctgtaaatgcatttactcattactccatgggaaggtagaagagtgtgttgctatcaggtggaaatgtagaaagtgcagtgaggattttcttgtaaatctcagatttggggcttggctatgtcaggtccctggaagaaggaggagtcatttactgccgtctgttctctcctcttgggcctctgtagagatttggccctatgccttggcgggctctgctctgcagcttggccagacacatccctcagcatggcaagaagtgtggaaggtcaagaggatgtgcccacttggcctaatcctaacccaccagcacccctgttcttaaccatgtccctcatgtacctgggatccctgaattccctccccaaacaccctggaccctaattccagggcctgtgtggtcattcccatggactcaactgcctggttcatagactggccagggctgtacagagggggatagacacaggtggacttcgacacctacctgtgtgcatgctcagggccccttccaatatggaagggagctggggagaggctagagacagaggaatggagattaatgtagctagacacagcaggagccatgcggtgggactgctccgtgcaggtctcatggtgaggacagcgcagcctatgttttgacagacatggaataccaggtgccaggatgagcttcccccagctctgggcacctctgctgccgctgtccccagaagtggacctccagcaggttctgatactatctggggtgcgcctgctgtgtgccaccttgcctgtgcctagcttctatcctagaaggcagggctcacaatgtgggggaattcctcaggaataagaatggaattcctcaacattgtggaggaacgttgtgggaaattcctcaagaaaaagaagctgtttaataaatgcactgtggctacacagcaggaaaaatgcctccttcccctgcactgggccctaggccttgaggaagaaacctgggttcctgtgacagcccctctctccccagctgtcacttttcccgtgcgtgcactgggtatgaaattccttgtagagggacaggaaggtgctgttggatgaggtcagtatttcctggaaggggggcttctgttgggggccaatatgctcattgttaattcttgtacttaatttctacttttgtaatttgtttcacattacagtttctcattctgggactagtaggaaattactttatgcctcaaatatgcattttcattttgtctttaatcaacaagtaactttgtgtgtgtgttgcacgtgctgctgtagtcacgttgtgatacgccagtgttaccaaatacgtcatgatcaccaaacagcgatgggggctgtatttgggaagatcttcacaattgcaagcttttggatgtgattgtcacataaagccgtggtgtgctgcagtgaatggacaaggcctccggaagtggggatgaccagcctaggccttgggtcaccctaggatctggctgactccctgggtctggacatcagcatctcagcactgcccgctgtctttcctggaagctgctatggagaggatgttagccagtccaggggtttcacacataacatagatatccttgcttgaaggctgaacagggggaaccgtatgctatggcttattaatgtattgagtaagttaatccttttctctttcttgttttattttatgtggaaaattcaatctgaaaaataacagtggcatacacacatctgtgactttttaatgttactggtattttctaaaggtacgttttgaatcttactataagtcatttaaaagaattacaatggactttgattaactagttctgaataagagaggtttctttacctagtatgccttctggcagtaacatttcttagtctctagtcctattcctgtagttccctctcctcagggtcatccccacccctcaactctttcgacagccatctgggtgtgaactctttatctaactccttgtgtaggattctaccctctcttatatgattccggccatctccagaccccagtgacggttcccttgcaatcctattctctgacctacacccagtacccttattccatcctttctcttctttgattctaggttgggttttcatccccgtgtgtctcatgcaaaaatggtgggtaggtaggtaggtggattccttccctccctccctctctccctccttcctttcttccacaagtatttattgagctgttacaacagacatgcaagatgtgtaggatgggcctcctcatgggtgtgggagaggggagggtctgctctgcactgctttcttccctggcccaggtagggaaggccaacaactagggagctacccaatgttaccagagccagggggcccagagccagcagttcaaggcacctcggtgcattgcaccagggagagcctgtgtcactcgtcatgcctggctttggaggagcagatgtctgcaagggcgctgtgggaagcttctgatcagaatcagctctgagatggtcagaaatctcagaagcttccaggctaggattggaagaattgacttccagacccaggaggtgccatagaggtgcatggaggtggaatggcacggtgcttataaacggcaaggtagggagccagcgctggacacagagccagctgaacagtgaaggcagaagagtagggggcgctgaccctcatcccaggggtcaggcagaaggggccgatgggatgggtcaggtgctgcagagatgttcagtgggctggagacagaggggtcttggcatggagaacctaggagggatagtggcctgggcagtgcatctcagaggagcagtgagcttagagggcacatggtggtcgcttcagcaatggatgagtggtggagacagtaagtatataaattcttaagtgaagtttctggggcagaaaaggagggaaaatgaggccattagaagagtgtgggggccaggtgcagtggctcatgcctgtaatcccagcactttgggaggctgaggtgggtggatcacgaggtcaggagatcgagaccatcctggctaacacggtgaaaccccgtctctactaaaaatacaaaaaattagccgggcgtggtggcaggcacctgtagtcccagctactcaggaggctgaggcaggagaatggcctggatgcgggaggcagagcttgcagtgagcctagatcgcaccactgcactccagcctgggggacagagcaagactccgtctcaaaaaaaaaaaaaaaaaaaaaaaaaaaaaaaaaaaaagaagagtgtggggagtcaccttctctgcaagaagcttcctgggcctcccaaataaatccatccctcccctccccctccccctctcccattccatacattttggtgccattcactatataattcccagcagctgctttcatatctggggcatactcacaggggtcagtcaggagggcactgtcctaggactgggagcgggaggatgtgggggtctcccctttgagtttctgctatgatgtgattccaattgatgggccaacacacctctgataccttgtgttatgctgtgtactgcctcaaagtgaataatagcttgggatttagtttgtgtagtctaaggaaaatactttgtgttgaactagtcaggctgtgttattgatggccattaaaaggccttgtgcttaggtcttacaagcttttcaaaggcccaaagaaatgattcagacaaaaaaaaaaattagactccaaaatactaaaagaaaactgcaaaaacaggtgaattaatggtgaaagatctgtaggacatagcagtaaggctaccacaacccagctttttgaggttgtcttaaattaatgtgatatggggtgtaggtatgttaacatgcttgataatggaagagtgaggatacctgcttcttaaacagggcctgctcatttttttctggcctctagtacatttctttctggcaaaactcaagctctgttttcacggagatgatgcactgagccatggcatccctaggtggtttgattcatttctgcaccccggtgtctagcaaagtgccacgtgcatgtgtttaatcaaaatagcttgtggttgtcaagctctttgtattcttccctccctccctgtgatttgatttcctgaaagtatcctttccccaaggattatggaacatacacttgttaaacactggacccattttcatgatcatttaaatgtcatgacctttctgacaccttgatatggtttggctctgtgtccccacccaaatctcatctaaattataatccccatgtgtccagggagggatctggtgggaggtgattagatcatgggggcagtttttcctatgctgttctcatgatagtgagtgaattctcatgagatctgatggtttaaaagtgtttggcacttccccccttgctctctctcctgctgtcatgtaagacgtgcctacttccacttccaccatgattgtaagtttcctgaggcttccccagccatgcggagctgtaagtcaattaaatcctctttcctttataaattacccagtctcagatatttctttatagcagcgtgaaaatagactaatacatgcctcttgagatcctcacagcaattggtgcctttagacctcttcattcacacttcactcatgtgttcttccttccccaggtagacgcaccctctgaagatggtgactccctcctgagaagctggaccccttggtaaaagacaaggccttctccaaggtaacagggctgagtcaccccagggtcccaaggccggccttttctcacaaatagctgaactcctccactctcagatccaggggccctggactatctcccattgtatgcaaaaatattttatttccgttgacacattactctttggggcagcttgatggttttattaaattttggaaggaggcttcagccccagtaacagccaatgcctgtttgctttcccaggtcaccttgactgtgctacagtagagacctgggaaatgatgggttccagtgctgtggccaagctctccccagtttcaaccccttccaggccttgctgtccatttttactccactgtcaccacatgttcaaattcttgctttctgctcgagtcagtactgctcacctcgttccaagagatctgggtctatgacactgtgggtgacaccctctgagcatcttttccgagctgtctgtgggtacctgaacctgccccccaacctggcccttgccctacctgccccgacctcagcgagtctggcccagtctgtccctgcttctcccctctggccccaagtgttctcaaatatgcccccgcctgcctgtctgtcactgcagctggcccagccctcatcctctctcccatgaacctctgtggtggcctgctctccctggctcccctgtctccagtttatgttccacacaggtgccaaaatgtctgcaaaaaatggagatttaacatacactagcccttggcttaaaacctgtacatgcttctctgccacctgcaaatgacagtcccatttcctcagcaaacctctgcatgttgtgggaacttatggcttctcagcctcccactcggaacccacctctggtttatgctccagaacatgatgttgttggaccctcccctccacctcctccaggctgagttagcctctgtctcccctcctgccctgggcatggctcttccagtagacac

SEQ ID NO: 8597 - DNA, 6000 bp, Homo sapiens
gaactttggaataggagtaagggggaagagtgaaacacactagctttcatgccttgtttaatttctaatttcttaaagagtggacaagaaagagaatgaattcagcaaagtctttgatccctacagttcatattcagacaaataggagccaattattaaggctaactgcctcagtaaaataaaaaacagccaatttaacttctgaacacaggaaggttttttacccattatggaatcatgaaagatctgaatgcacatgatatggtgtaaccataaaataaggttgagtttttgcttcctgttaaatctcatgagaacaagcattctgagtgaggggtgcggtaaagacacacagggctagtcttaaaagaaggtaaagtttctggctatgtattaggcttgattagaattttctggttaaaacgaattctccttcagttttgtttctttcatagatgctggaattcctataaaagccattcagacatttatatttatgacttttctactttttaaaaaactatactcctcgagagaataaaggagtaggttttactagacaccatatttaatgggttaaagcaaccaagtaagaagagggaatgttctagaagtgagggaaaggggattcatgcagacatgaaagtgaagcaaaggtaaatgtgacagagaaaaatgaatttgccatctctttctttctttctctctttcttccttccttccttccttccttcctccctccctccctccctccctccccctctctctctctctctctctttctttctttctttctttctttctttctttctttctttctttctttctttctttctttctttctctctttctttctctcttctttccttctttcttttttttagccacagtttcgctgttgtcgcccaggctggagtgcaatggcaggatcttggctcactgcgacctctgcctcccaggttcaagtgattcttctgcctcagtctcctgagtagctgggataacaggcatctgccaccacgcccggctcatttttgtatttttagtaaagacgggatttcaccatcttggtcaggctggtcttgaactcctgacctcaggttatccacccacctcggcctcccaaagtgctggcattgcaggcatgagccaccatgcctggactatctgccttctttctaaaagagataaagctttctagctgcctagtaccttggtgaatttgggctgaggccattcagcgacaagcactggaaagaattgaagtgctcccaagtacctctgcaagggaagaggggtgatgagcaggggagaggagaggaggaagaggacctggtggatggtaggaggccatcaggtcttccatgtgatgtgcgaatctttagctaggtacaccgtattttagaaatgtttggtgtaaatggatttcttttgcaaactggagaggggactgagttttgggctgatgctgagtggaacagagatgggactcctggagcttgagacacaggatcttggagaaaatgagccccagaaatcagcagatgtcatgaggggactctgggttatcataagctgtggaattggtatcggatctgaacttgtttcttcaaagtgcaaggaagaccagctaatctcttggttttgccaatttagggcaattttcaacattacgaaaattcatttagtttgggtgcagagctcagatgtcctctccatgtggacacaaccctacatgtgcacacacaaacaagcacttgagcacacatgtgtgtgcacaaaccccacttttctgcttttccaggagcaccgtatgttatttcagacaaataagtttggccaactttgatctttccattcaggtcactgattgctgaattgccacagatgttgttctgccctccttaggttctagggcattttcattaaggagagttacctccaagaggggtcatggcaggcgagcaaaccatacttggggtgcaccattaaagacctccacccctggggagcgatcctcacagcggagcaggacttggccccttacaagtttgcctagtctctccctgacaggtgggtacagcagcaggagtctgaattccacattttgcagagccctggcatagacggatcattcaagagaaacttccttaagctgcccacggctgctcaggtcctcatgtctgcattcagatgtggccttctttattactaactcaggaggaccttgatggatgttagtctccctggatttgaaaactatttatgggagcactgaaaatggcattattcgttttgatggcaatcaagtacataaatgccaatgatagagactgaaggataagttccacagcggatgtggttcaagtttctaaatactgctgccatgattctcatgtgatgtgaaggatattaagagatctagaactaggatagaactgtagctcaaccatgctagaaaaaaatttttttaagttccactctatttaaaaatatttgtgtagagacaaaatctcactgtgttgcccaggctggtctcaaactcctggcctcaagtgatcctcctgctttggcctcccaaagtgccagaagccactgtgccaggccaaaaagttatactcctgagtaaagactactttatagtctcttgataacctaccataatttaaagaatattctgattgctgtaaatttctgtataatttaaatcttaaggccgggggcagtggctcatgcctgtaatcctggcattttggggagccaaggagggaggatcttctgaggtcaggagttcgagaccagcctgaccaaaatggagaaactccatctctactaaaaatacaaaattagctggatgtggtggcaggtgcctgtaatcccagctactaaggaggctgaggcaggagaatcacttgaacccgggaggtggaggttgtggtgagctgagattgtgccattgcactccagcctgggcaacaagagtgaaactccatctcaaaaaaaaaaccaaaaaatcttaaatttgcagatttgtaaaatcctacatccctgtccccacctctcttttcccatgatctttagtttagttcctcaaggtcaggaatgagtctcatcttctcttgcacctctcacagtgcctgacacaatattggggacattgataagtattgttttgtgtattacttaggcatattttctgtggttctctagcagtggagaataaatgattgatgatcttatgaagtcatagtccacctaaagactgcgtagtacgcaaatgagtctaccattatctcctcgatgtagattttcatcttttatgtatggtgactctaggtaaggagaagaggtgatctagctcacttggtgggacgagcgtcttgacacaaatccacaaaaaaaggagagtacacacagctgttcatttgtctgtgtgttgaggtgggggtgggggaggtgaggttgtattcacacagagaagacatcttagctctgcacccaaaccaaaacgagcgtcagtgatgttaaagattgaaggtcaggtgctacccaggttttgttagtctcttgacataaacatggtgtctagatatggtacatattatgaatcattccatcttttcaaatacattttgaagggtttttttgtttgtttgtttgtttttgagacagagtttcgctgtgtcaccaaggctggagcaccgtggtgcagtcttggctcactgcaacctttgactcccgggttcaagcaattctcgtgcctcagcctcctgagtagcttggattagaggtgtgcaccatcacacgcagcaaatttttgtattttagtagagacggggtttcaccatgttggccaggatgttgggattacaggcgtgagctaccatgccctgccagaaggtttgtttttattttaaacacaattgtgctgggtgtgataggatgggtatatgatagagcagaaaatcactagtatttcatcaatatggatagcatcctccataggttactgatttaatattgacaacaatacccttcacacgagagagaggttagagaatttgcccaaagtcaagcagctgggaagaggaaaactaggctgtgctctccctaaatctcatgctctattatattagggaagactctggcagatggcacatcctgattatttgaaagtcaccaatatttttagaaattgcatagataattaaggttagtttatccagaattctaataattgcagcacatgtccataaatctctattacaaccacctgagataggccatctcgggcatgtggaaaaagcccaggtatagacactttggatcctggatttcccttgtactggctgctaccttgggtaaggtaattctcctctctgaagctcctgtcagcttctgaggattgcgtgggatagcacataccaaattactgcacacagagcctggtgtacacttaagcacacgagatgtgtcaaagttttcaaaaacattgccaacgaggcatcagttacaaaacttgctgcagagtgagctgatattgtgccactgcactccagcctgggtgacacagtgaggctttgcctcaaaaaaaaaaaaaaaaaaaaaagaaagaaacaccaaataagcaacttgctgcagaaatgggtactcttgttctagaaatgtgactatagggaagttacaactaccaactcgcgttaagggaaatgagtgacctgccacctacatggtgttagggaggttttgctgagaaagtcactcatgaagaaggcaaaatatagttaagacaaaatgtaactatctatagagataaggtaaaaattggaaatagaacttcattaaagatctttcaaatagggagaatgtggtgaaaactgcagttaacatttgttaacagtgtgatcatcgggttcagcttatcagtaacctggttcctgtctcttaactgataaagaaaatgggaggtttttaaagagaggctggctgttgtatttagtaaagctataaagctgtaagagaaattggctttctgagttgtgaaactgtgggcagaaagttgaggaagaaagaactcaagtacaacccaatgagggtaagtggctttggggtatttttcaaaaatacttttatctcaaagggaacaaaattttcacatacgaatttaggtcattataacaataatattcattgttatattattataacattatatgttataataatatataatatatataatatataattgttataacattataacaattatatattatatataatacaattatataatatatattatataattgtaatatataatataattatataatatatattatataatataatatataatatatcatatatgttatatattttattatataatatatattatatataatattatatataatatatattatatataatattatatataatatatattatatataatatatttatatatattatatataatatatattatatattaaatattatatatataatatatataacattattgttataatgttataacattattatatattaaatataatatatataatattatatttatattgaggaaaacattcactcaatgacagagggaagacttagctttccaaacaatcttctgttaaaagaaaaactttagctgaattaaatttaaaggagtttaattgtgttttggtgccttatgcaaatgaagggcctataatataatatataatgtaatatatataacattataacaataataatcattgttatcaattttgcttgtgagaaaagtagtattaccaatgggaaaatcatggtacagattgatgaaatcccttgaaatcttgtttgtgtaatatgggactttggtccaacgtgttggaaaagacctggttgagggtaagaaaggatgggagctttatagtatacacacagagtgctcatattctggagttattctttctgaaatccacaaaa

SEQ ID NO: 8598 - DNA, 6000 bp, Homo sapiens; identical to SEQ ID NO: 896

SEQ ID NO: 8599 - DNA, 6000 bp, Homo sapiens
gaagactgatctcctagaaatgtccttttttattccaacagggtttgatgcagctcaaaatacaggctgtaaaagcaacagagttaataaaaaggagggggaaagaaggaggaagtaaatgtgttaagtgcaaataagagttggcacctagggcaatcatacttgcctcagtacttgctggcatcctgggaaaaggcacttacaatcttgaaatttgttaggttcttcgcagctttaactgccgcttccttctctgtgcctccgtttctctgtctataaagtaaggggaaaatacctcatctgagatttattgagagcatcacctgagataatccatgcagagcacctgaaatagtacctggcacacagtaagcattcaactgcatcacagatattattattattattattttgagatggagttttgctcttgttgcccaggctggagtgcaatggcacgatcttggctcaccgcaatctccgcctcccgggttcaagtgattctcctgcctcagcctcccaagtagctgggattacagccatgcaccaccgtgcccaactaatttttgtatttttagtagagacagggtttctccatgttgataggctggtctcgaactcccgtcctcaggtgatccacccgccttggcctcccaaaatgctgggattacaagcttgagccaccatgtccagctacaggtattattattacctcattcatctggggatggggagggcattggtgggtggagaggagctggttctcctttactccaaggctcctaccttctcttccctggatgttctcgcccctgctcccatgcaagtcctcacagacggcctctgaagccgcctttgttcctggtctggttccacaacgttcccatgcccacttgagctccctctactccaagtagactatttccaggatgagtacttcaagtacatcgaacagtgacctcaaatgcatttccttgactgtgcctctctgaactaaaaagtgcagaaatgtcattgcttccttcttttgtctggtcttccacagggctaggttgggatccggggggagagtagctttcctagctctcagcagctcaactccaccgaattagtgaacgatggacatgtccccaagaggactctaaacccacagtccccaacatggtgttctgcagcatgccacaggtcatcttgttctgtcctctctgagggtgaggttggagagggaccctaggctcacaggctcagtgacagtgactcaccaaagatcctgtgggcagtcagggtctgggccaggccagtgagcccattcatatggcatgagccacaacactgttcctcttcctccggcagcagcccgttttgcgtgtcccctcactatgagccgtgggagaaatttgaaagggcttggatcagagggcagggagaagagggtggtcctgacatctgacacatacttcattttaaacatgggctatgtatgacaggccttcagctagttattgaacaaagagaataagagcccttttacaagggctttacatatattcattcatttggtcctcacaacagcactgtgagttagaagtctcaatctcacccctttacagatcaggaaactgaggcagataatttatttgcctatggtcacaggactagtgagtgacagagcaggtggtttggtcttacagtctatgtgtttaaccactacaccaaaccacctccctaagatgctagagggggtttgtgccaatgcctggattctaagagattagattctctttaggatctctgacctgtttcctcagcattcagagataaggccagaaacaatgccatttgtgcacgaactgacaactgacggtcctcctacctcctatttctatttaaaaggcactgtaacttctttccacaggcagatccctacctctcctcccttaggggaggacgaaggtgtcccagccaaggaagatcctggtctccaagggctgtaccctactgatccggaggcaaagcagtgagggcccaccccaattcctcacctcccattctactcttcggcagaagcatctcagtgttggaaagataaggatttcttcctaaaaaggaaggattacactatatcagagtctgaagatacagttttcatttgcaacgcaagggaattcctttgaatctctaccttatgatttccctgcaaacccactccgatggggctggagagtgctctctcactcagatgaatctctcaggggttgtccagcaggtgtttgccaacttgaagagctacctactatcacagacctataaaagtacgcctgtggacagactgaaaacaaacaaacaaaacacacacacaaacacacaaaacaaccgcacactgggagaagttctaggcaatttccttgcaaataactgctttgaaaattactgttttaaattggcagaacactaaggactttgaacagatcatcccttttactcaatgttttcataaccttgaagtgaaggtggagggagcagtacgttttaaggtgccaggattacactacggggtcagtgctcccggatatgaactttctttttcagaccgaccttgggacctacagctttgtaagttactcatacaactccatcaaatgttacaggtaggtcagaggacattcaggttgtttaagcctctataaatgactcaggcagcaacaatttacaacgtctttgtttctgctatgcagtgccctcctgctagagatggcaaaaatgtggggagggcttcagagcattctaagcctggtatttctggctggaatttttaaatctcactacaatcctgacaagagaccacgaccttaatctcccacggcatgactggttagtcttgatcgtaagccatataatcaacacccaaatgtgcataacacatctaaataatgtcaaaactacactatataccacgcaggggaccagaaatcaatctttacctcaaaaggataagcttccaggatgcaataacatccccttccacccttttctacaccctaaaacagtaatattcacggtaacagcaaagcggaaatcagcttttcctgaacatgtactgaattctagtcacattcacacacgttaattcatttaattccagccacaaggtaggcagcctctgttaacattttacaattgtgagaacgcagagatctgggactggctcaaggtgacacactgcagcaaggagtcagaatttgaatccgaagcagtgtccttccccctcgcaacagctgcggcgttacaaacacaggtcagccacggagaaattaatgacccacagccatccttgcagctctgcgccataactggggagacaagctggttcccgtgactcttcagtctgttttcacccaagtgcatgactgcgggagcaaagcgaccacgtgagcatcccccccccacccccccgcttcccccaggcgagggacagtgccaggccaaggacaagtcacaggtgcaacaacgtgccagaactggatccggagccccagggcgcaagatctcccgcagcgtcacccggcagagggacgggtgtggccaccgggcgcggcaggtcctgcgtgcgctgaaagtgcggctggaggcgcggacggctttccggagccccgagagaggagctaggaatgactttggtcgcagcctctgtaaccccgcatgacggcctctagggggacagcgaggtccccctcgatctctggctgtaatcagccggcggggccagacggtgccgagactccagggcgaggccgcagggagggggctgtcccgccccacgtggaccggctccccgctgggggcgtggccgccgaagcgggccgggccaatgagcgccaccgtcgggctcacccggctgggcacgccgggccgaggagggctgcgtcatgccgggggcggggcttcggggccggcgcgaggcgcggcggggtcacgcgggtcgctgcgcgggctataagtaggggccggcggggtgctccgctggagtgatggctgccggcgctctctgcgtggttcttcttctcggccgctgaaacccccgcggctgcttcctgggaaggtcgtgagtcccgctgagctgtccccggtgccgccgacccgggccgtgtgcccgtggctccagccgctgtcgcctcgatctcctcgtctcccgctccgccctcccttttccctggtgagtagtggcgccgcctcgtaaaggctctttcttctccccggggccgggcgcggacgccgtggcgctggaggcggacgccgtgggcggcgcggctggcttctctcttcgccgctggccgcctccactccgcccgtctgcccgcccgcgggcctttttggcggtccccgggcggcgcgcgcgggaacggcccttttccgattttcgcgcggagggcgcgcgcgggctggcagcgcaggggctgggctgggcgcgcgcgggccgcggaggacccggagccacgtgcctctccttctcgcgcgtcctactggggatgggggtctggagtagccggcagaggctattgcgggaccccgggcgcgtgggtagagcggggtgccccactggccccccaggggcacgcagctattgttatttcccccctcccccgcaggatgaacttgcgtcctttctcttctccgccatggaattctgctccgtgcttttagccctcctgagccaaagaaaccccagacaacagatgcccatacgcagcgtatagcagtaactccccagctcggtttctgtgccgtagtttacagtatttaattttatataatatatattatttattatagcatttttgatacctcatattctgtttacacatcttgaaaggcgctcagtagttctcttactaaacaaccactactccagagaatggcaacgctgattaccagtactacagctgctaccgccgcttctggtcctttggtggactacctatggatgctcatcctgggcttcattattgcatttgtcttggcattctccgtgggagccaatgatgtagcaaattcttttggtacagctgtgggctcaggtgtagtgaccctgaagcaagcctgcatcctagctagcatctttgaaacagtgggctctgtcttactgggggccaaagtgagcgaaaccatccggaagggcttgattgacgtggagatgtacaactcgactcaagggctgctgatggccggctcagtcagtgctatgtttggtaagttctttttatgttttgtcctcttcgtggtgggtgagcaaatttgtatcatgggtggttccatttttgtgcataacctttccgattaacctttctgaatgtgccacttacataatggaattttgatatttacttaataaaactttactatgtttcaggttctgctgtgtggcaactcgtggcttcgtttttgaagctccctatttctggaacccattgtattgttggtgcaactattggtttctccctcgtggcaaaggggcaggagggtgtcaagtggtctgaactgataaaaattggtatgtttaattccaaacggcttcttaattttcgttttcgtcatatgttaccatggcattaggtatgggaggatgtgttctaacgtcgagggacagacccaagaattttgaactcttaaacatttaaagtggtttttggtttctgattttcattatttgatattttttcttaatgtgttctattccagtgatgtcttggttcgtgtccccactgctttctggaattatgtctggaattttattcttcctggttcgtgcattcatcctccataaggtaacctttctcccccgtatgaagacctttcatggagcacacccaatcgatttcaaacccagtggtacttttgcagatgtgattggtgtataggtatgcggccttggaaaattttaaaaagctctttgttctgtgcatttcttgtatgttgtggagttctctgaaagcgagtttttaa

SEQ ID NO: 8600 - DNA, 6000 bp, Homo sapiens
tgtgaggttttaaatatagcaaaaaaaaaaaaaaaaagagagatttgacaacactggacctcagtaggcatgggcaatttgttcaatatcttcaggtctccagagagcaagaatgactctcaggatattgcaactctgtctgcttccaccagagatcataattgggctatgaatttttataacaggaaagtcttcctgtcaaagacagagactgacaaaaactttagttaactgatactgaaagaaactcaaaacagaatgaatagtatacatgagtatcacttatatatatagtgcctttacttctttcttcttttttactttaaaagtaaattcctgttatagtttactggttagagcttctaaaatgtagcttgtttatgaggattgctcagcatactggttttctgtccagggacatgatgtgcattttggggaattcaaaacccgattgaggtgagtagaggtcattcataaatcgaaaccaaatgatagcagaagatatgaactaaagctatttctttatctgcaaagagctaattgggcatatttcaggccaagtctctgaagacacagctcgtgaactctgtcttcttgatgctgtgctcattatagacactcaacagaggactggctaatgctagggaaatccccatcaaggtggtctttacatgacactgcagatttacctcaggaaggggagcaaagagaaggaaaatgcagtgagggtttctagcaactagctgcttgtggagtactgtttgccttgtctaatttatctgaaactgaagagtttgtctctaaagggtatcctacttcagaaaatctcaagggacatttgtctttctgacatatcagctgttagctagaccttatttcttacttggttgtttttagagtaaattttggttctttggtcctttgtctgctatttgaggtggaggattaaatactgcatagatgacctatgtatgtatagaacaacctaattttgccacagataccaaaacactataacgataatcttcaattaatccaattattatctaaatttcataacccgtcctcaattatctaccttaatatttctaggtaaagagagatgtactgcattgacttcctgtttttaaagggtaaaacagcaagagaaagaaagacattgtagatattcacaatgttgtatgtgaggaagtttttgaatggcttcagaaacccaaatgaatatattgagaaagcagcattgtgagttctgtctacatgtgaacccaaaactaggatttgaggtaatccattttcagaaagaagtgatggagtttgaattctaggaaatcttcctgaataaaatggccatgtgttgtaaagtttagatatttataacccaaaatagaaggaattttgctaggtgatctctccagttccttttcagttatgagagtctgatttcttcccatgaaaagtgtagaaaaacttcctttactgttatatgaatgttataaaatgtatgcttgtccatgaattagctgatcaaagataatacatgaaaaagtattcaaaatactctgtgaatcttttttttaaaaaactctctttaaatagatttttgtattcagaagttatgctttgtaaatacattttaaatttcagatttaaacattatcaagacaaaattgtgactatgtgcatgtaaaactagagagcactggaaaatatggtggatggtaagggccttttgcaaggtaattaacttatctattgagttttttttttttaatttctaagtacttaattgactctcccactaaaatttaaacatatacaaataatttttcattcagaagataggcatttgatttataacatcaacatatcatcacaaaaacttagagaatgagaatatcttaatgggcacctggtctaaacattttaattttaccaggtaaaaaggtggaagtggcatggcatggtggctcatgtctgtaatcccagcactctgggaggccggggtgggcggataactaggtcaggagatcgagacaatgccggctaacacggtgaaaccccgtctccactaaaaatgcaaaaaattagcttggtgtggtggcgcgcgcctgtagtcccagctacttgggaggctgaggcaggagaatgtttctttaaaaataacatcattagaaaccatacaaaacagaactgcaaatactcccttctaaggtgtaaggtattccaacatttcttgtttggacgttagaattttttcttcagtaagaaattaagttgaaaatgaagtagaacatcttacactgtaattcaagtgcaatacattaaaaaaataaaaacagtgtttaaattgggaaaatccgtttacatgtgattaagttttaatcagtgcccttaacccagatctcaacagctaaaaatgttcttagcttgacaaaataacaacccatccccaaggacaaatacttaaatcaaagaagcattttataaataaaaaaattcacgcacacatacacacacagacccccacaatacatgaaacatataataatgtttgtctttatttgtaatgaagtggattttatactgaattcagaacacagatgcaaattcaacagttgaactcaatcaaataagtaatcttatataaaaggatatctccctccagcatgtacttatcctgtgtgacagatatctctgtaataaagtaaattccttcaactcaagcagattgtccgaaatggaaacacaatgaaaggatgaatatactcaaataatcaacagaagagcaaaatataaaaatgcgaacattttctgaataatgcagatgccctccctccaaaagaattacatgtgagggaatatctatattgtcataattactggataagctgcccaatagctattacactaatgtttcattaaaaatatatatttgctttatgcttttgcaacttgcaaagttattcctagcaaaaagttatttctcctgaaacagaataaataggtctttcacaatatgcactggaatacatatttttgaaaaacaagatctccactcacctctaattctatctttctgctggtgattactgatatatttattttaaaatacatactttataggaagtatcgttacaattaatatttaggacaacattataattcgtgttttagaaactactaaggcaagaggacagctcctaccattctacaaaagtctttcagttaagaagtgactaattaatggactgagtggctcagagcagggagccagtccttagccaataaagcccaactcactgccaccccactgccccatattctctgtcctctctgctggaactgtcttgtgctgaatacatgaacacctaaatattcaactcactcctgccatttctccggtaagcaatcttccacaacctgtgcctgagacttggaggctgtttgtggtccacaggctttaggcgccctagggaaagccacgtgcactagtgcatctggatgaactgtggactttgtctatccgcggtaattcaacttcctaagagctacattgactcattgatttgtatccaggctccgggctcccaattcccacacaacgtaagctccctgcagccaggggatttggtaggtttgccgtgttgtttagtttctctcccctgcgaccctctctctgagcctcacagtgtgtttggcacgtggtaggtgctcggtaaacctactttgaatgggagagggttgtgttgaagaaaggaaaggctgggaggacttaagatttgaaggttttcctacacgtgtccaggaagaaagaaaaagaaaaaagaaatgagtatcagagtcttatcatcattacagttcttatggtttttaaccgacctttaggagttccaccgacgtgacccaagcagctggtaggagaatctgggctggattcggaaggcgcagctacaggacgcccgctgccccggatcggaaggcgcagcacctcaggccacaatctcagacacgccctcgggtcccgacaggtgttgcccgcctcccacggggctccgggaccccggtccccgggctgccccctgccttctggggcgctggagcgcgcgcagtggcggagctggagccacccagtgcttcgcacgggcgcgctccgcttctccgggttttagcggaagcctgcggggggcggggtaaccgcggaagccggcggccgtgggcgcgcgggttgggggctctcgcgccgctccgggctctccccccccccggctgcggttgccgaagagaggccggagcgcggcgcccggctgctccacctggcgcgctgagcaccgcgcggggagcccccgggggcgggcggtggggggcgcggactgcgggaagaaggcacgaggcgtcgccgcagctcggtcaggggccggggccccgccgctcgccgctgcactaacttgccgcttggtctcgcctcgccgccgcggctcgctgcgctttgggtggcggggggcggggagagcggggagtcagagggtctgcggtggccgagggagggaccctacgacggggagcccgcccggtgccgctcttcttcccctccccgcccctccgctccccccaccccgtcccttccgccgattccgggagcgacgggcgcccgtgacctgcgaacgctgccaagtgacggtccccgagtctgaagcgcccgcgaggaagcgagcgccagcgcgggccgccggcgatgacggccgcgaagcaggagccgcagcccaccccgggggccagggcgagccaggcgcagccggcggaccaggtgagagtcggcagccgcggccaggccctcccgggaggggtggctccagtgcgcgctccgcccgcctcccgcttcccaggctgggctcccgcgcctccctcttctcaccctcccccgccccgccccagttccaggctctcctgcttctccacggactctgcgggaagttagagcctctgcgtgcgctccggggcccggcgagaggatgcgcaaggtggagagccgcggggaagggggcagagaggtaaaggctgaaggtgccccggggaaccccggcgggcggcccaccgagggagggagaggcggccgggaccaaggaatggggcctcttggttccccattaacgcacgctgaagaaatctgctgcgctcctgacggccgctcaccgggttcgagccccgtcctcctatagccggggcgctcgctggccaaagcgacccgagcaggcgaatgacctttaggcggacggggttttccctctgctttcttgtttcttttgaggagacgggtgtgtgtttgtgaggtggggatgggggaagagtgtcccagacatccgtagtctgctgagcggaacggagcttggggagcggcgaggcattaacgattaagtggagccgggaaggcgctggctttggtgatgtgttgggtttggatgtgtcgcgtctgcacagatgaggtgccctgcgtgggctgagggttattcctgtctctttcccgtccgtctacacccgccaacccctttttgttttggtctttagaaatctgtagcataaccgtaccgtcgtggatccccatctcgtctctgtccctgatctggggtgattgggacttcggtgtcgctctttttccaaagttggagggtcgggagcgccgagacaccctggcgaggaggaggaggaggaggagggaggctgcgctgagccgggtgcaggtgcgctcacgtttgcatcaattaggaactccgggcagagagagctgcacttaggtcagggattaactgtggacccgcgggacccaagcgctggggtaggaggactggggatctttgttcggagtgcgctgcgaaggctgctggaggcggacaccctcccagcttattgctagcgtgggatagagggagcgcacgcggctaggctccagcagcgactcggcttttcgcgtattctaagcactgaagagcctcttaaggggagctg

SEQ ID NO: 8601 - DNA, 6000 bp, Homo sapiens
caggtactcctacccccattctgtttttcactttcagtatagtactcattcagttacatgagatcttcaacacttgattataataggctttgtgttagttgattttcccagctgcagactaatgttagtgctctgagcagttgaaggtaggctatgctaagctatgatgttcggtaggttaggcgtattaaatgcattttgactatgatgttttcaacttatgatgggtttattgggaggtaaccccattgtaagttgaggagcatctctgttaacatgtcagaaggcatagacatttttgacggttttttgggatatgatttaaaaatgtaaacgttttcaaacataaaaaatagggatgatggtataatgaactatcatatgtccatcactggcttcagcagttaaccatatcatgtctaatcttttatctctacctcagcctcctttctctacctctggattagtttaagggacatcccagatttttaatcatttcatctgttaatattacattaaatctggatagcattttgccaagttgatcccagaatggtttaccaacttataatgccactagcagttactgatgcagtggtttatctgtgatcccataaagatggcctgttgtgctctaaaagttttgatagcttcagtaggtctcaagtggaatcatcgagttgctttagtttatatcaccttttatgaataattttcctttgcacatttttctgttgggatcccatgggatggagagttttaagccctagccttgccacatgagagccagcctctttctcagcttccagcccacagaatagggctgttgccgctgtttcttactgtatagagagcacagatattgcagacgtggttgtttagggcacttctggaaatgagtccatccttgcccttggctctcgtcagtagagtagaagtagcactctcacaggcagtactcggaatgcttgccgcccacataaggggctgagtcagtaggcattatggccagcctgcctcagagtggtgaccaggcagcccccagacttgcttgctgtggaagggtcaaatgggtttgtggtcgatacacagcagcttgtgttgacaaccagatgggtgctttgccacctccatgccatcctgtctgccagggtctcactgcctagagctagtccacaagaaccctcctagtcatgcacagagctggttaaggctctctcttcagtgtgattgggaccagtggttggtcagccaattgagaaagtacagagtactgtagacgtattgtaaacattgtgctgtgatttaacccgctagtgggtgttcgttcggctctcctataatgtggggttgaggtgtttgctttgagttggctcctttggttggagtcttctatttctgtcttgtagagaccatcctcatgacacgtcattgcactgcagtttccaggggtaagtccaagagcagacttctagatttggggactatagtcctcccatcctcccatcttttatagttttcttaattccctgatttgatggtaatttgtaaaagtaaccttcctttatttagtttttcctgtagtatcttagttgccatagaaactgtgtctgcctttttctcattcacattttgaccatttatgtaatattagttaaattaggcaattataataagtgtgacctggaagcatccacagctgactctggcaaggactgagctcaatgcaggagcagagctcagcaggagccacaagagagtggcctggtcctgcagccaggggacctcagcatgacttgcaggggcatcagaatgtagattttccatgggaccttttcattaggtcagctcacaagttctattgtgttacatttggctagttggagttaacattactgagcattttaaaatgtcagggctgtgaaagtaaatgccgtaattccctagttttgaaatttaaacattgcaaaaataatcacttgcttccagtactgttacctgtaccagatcagcccttagatttacgatggtttcattgtactactctgtgccttttgagttttgtcattcatcatcctctgttgtatttgaggcattagtgggtataaatgcatactgtagccagagtgcctgggtttgtgtgcccttactgtccttaactgctgtgtgcctcagtttgcccatctgcaaaatagggataaaagtgcactcagttgagtaagagcattccaatgtatgtagtgctgtaagtggctggaaatgttcacctttgttaccactgcgggtttcacttctgctcttcatccacatgtgcacatcactagtgactagttttttttcttttctttttttgtgtgtttgagacagagttgcactctgttgcccagactggattgcagtgacaggatctcaactcactgcagcccccgcctcccaggttcaagcaattttcatgcctcagtatgggattacaggcatgcgccactacccctggctaatttttttttggtaattttttaagagacagggtttcactgtgttggccaggctggtctaaaacttccggcctcaagtgatccacctgcctcagcctcccaaagtgctggcattacaggtgtgagccatcaagcctggccagccagcctttgaaccattaaaggaatagaggatcaaggaggaaagttaacgctattaatacctgagcagtttgaaagctacttagctactaggcattatagctgtgaagcatggaagagagcaaacagtatatttccagttgtaaattttaatcttgcaaattaaatactaaatttgtctgtggtttgtttttttgaagttttcacctctaacataaatatttattttttctctataaagacatgcagtaaaaaagagtaggccgggccgggcgtggtggctcatgcctgtaatctcagcactttgggaggccgacgcgggtggattacgaggtcaggagatcgagaccatcctggctaacacggtgaaaccccgtctctactaaaaatacaaaaaattagccaggcgtggtggtgggcgcctatagtcccagttactcaggaaactgaggtgggagaatagcttgaacctgggcggtggaagttgcagtgagctgagatcatgccactgcactccagcctggggacagagcaagactccttctcaaaaaaaaaaaaaagttatatgtgcagatttaaggcttaatttaaaaattggtttgcgtgcatactaagaagctcatttgctttaagtgagcatttcctttttgggcttttgttgggcactgtgtgtctcccatgttccccatttgtctgccacccaataagcatggtgtcgagggctgaagtagaaatcagaggctagaatctgaaagcttcattagggttctgctttttgcagattagggactttggcccttagtgagctgaggatcttggtttcctcccagtgtgcggtttcagggatgtcggccacatgatgtgcctgttgtggaggagggctgggtcgccagtgtgacaggagacagcagatcccttttgtgaaaggagaactggtactttgcgtgatgttaaacttcacaaaccgctgctcagaaatctgctattttccttctcttttaggactttatggacagcagcctgctaaccaagtcatcattcgagagcgctatcgagacaacgacagcgacctggcactgggcatgctggcaggagcagccacgggcatggccttagggtctctattttgggtcttctaggggcctcaaggtcttgatgtgcatagcttctgataaccctgtgtgcaataatatgatttgcagggcatttctgtttgtgacaaaagtttttaataatagttttaatcattcctttgaaagtagtgatgtcataattgtactaatccacataagtaccacagagaagggtttgaactgtgctattttgttcaaatgttgactctccgggggcactggctcattccaagactgttcttgtgcaactctcagaataccttatttgagcatacctgttttgaaaggcattttctttttagagttaggtgtagtgcttaagggttaatttattttcatgttatgccagtaatatagtgttgtatgcctattgagtgattgtggcaagaaaagctacagcttctttgcgtttaactttttcaaaccacagaccagaactggttgcatgttactttaggagttgtgggttggtaagctcccaggtacttcccgaggctatggtgtgagagcccccgtcctgccctctggggctccacaggcccctggcaaggccgatggctcaggatgatggggcacagcccgcctttgaacaatcatgcttcagaaatctgcctgaccctagctgctgctgctgctcactttattcttgtatggctttggtaggcatacttggagaacatatcccacattaggaattgatttaagcctgagagtttgagggctttaatcctttaaaacttggagaagctggctgggcgcggtggctcacgcctgtaatcccagcactttgagagaccgaggcgggcggatcacgaggtcaggagatcgagaccatcctggctaacacggtgaaaccccatctctactaaaaatacaaaaaattagctgggcgtggtggcaggcgcctgtggtcccagctactcgggaggctgaggcaggagaatagtgtgaacccaggaggcggagcttgcagtgagccaagatagtgccactgcacttcagcctgggtgacagagtgagactctgtctcaaaaaaaaaaaaaaaatcctggagaagccagaacaatatacaaacaagtatgtggaggcagatttgctttattccaagaggctgtttgagtgtgtgtctgcctaagcctccttatagcctatttttctacttgctgagagagtaatattaaaggaacagtgagggagtggaaggagagccttagttagagcgttcccatttctggcctttgggggtttgcactgtgcgggagatgctctctcatcactctgaaggcccatcctgtgcagaagtgggactctgtggctgttcactgagcaccagggcagactgtagctgagcagacttgggttatggatgggatatggggcccagggaccctcaggacacagggaccggctcaaggtaccactcagcctggccaggacccccagctttgcttttgttcttgatctctttgtgatagagaagcttagaacattgaatttggaaccccaaaatgtgtgagtctttggaaaacccattccagcctttcttcaaatgctcttattttcagtatatgaagtgtgtatttgaaatattcatatttctgttatttcttgttttcaagctctgaattattgcagttttctgtcctgcatgctttcaacagtgtgcttttacagtggcagtttagcacagcgaatgtccctgccccacactccatatggtcctgttttcctgaaaatacactccaggtagcacagacttgttattttgcctggctggttacacacatgctgtcttgctttgctgctcagccacctccctctgaggccaacttaggccaacctacataggactccatctttagcgagacaccagagacacctagtgatgaccacgggtctgcttttctctctgatcctaggggacttgttgacatgggagtgtctgtttccacatggaaggatgtctgtttatctctcatctctgaatagatgtatgacaactctagtgtccatggtttaaaatgttgctttgaggattttccatcctgtataagaagaatggctttcttcagattataatcgttattaaagctgtatgtacactttacttaaaaactattaacagtttttcatgttgcactggtggtaattttgaacttggaattactgggtgggaattccaggaaccacagagtattgatttttgctgccaaaatgctcttgaagcagat

SEQ ID NO: 8602 - DNA, 6000 bp, Homo sapiens
accttgtgtgactcataccacattagaaactacatctaaaatagttctgctttgtggtacttttgttatccaatcccctgaacacctatacactgagcatgcaatgtttctgcaagggtgggtagggagaatcctcattgttttttcttgctcttagaatgatgtttctgatgataacaatatgtgttactactagtaataataactaatctatattgagttcttatgtgccaggcactgttataagaggttacgtgttacatccctgtactcatcctagccttacaaggtaactactattcgcattttgtgagtaggaaaaccaaggcattaaacatttaaggaacttgaatcaagttgcacaattagtgagtgttgaaacccagactcaaatcatgacaatgtaactctgaaacgttttcttttacaggctatgttaggttccctcctgagaattgaattttagcgtatcatcaatattctccctttccttagtgtatatgcaaatgagggcattttttgttgttgtttttttcagttttgtttattgcttctcttctaccatctttcagtaaaaggcatttatttagcattatatttgttggcttctttgtctcttagtttaacctttagtgtgatgtggttattacagtggacactttggtttaggctgtgagtggatttcctgggtttaacttaagtttttgtctttttttttttttttttgacagagtcttgctctgttgcccaggctggggtgcaatggtacaatctcagctcactgcaacctccgccccccaggttcaagtgattttcctgcctctgcctcctgagtagttgggattacaggagtccgccaccacgcccagctaattttacatttttaatagagaccgggttttgccatgttgaccaggctggtttcgaactccttacttcaggtgatctacctgcctcagcctcccaaattgctgggattacaggtgtgagccaccgtgcccggccaatttcttatctttattcatacaaagatctgttttcctatcagttagacctgaagctaatttatggtattttttcagggcttactcactacgtttatcagcccataaaccaaactgcaaaattatttggtcattagttcacagaagctcctgcctaactatttaaaacatttaaagtatgctgagtgcctgaaacttctggaagcattaccagcagccttacactagtttccaggatcccttggcagcctcaaggatagcctcagaaaatagactgaaaacatttgctcccattacacaattttctacaaaagaaagtttatgactatagataaaaatatgtctaatagcaagtaaaatagattccctaagtaataacttcctaattaaaaaagaacaacaaataaaaaaccaaagcaaaaacaaaagcttttttcttcttaatttaacaacatagttacaaaaccctaaactttatctagattttatttcttatatttaacatcaaaattttttttgagatggagtttctctcttgttgcccatgctggagtacagtggcactatctccgttccattacaggcacacgccaccttgcctggctaatttttgtatttttagtagttacaaggtttcagtatgttggccaggctggtcttgaacttctgacctcagatgatccgcccgcctcagcctcccagagttctgggattacaggcatgagccactgtgcctagccttaaaatcaatttttaataaagataggaaatatggtacacattttcaagtaaaaatcctataacatagacaatcttgctgataccattacttaatgtttttgaaacaattaggaaaagggtaatagtattggatagaaaagtctgtagttcatgcaagttgctcatgcactacactggtttggcaagccagggatattgaagaacttggattttctgactgagaaacagaacagtatttgcaaataagtaggggtttcctggaatagaaacataatacagatgctgattctcttaaataaacctgggccaccaactgtgcttacgttggttagtattctgtgtttaaagtaccatttttctgctcagttttcttcttttaagaggaatattgaaatacaatatataagattattattttataagtgccaggggattagatttctgtgaatgataaagtttagcctgttttcaaggtgtaggtgttttcaaaatataggtaaatttccaaattaaaaaatacaagcagagtctgtttcataattacataagaagtttaaacagcaacttagtttttcacatgatatagttagaattctttcagtgctaatgtcttaatatatagcactagcaggctatgaaattaggataatttgaatactgcttgaagtggcaataatatgtaattttgactttttatcataaataaagtttaagttaaattctcaataacctcaactgttaggcttttattaggaaatgacttatcttagacatttcaatatttaattaatactgagtgatttcagattttctattataataatattcttcatcttttcttgaacgattttttaaattctttatcttgattaagcctcacaatattttgtgagattgatggggcaggaaatatgttataaacaaatgaagcactgagaagcaagatacctacctaaggtcatccctttatttgatgacagagccagggatggtgctgtttacatcttccaggatcatttatgtatatggcactccttataaacttgggaatggccgtgtagtgaccgtcaatgttataggtacttctccatggaattattttctacaataaagtgaaaggatctaccctatcttaagactgaagacagaacatttgatagcttgaattgtttcatatctcaaatttagaaaagaatgtacacggtaacaggaaataaatatgggataatcattcctttattatcaggtttagaggctgatttccaatatttagctatcatttttatagaaaattaaagtggaaatgaaacaaagtagataataacatgttacttttttctaagaaaaaaaaccccaaatgtcatgtattctttggatttacatatatctctccattatatatatatatacacattctgaataaatgtaaatgtaatttttttgtaattactaaaataaaatctgttacaataattattttgtaactggcgctttatgtgaattttgaatttgttgctagtttaggttggttataacaggcaacagaatttctgttgctttatggtgctgtcagctgctgttaatttaaagagcttgtgctcatcaaattatactttgatgtttttgagacaaacgtttatgaaatatttcaagtgtctttgtatttaatactgttcaccccaattagctctgtcaaaacttcatcacttatcttattcacatcaataagcttacattttactcgatattatttaaaatgtaacaaatgatatcagaatatgttttgtctgatttacttactttatagataaaagttggttaaccaggtagttaaacaaatgtagtagtataaataaaatgctcaatgtagtataaataaaacaaataagtgtaaggtattcattctacacttaccttgaaaaatgtctcttaataattatgtacatatctttgttatagcctttaaattcttgctctgattattttaaatcatttatgttaatatatttttcccctgataaattggatgcgtgctatctattctaaacacacatttattgtagatactttctctgcagatcagctgggattttagaggctgtgtaattattgatcgtgtcttgcaattgctctacttaagaatatgagaacaattttttctgttttatgtatttattttattttatttttacgtatgtatgtattttttttttttgagacagagttttgctcttgtcacccagactggagtgcaattgtgtgatctcagcttactgcaacctccacctaccaggttcaagtgattctcctgcctcagcctcctgagtagctgggattacaggcacgtgccaccatgcctggctaatttttgtatttttagtagagacgtggttttaccatgttggccagactggtctcaaactcctgacctcaggtgatccgcctgcctcgatctctcaaagtgttgggattacaggcgtgagccgccgtgcccagctctgttttatgttttattaattatctgttctgcaagatgctttataaatatgattctacataatcctcataacaaatgaggtttagctttggcatttctatccacattatacagatgagaaaactgtggcttagaaagtcttctattcttaggaggtgtacagacccagacgtgtctgtctatgaaggccagattttagccactataatatattgtatcccaggatgatttctatttcagaattattggctagtcagaagtactgaattagagtaaagtcagaattgcactatttgacaacctggagctataaagaatatcatgatatgactttaagttcattacaatacaacttaaaggaatcaagtagtttgtcaagggcctggcagagtagtggcagatctagtattaggtattaaaatgttagccaactagcttgctagcaactttcatttatttaggcttttaattttggattcgaaggcttgagtactgatatatttgagaacattaaataagtcatacatttcatgttatatgttctttatccaaaaatctatgtgtacaattaatgaaattttcttctttgttttaatgcagtggaatgtatcctgctttcatcttggagttcacctgtgtggcttggatttatcacagtagcatttgtcttcaatctgtgtgttaactagaaatcaaggaaagacatgaggagatttgtctactgcaaggtggttctagccacttcgctgatgtgggttcttgttgatgtcttcttactgctgtacttcagtgaatgtaacaaatgtgatgacaagaaggagagatctctgctgcctgcattgaggggtaagtgcttatgaagcaaatactgtctttatagagatgagaaaagtggtgccttgacaaaatgagaaacttcagaatcagaagagttttgccttagtgagttagaagagcattttggcagcactattaatgcatgtttaaccatggggaagttactttacctttcttggtcttaggcgtcttcttggaagaaataagaagagttagctaacctctaagataccgttcaacctaataaattctggtgttctgtgactgtatgaaaagaacagttgagtgaacgttcaaactgggcagaattttaaatctaggctgctagaagccaaaagcctttaaagaccaagcacataacataaaacggaaaaaccactaaagtgagacaggtggcgattttagcaaacgaactgtgcatgaatgacaccgctaaagacttccaaaacagttgaaataaaacaaccaatttttaaaacaaaacacatggcggtatgcagatttaccagattgctggctgtatgttaagtgaaaaagataatttcaagtatactgtaaaattactttatttcagtattttcctcttgagggaccagtttcaaagactaaatatgaatgtaaacataataatttgtatgaatggttatttatcaagtaaagccatagagatttgttttctgtgaagttattccagttttctctatgctttcttttttgttaacttcaagatctataaatatatttctaatgtattcctagaaaattcaatacttctaaaatatgtaagagtactcaaaattagttttattctcattgaactaacatattctctgtttggcaaaagttttctgcataaatatgacaaaaagcaagcttcaattgaagtatcatgacatgtttgtaccttttggaaaagtgaat

SEQ ID NO: 8603 - DNA, 6000 bp, Homo sapiens
agtcctgtattattttgaaataaatcccagatattatatatttcattcattaatacttaggttaattaggtaattgacctaaaatataaaaactcttttataaataaccatattatcatcatatctgaaaaattaataattccttaattatcaaatatccattatttaaatttataattgtgtcataaatattgtcataaatagatttgctgttttaaagcttgttccttcattttctctgttttgttttagataaacattgtcataaatagatttgttgttttaaagcttgttccttcattttctctgattgttttgttttagattcagaggttacttatgcttgtttgttacatggatgttacatgtgtaatgggggatattggacttctagtgtactcatcacccatatactgaacactgtactcaaaaggtaatttttcaaccctcatccccctccaacctccccccttttggagtctgcagcgtctattatgtccacctgtgtccatgtgtacccatggcttagctgccacttataggtgagaacgtgccgtattccctctccattttgtgtgtgtaatttatttctattgaataaatcaatttgtttgtatttcagattcccctgctggtttgatgattagagaatagttgcacttgtttcctttattctctgttttccctgtgaattggtcattggatataaaggccccattcaattcaggattttttgttttggggttttttggtgggggaaaggcaggatattttcttgctttcattgtgtcagatcctatcattttcagtgcagtttttaaaagctaacttttctattttctcttacctcatccttgcctttgttttgcccacaccttctatctgcaagtaacccatattaaaaacagagtgcataccctttcatatttttctccatattcacataggtatctttacatatgtacacagagtttgctttacaaaaatgaggtcatggaaagccttccaagtcaaatagtagagctcgagtttgttctatttagtggctgcaaaataatattccactgtgcatatgtaccacaatttattcagttatctcactactagtgggcacttgctttgctcccagttctttttgccccatcctgttcatatacacttatatacatttatataggatagaatcctaggagcaggatttttgtctcaaatagtagctttttattttaacagattttttttctggacagctttcaaaaaaggctgtagcaattcacatatccatcagcaaaggataagatcgccctttcccccacaatcttaaatagtctcaaggagccagcaagaatcaggggttctccaaggagaggggaaagtctatgagattccttactcagcaataaatgagctaacagtgaattattcctcaatagaaaggcccctttctattcatctttggatctttttagccaaataggcctcacacagaaccaaagcccagaacaacccaaaacagggtctgaagtccagaacaacccaaaacaaagtccagaacaagccaaacaggatctgaagacagttgtctctaactcactcctccccacttcatgaatccccgtgagttctttcccactggatagtacttgcatattacacaatcagctgcatctagcatctgctcttaatttcatttgatattttatcatctcagttaagattctgggaaaaagaagttgccttctttttgaaagggattgaaagaaactaggaaacttggcaggaagatcattcttaagccaggaaaaaaatttttaatgctcacatgtgaacatgtgatggtcataccagaaggagcacccacctccctccctctgtgacagacacattttcttagccttcacctttccttctttcaagttgctgaaaatccacagtgtttctgttcatttgttactttcattctcacctatcttctctcttgctccatctaccagaacaataattccccatataatacttctcacttcacttttcaacgcaggacctcttgttgggtaagctaaaaggatatgtgctctgtaaataagaaaaatctttattcaaagaatctatcaaatgttcccatgactccatctctatttgtatatctaaagattgcatagtagagaaaaacaaaagattagccctgcttcatcttacagctgggagagtcatgaaaggccaaatgggtaacaaagctcctggttttgaccaagcctagccaaagaagctactcaaatgtcaaaggcattgtttgtataaaaagggaaccaaagtacaggttccctttacagtagaaataagagaactccctgttgacaaagggaggaggaagaaaatataaagtacacttttaaaacatgaagtcttcatagcagcttatagtcgttcagagaaacatgttccactgagaatgacttgagagagaggattacatcattatgccagaaggaagaagccactgtgcatgctctatcaccagcctcaccctcctggtcagccttacaagagtgacactggatatactccagaagttggacccaccacagcctgcacactggagtaagtgctttcctccagttgaagctcatcttagaatgatctgtgacttagaccatccccagaatggtgtagttgcaggaagcctaacgtatgtctcctgagacagcctcagatctgagtttcctccttatgttttggtatttggaaaggggtggagaagatactcttgggtagaagtatgggaggcatacagattcagaagaaaaaggataactctatctttagtgtgttgtctgtggtggcatctagccttaccactgtatacttacattccacctacaaacattaaaataaaatgcacagtgcactcctttgttttaaaaaggaactaggaaaaaactcaaatggcaatttggttccagattttttttttaatgtgatctttgatctgaagtcaatgtaggatgagttctgaacaaagtagcactttcaaaggttgtatattaaagaggtgaaatgaaagacaacttggcacttgagatatgaatttgaatgtgtatatggttacagtctggataagacactgctaacatgacttcattaactgatcgcctatgtgggaccattggacaaggagagggggtgttctggctgtggtgccatatactgaaactgaacccatgagttgggcccacaggaattgagggacaagccagatagatggcaagaattctaatttccaatatgcaaatcagtctaaacatttgactttttttaagtctatttggaaagtttttgaaacacggctgcactaggcgagttcattaagtagcaaaattttaactattgttataactttttctttgcccttttcagttaacactgcatgaccacccaggtgcatgaggctctcttctcctcttagtgacaataacaggctcacaggaagggttcagtattaattatttataccttacttcatgtggctctaagtcaatgtattgtctatgaggttttatatttaagccatacttatgaaatgctaaagaggaaaaagcatatttagcacatttggggcaccctaaatgtgaacctgagtaaatttcagtttgtttgtttgtttgtttttgtttgttttgagacggagtctcacgctgttacccaggctggagggcaatggcgcgatcttggctcacacgcaacttggcctcccagattcaagagattctgtcttagcttaccaagttgctgggattacaggtgcccaccaccatgcctggctaattttttgtatttttagtagagatggggtttcacgatgttggccaggctagtctcaaacttctgacctcaagtgatccgcccgctttggcctcccaaagtgggtttgttgttcttttaaagaaaaaagaccactacttattttaaagggtgatagcagtgtcctgactctacctagacagatatgttcattcatgtgctcattccagttgaaccataataactgcaattttcaaaggaggaatacagagtctgggaaatcagaagagtatagcaacaaactggtatacgaggaaactgaaaatgaaaaatcagcaaagtggtatttgtacctgcctgagtggctacagtggtgaaggtgaagggtggcaggctagattagcaccatctcctcccctcctcgcctgcggcctcagtactttccactgtggtcccaggatacgccaggtcaactgtgatcaactctgacacagacaaactctgggaggggaggaggcatcctttcctattctcagcggtctcagttccagagaccactttagtaagctctccttgtcataccttaaaacataaattaagacccataagtaattccaaaacctcattttattatgttgtttttatctccttgctcgcccatcttaaaaaaaatggtaacaccaatctcagagactgatttctcctacttattctcttaggagggaaggagtgttaaataagccaaggcatgctaacaggaaggaaaaaatggagattatgaagaataatcacaatttgaaaactattaaaaccacgcaccaggcagtttacaaaatatttatttctttgttatattatttctgctgctgaatttggtcaagagattgtactaatcataaaatgaatgttattgatcattttaaagtctcttctaaaagtagctaaatttatactgctgattccttttgaaacatgcgacctacagcttcttggcttttatgagctattcaagagatatttagtcatcacgttgtgtcacaatgggagtgactcacagagcaaggagagaacctgaggattcctcacacatgtagtactcagagctctacggaaacccaggcacctcgacctcaagaggatcagcctggccagggtggcacaactcttccttccccgtgcacagcaggaaagctgccatcagctgagcaagtccaccaacagtttctgtgtcccacttcatctttaataaggtaactgatgacagttttgtcatttattcttttatttatcaagtcaatctaaactttctttgattttcctcactcttgcagaatgaatcggtggtctttcaagctgtggtcaatgttgctacttcttttaatgtaacacattagaacccagtgatgggagctgggtccatctcaccatagaaatgacctcggtgtgacctgggatcttgccttgaactcctccaggactctctttgaatgtcctttagcaccctagtgtcccaattcaattcatattttattttctctgtgccttcttgacactatctgtgaatcttatgattaattggaaactggagggggaagtctccaaaaagcacaggattcttagatgagtttcttactgaagcagcagattctctgtcaactgcaggtctgatctgtttgtctgtccgctttatcaatattatcagatgtaagtttacatgaatacacacacatattcactaaactgaggggaaaaaatgccttgtaggtcataaaaaagcagggaaattcccaacaattcatatttgatccctggatccaggggtggcagcaataagcctgctttagatatttactccccattttatgatccggtggtttggtttttcaaatgatgatatggctcctttcgcaatgacttgatgtttaggaggtgtgcttcaataaatacattttaaaatcaacaatcaagttagagttgtacaaatggctctgaaatgtcccactacactgttagaccaagggcacagattgtgcttctgtactatttatcctagtatccctcggcatatattaactgctctaaaaatctccttggctacacgctgcatcaaatcaaagttaaatgttataccacctttctattctatttttaatattcaaagagggtgctcagattttagaacaaatttcaatgtttaag

SEQ ID NO: 8604 - DNA, 6000 bp, Homo sapiens
cagcatggtgagtgggggggtgtgttttggggggcatgtttcagcccatttgtgttacagctctttcagtcctgctgccacactctgggccacagttcctgggctagcccagccccgctgctgcttcccatcgcatggggcagctgtctggtgccagcagagggtgggagagctatagtgttgcagccctttagctcccaccatagctcagggaaccagccagggaagtgttacagctccttttgctcctgccatttggtgggtcccaagttcttgtcccatatccaggaagaatgaggttgcatgggcaactggagggtgatcaaggcagagaagagctttattgggcaaccaaacagctctcagcagacaggagacccaaactgggtagctcctattcataggcaggtattcccaatgagtatagaggagacccaaagtgggtagctcctattcataggcaggtattcccaacgagtatagaggagacccaaagtgggtagctcctatccacaagcaggtaatcctgatgagtctctgagtctggctgagtctggggtttttatgagctcagaagggaggaagtacatgctgattggttcatggaaaaggcaccatccaactggccaaaaggcatcaaggaagttctcactctgggtcatgaactccacctggaactgggagccaggcccctaggttttaggcctggcctgaagatggggtttcaccagggacctgcttcttcccacctaggaacctgtctgcctcctgccaccatcaacaggccatttgcagtgcccaggctgtctgcaggcccacgtcaagctgccctcagcaccccagccttcctcccatgctcattagtgcccaaagtctgaaggggccgaggtagcagagggctggtgcctcagtactgccccaaggatacacacacctggctgggttgcaccagtacctgggctcggccacaactgtgttccacaccagagtgggtgctagggatagggagaggccagggagtgggagcaggcacttctgagcttgtgggggaaggaggcttcctgagcccctgagagcatagggatgcctgggtctggagccatagctgggcagctgcagctgcacccaggagttggtgggctcccaccccaccaactcggtagggcgtgggggctcccactgggattcaactgttcctggcccccacgggccaacgagtgcacagccctggccacacctcccccgctacagctggtgtccttgcaatggccactccatacggatcgccactgccatcaacatgactacaaacacgaccattcatacgttcaacagccatttattaactattatgtgccaattctttgtcagtactaagagcacagtagtaaacactcaggcaaagtccatgccctaatggagcttacattctaatatgcaaataaatatacactgatggagtgtctccttgtatttcccagttccaagtccccagagagaaaacctgattggtgtagctggtcactaccatccacttgtggggggagaaccttttctaaaggccacctcattcagtgtgggtattggctgcctgtatatcagggtttccctctagtccagtcagctgtgactgagagtgcatgacacataacatggtctctcatgtggtctcatgtggttagctccctcagcaaaacaggctaggttaggagattctcatctgccctatccaatgtggttcttattcaaatatggtaggaaccaaactttctcagggtagtctgaaggcaaaaagataaggctgcactaaccaataccaagctgagtattaataatctaaaaatccaaaatgctccaattggaaactttttgagtactgatataacactcaaaggaaatgctcattggagcactttggattttggatttttggattagagattctcaaccagtaatgttccaaaatccaaaatccaaaacacttctggtctcaagcatttcagataagggatattcaatgtgtatgataaaaatgatccctccatcatgaacaacttatttacaagaactcagaattggccaggtgtggtggctcacactttgggaagctgaggtgggcagattgcttgaggccaggagtttgagaccagcctggccaacaccgcaaaaccccatctctactaaatatatgaaaattatctgggcatggtggcgcatgcctgtaatcccagcttcttgggaggctgagacacaagaattgcttgaacctgggaggtggaggttgcagcaagttgaaattataccactgcactccagcctgggcaacagagagagactctattagaaggaaagacgggaggggaggggaggggaggtgaagggaagggaggggaaggaagaactcagaattaatgttaatggaactcagaacacacacaaaattgagtaccagatacttcttccagaagaatagattacttccggttttttagcctgtagacatttgcttctgttggacttcacttttctgctgcctctgatgtttcaaaataccaacctgcctgcagcagattcttactccaattgaagctgacttgacaataatctaccacgtgttccctccatcatgttgtattatttatattagctttggcaatatccttgagattttactatttgccttctgttggagcgtattctccaactaaaagaggaaacaactggcaccaggaaaaatggagcaatcattctcacattttttcagtcccaaaccaggtgggccctgtacctcaccctcacaccctccaccaactgctgctaaagaaataacatgggtttttaccatcaccctgggaattaggaaaaaaaagaaaaaaaacccacagattttgatgagacacaaatagtagccacagaggtcacttactaactgattctgaaaaaaaggctttgaagctattcattacacacattcaattcaaatcaataaacactactaccatgttcccaatactcaaccaggaactggggatctcaagatgaaaaaacatgatcggctgggtgtggtggctcacacctataatcccagcactttgggagactgaggtgggagaatcatgtgagcccaggagttcgaaacaagcctggcagcataatgagacgtcgtctctgcaaaaaatcaaaaaaattagctgggtgtggtagtgcgtgcctgtagtcttagctactcgggaggctgaggtagggatgattttgagcccaggaggtggaggctgcagtgagctgtgatcacacccctgcactgcagcctgggagacagagtgagacccatttcacaagaaagaaaggaaaaaaaagaaggaaggaagggagggagcgagggaatgagggaaagagaaagagagaaagaaaagaaagaaagaaagaaagaaagagagagagagagagagaaagaaagagagaaagaaagaaagaagaaaagagagagaaaggaaggaaggaaggaaggaaggaaaaaaaaaatatgatccttgctctgaatgaatggaccacgaatggtggaagacaggcctgtgatgatgacgatgatgtcatagaaatgaaggaactgtttcatggcaaggagagagtcacactgaccttaaggataaataagtaacatttgagatgggacttaaaggattaggattttttcaaagttaggattttttaagtggaaaatgtaaggaagggcattccagaagtagagaatagcatgaataaaatcaagaaggtaagaaagtaaatggcttgtgtggagaataacaagcagccactcatgaggctgaaacatacactacagctctaaggaagggctggacttgcccatggaccaccaacgatccacagcctgggttctataggccgcggctgccatcagacatatgggagacaactggtccaaaaattttgaccactgaacatggcagcagcttccatcataaagagggttataattgccaagcagaatgagaacattataattagatctagttcttccatttattctcttgcattaaatgtattaatttgttgaattagctgctaggcattctggtaaatatcaagaacatagagccaactccactgcagaccctgtccttgaggagcctaataactggagatttcatttatggatttatggatttattaggcctcctaaaaatctgctattcacttaccgatagcaaagaaaattatttttaaattttaaataatattttcttattacaaaagcacttcatgagcatcatagaatatggaaccagccaaaacaaaaaataaaatatctctgtcaccacccagagatcaccactgtaacccttggttcatattctcctcccacatcttcatatgcatacatacatattaatctgtattttgaggacatgtttttcattttgtctacagacacatcccgtcttgtaaccagcttttaaaaaagacaataatttccacgtttccatgtgaataactactcttctaatactcagtacatattcaaatttctccaaatgaaccaaaaatgtcctttacgcttatttctccaagttggcccccaactcaagcccttgcaatgtgtctcttggttatattcttcgggttccttttaatctggcataggccctttcataggactctgactcgacaaagagaactggccagctgtcctgaaggaaggcccacttcctgtatttgcctggttccctgtggtgtcattttacttgctcctcaattccccttacttcctgtaaacatcaaactcaagatgccatagaggcaagttaaccaccttgggctagaatacttcatgggcgatagcacgtactttacattgcatcacataggaatccacataatacctggttgacgcaacatcagtccaactgaccacaaagcaactaggggtttcagagggagtacacgtaaggggcaaaagcagcaacggaatacgacaacggaataagcatgaatacgacctggctacctgaaggaggtaggacggggaaccgagcagcagcaggtggtggaatgccagggaaatccaaccgtgcttcccacgctggcatcgctctgattatgaccaatcctctaatcttattctcacaattagggaggaagaaaaaaaaacaaacccaaaccaaaaaagaagttggtaggtgactctgtgagactactgttttataaagggagcgtttccttttataaaatttagctgagcagatgctaggcagcccacaggaggccactattcccctcagctgtacagtttgggaaaatacctacacacccggagaacagagagcttggtgtgtgttgagttcgctcctgttcatcagcagccctttccccgcctctggccaccagggggacctgcaaccaagtatgtgttctttcaggcgagcgggaacgcgtctgcataaatctagtccaatccagggccccgtagcaaggcgccaaagctgggggaagcgcatttctgttctctcgcgagcacgacgcggtgcctcccagtcctcctccggccctccctctccgccctcccggcccgcgagcgctcgggccccttccagtggctcgcggcaggtggcgctgtctgcggcgtcgcagcggcccgggctgcagcagagacgatctcccggcgggctgtgcggcccggctctccggcggcagcgagtgccacgtcccaagtgctacgcggaggattagagcaggcggtgcgctgggggcgggagcagcgcggagcccggctcggccacaccgatcgcccgccgccatgggctcctcgcaaagcgtcgagatcccgggcgggggcaccgagggctaccacgttctgcgggtaagggctccgacggcggccggggagctgcgggctggaggcggggccggccgcggggaggcggaggcccccatgggctccttcacggggcagccaggcccgatcccgcgaaggagcggcgg

SEQ ID NO: 8605 - DNA, 6000 bp, Homo sapiens
ttgtcttgaactcctggactcaagtgatcttcccaccttggcctcccaaagtgctgggattacaggcgtgaggcaccacactcagcccccattttcatatagaaagcacaacatggacatcaggaagcttgccctttgatactaatagaatcactgaagttcactgaagaagatttaggaatattctgaaccaccaagagggaaccctctgaaccatttctaatatattcaggcattttggttattaactaaataataaaatatgcaaaccaacctatcaaatgcatttgttattactttttaaatataaattacagaatttattgtattaggatatacttcagaaaacaacagttaatcttggctattcttggccctttgatctatgtaaattttagaatcaatgcatcaaattccaccaaaaatctattaggattttatttaatctatagatgaatttgagaaccgacatctgtataatacaagtcttccaactcattatcctgagcctgtttttttagccttctccaaaatattgcaaagctttatattttctttgtagagttgttgtctccaacttattgctagctccttgctattaaaaatggtatcattaaaaattaattcacttgttgcctctttacaaaaagtgcaactgatctcaagtataaatttatacctagcaaacttgataaacttatgttagtaattaatctcaagattcttttggattgtgttttataatcttatgtgattaataagttttgtttctttttctatcatcatttttttttcttgcttaactcagtagctgagactttcagaaaaatgctgaataggaataggtgataagggatataagacaaatcccttctagatctgagtcatgtcttggaagagagctactctgaaatgcctatagaccataagcagactgtgtgtgagcaagaaatatacttttatatgttaagctcttgaaaatggagcctgttagttcctatagcatgttctgtcctaatataatcagattaaaataatcatcttccattcctagtttgttaaaacatctcatacatgactgttgaatcctaccaatgtttttcaccatctgttttgatgattatatgatttttcctctgcagtctgttaaagtgacaaatcatacaaattgttttgttatcagtttccatttattactacttggtattacacatgagctgattctcagtgtgaattagggcgttggacccctccccctgcctcccttcttctgtctccccattagcccttggatctcaatcaagaaagctgaacagtgatgttagtgctttctccccactctcctctcttttcataattgttttgctaggatggtagatcctaaataggcatctgaaaaaaaatgttcctttaaactcagtaattcagtaaccacaaagtcatctttatcttgttgaagagaggatacttgatgggcaaacgtgtggggtgacaaaaccgtgaaagcgcaacagacttcagtttatataggaaccttgctgtcttctctgcaaagaggtatcccactagcgatttcattatcaaggaaatgaagacaccttttctgcagaattcatttctttctcataaaacaaaaatcaacttcattccacatagctttttaggttgaactgactaaattctgtgtcctaatgtactcggttttagtgatttaaaaaatcttttccttcccttcctacttagcaaccttaggagattggtaaaaacaaacaagtaagtaccagaatgttcactatagtcggattaaggatagcaaaaaccaaacagaaacatccatagagaactgtataaataaattgttatagccttaggatattagccattaaaaggaataaattaggtaaatgtataggtatgaaaaagatttccaagatattctgttaagggaaaaaagcaagatgcagaacaatatgtatagggataataaattttctggaatgatccatgagaaggtgataaaaggggttacattaggtagtggaactggagcgaggaaacttcattttctaccctttggttctatatgaaaggttttgtcatattacacatattgctttttaaataatttaaaattagtttagaacttaaaattaaatgataacctttgcactttttggtgtttagcttctttcaggtttttcagtctttctgcttccatgggctccgctttctctccgagcatttctcatgcccatacatgtttattctggaattgtcatctttggaacagtgattgcaacagcacttatgggattgacagagaaactgattttttccctgtaagttgcatagtcttcttaattgtaatacttaagccacaaaatgttaaatacttgttcactgggaaaatgtaataaaaatataacaaaattttttagatattaaaattaaaaaatattttaaagaatttgttatatcatataggtaatatgatattactaaaagtttagaaggaccaaaaagtctgacaaattgtattactcttatgaaacaactattgaagttatacattccctttcaatcttgttgatatgcatgtttttatattaattgtaattatagtgtacatacatttttgtttcatcctttttaaaaattttaagtgataactgttactggtggagggtgtccaggttcttggcgttttgaacaaagaagtggacaaaacacacaaacaaagcaagtaaagaatgaagcaacaaaagcagagagttactgaaaatgaaagtacactccacagggcgggagtggcctgagcagccactcaacggcccgatagggaatcttcttgggtccaaatagcccctagaggtttcccattggccagttggtgttcactgcatgtaaatgaagtggtggcctgcagtcagtttgattggttgtagaaagcaaccaatcagagatactttcaattttccatccgccatgcagaaaagcggggtttgcaaagggagtagcctcgggtccttttgctacttagatgtggaaagttggggttttccttttggtttagttctaggaagtccgtgtgaattgacctgaggttgcctgcctccagaccctacctgccttaaaacaagtgttacagatgctatattattttcatatttattatttttaaatcaatttcattatatattcccgagtgaattgtagcataatttatatttctccttaatagcaagctttgagagtttacattgaaactgtactagtgtgcattttgagcagataaattcaagactgttttgcatgttgctgtatcatcctgtttgtaattggatacatctcttatttcataggagagatcctgcatacagtacattcccgccagaaggtgttttcgtaaatacgcttggccttctgatcctggtgttcggggccctcattttttggatagtcaccagaccgcaatggaaacgtcctaaggagccaaattctaccattcttcatccaaatggaggcactgaacagggagcaagaggttccatgccagcctactctggcaacaacatggacaaatcagattcagagttaaacagtgaagtagcagcaaggaaaagaaacttagctctggatgaggctgggcagagatctaccatgtaaaatgttgtagagatagagccatataacgtcacgtttcaaaactagctctacagttttgcttctcctattagccatatgataattgggctatgtagtatcaatatttactttaatcacaaaggatggtttcttgaaataatttgtattgattgaggcctatgaactgacctgaattggaaaggatgtgattaatataaataatagcagatataaattgtggttatgttacctttatcttgttgaggaccacaacattagcacggtgccttgtgcagaatagatactcaatatgtgaatatgtgtctactagtagttaattggataaactggcagcatccctggcctgttgtcatgcagtcatttcctgttaattctgggagacaatgatttcacaactagcgggaagcagtcctaaaagtttaaaatccgataaggaatatctgggacagggtttagatcatgactctacacagataccatgatgagagtatattaaagaaatttaggaaagcacctggttcctttctccccatgcctgccttctgctccctccccagctggtttgggctcaaattgtccctggagactagggtttatgttagggtattgatagattagagcaggtggttgaagagatcttctctggtcagacttggaagaatttccaaaactgaagttagccccaagacttccctagggttgatgtactttatgatccagatgctaaacttcttagaatgaaaatatgcttcaacacttaagtagcatacactgccctacaaacctcagagagcacttttccccaagttcttgtttttatttttgaaagtactcacacagcacttactatgctccaaacactcctctaagcactttacacatattagctcattcagtccccagacagacgggatgaagtaggtattgttactgttcccattttacaggtgagagatttgaagcctggggaggctagtaactcaccccaaggtcacacggctcatacatggtgggactgagactcagatgcaggcagtctggcacctcagtctggattctaaccatttcactaagctatttttgtcttgtactactttgacccacccctgaataaacctcaattgctggagtggggtgtagttattaaagggatgctttttaccttttgctgtttgctgtggcagattccccagataaccaaggaaaaggggccacccatacctggaaataggccatagggcccctactactgccaacaagccatggcctaccttgacacttgtttgatcttaaaattgtgtcttggtaacaaaagatttggacaggcatatctgtagctttcaagttaattaattgcaatatttttttcttcaggattttagctgctgaacaactttcagtttggagctaaaagagacctgtctcatggtctgcccttccctggggcaatagctagggtctttcctgatttttatggaattttaggggatattttgagctttgggttctcagtagtgaattgagacttggaggtgacttttcatgtttggagtatcatctctgtctgggatctgggctgacaaattaaaacctagagtagtgcttatgctgaaatgatacttttcattttttggttgatttttttgccttcccttcaattttaaactgaagcattttaatatgggtagaaactctacaccaaatacactaaacattttggtgcttagtggatttctttttaggtaactggtacttacttccaaagactgaatacaagccacactccatcatatcccttaaacttcatgaaaaaccattcaagatccccttgctgcaacactgttctcttcttctctactaaattctatttccaaaattggtaatagagccagaaggatccccagtacccagccctctgcctggcacaaagtggtagcacaattaaattcagtatgggtggagcatggtacagtcttggtgccatagaaggagtagttgcatagtcacacatcatttgataagttggatgttccattacatagaggaacacaaaattccagggtttttggaggaagggattagatagtgactaagccgccagaattgaggtggccattcctttttgtataggctaagaaacaggttatcagtgaaaagttaattatggctttggcactagaatagcactgttgcaaagtatttaagcaccccccatctcagccctttattttatctttcatgtgggctaatgtgaggataatcttacagatattataggaatttcttttctatctttatgaaaacaacgtatataaaatatatctagaaaacctt

SEQ ID NO: 8606 - DNA, 6000 bp, Homo sapiens
cttggtcgccatttgagttttccagagcagatggtttaggacagaatggcttggaaaagtacttatttgctaccacaaccatttcctccatttctgtctttgaaaagcagtgtggaaaattgattttgtggttgtgaggtggtgggtggtggctggtggttgtgaggtggtgggtggtggctggtggttgtgaaagggcaacggcaggagccagagcacagcacagagtcactgccaggctgccttctcttccccacgcccctccctcccggaacacccgccctgtgttcccaagagcaggcccctagggaatttgcaagccggccctgagaggtcagagacctggtctctgctcctggtttcagctttgatactgactgacccacagggcaagtcccttaacatatgagtttgctttcctgtccgttcagaacaatgcctagtagtcattagtgcatacagttgtgctggagatcaactgagaagacatgaaaagcactttgtcatttattagatactgttctgcttcctttttttgtaattcaaagtaagatttttttaaatttttgtggatacatagtaggtgtatatatttatggggcaacacaggatttttgacaagaattttgacaccgttaatgatactcttaacaatagtggccgtcgtaagctctcctctggcatgttttaatagcagccacacttcttcagctgtgagtcacctgacccctggctccagagtcaaggccaggggcataggaattccaagaaaatcttttctgcaaagaggaagtgaaaagaatgaggaaattctcaacccgggtccggccatggtcctggcagtttgggattctagtgtactgtatctgccaccaagggacactttgtgaagaacaaggtcattctgtcctttcatatggttgtcagcctttacgatactatgaggtaatgagtcctctgaagtgttctccctgttatctaaagtagtagttttctttatttaaaaagatgtcccttataatattccagaatataacctaattcaaataacctaaagttgttgcttgaaacaggaaaaaatagccacataaggactagggtttgcaatggtgaatcctctcacacgtcacagctctgttcttagctgtactctaattcttctttaactttatatgaagttttatataacactaatgaatgtatccactaagacaacagaatgaagatactgacctgtgataaagttcagtgaattatgaaaagggacagtttaaataaatgtactgtctttaattttttttaagtcccccttcacctgattctcagtgtcataagctcagttagccttcatctttccagatttcgagctgtctgcaggtggtttctccgtctccccttctgtggggtcgtctcctgctgtgtggtctctccatgggacctgcagaccttgcacgaagcattcttagagtggatggattatgacttcgtgcacagggggagctgtggccttttgctttgctttttgatgcagccggcattttgtcgagtgtagaaagcaattctttgtgtggcttttaatgacaagaaaatgtatactgtgactcttcaggatctatcatcctttcagtatcatttgtgttatttttacccaaatgccataccttacactagcccacttggataatgggccctttgccagtgtttggaatgaattagagagacaaggagaaaacagtgattctttgactaggcagccagagaaaaaggggaaacatttttattctgttctgatggccattttttcaaaccactctcagtttgactgtagatgtgaaatatcatcagagcactccttgacttcccccaaattaatcacctatataaaatacagactttctcctagctgtagcacagcatttgatgccatgtgtattacttttatgttatgtagctactccattaaccaagtgtttatggatggccttttatgggtggaactttcctttgaagacattcaaagaacatttgctttcattgcttttacttccacagtaaattctaaatgaactaagacagaacttctacaaagctacataagttaatacatctaaaatcttctcccagtagccaagaatgtgagcttattgtttgactgggctattttagctcagcagtcctcagatgtggtgttccatacatatagatatctataattgagccgtaatgagtgttctacttggcttgcccctcaagcagttagcaaaggtggcctgcaaagattttaagatgatgtggactgtctggagggttagggaaggttagagtgaatttggcagataaacggttttcctgcacccacacctcccatacttttgctgtgaggggcacttttgctgtgaggggcactcagcgtgtgagcctttatctggttcattgtgaagctagcaggtcacttataaatggatgatgtcaaggctgcagaggcctaaaatgggggagcattccatttggcagctgtgacatttaagaattctccagatggacacaaaaattactattgaaactgtcagtgtttctaaattttgttctgaatagctcacattcagcataagaatgtcacatcgtgtgtgtgcgcatgtgtgtgcaagtggggaaccagttactgccacttctgttcatctgttccataaatcatatgtctatcaggtgttgtgctagttgctggggactgtggtggggaataagactgatgtgatccttgtcctcggctttgccccactgtgggagacaatcaggaaatcacagcgtagtgggcttaaatgtagagactggagagatggaatactctaggatcgcgaagagaggccaggacaggcttcctggaggaggtgaggtccaagctgaaatctgaaggggaagggagggcttagccaagcaggccaacactgctgggaggtggaagggaaaagaagggaaagacagctggctgagggaaggagtgactcctgcggtggttaggaggcaagtgagacctgggcatctaagaccctgtagaaagcaatcgccttttgtgtttgtgatagagactcagaagctggtgctgcttctgtccctctcagtatgaccccaagcctccccagaaaaggtctcttccaactctaaagtgaatattagaatgtgagttattcattttctgtgttttctgtagcagatttttgtcctggagattgccttctccagccctctgcacactttggtttgctttcccttttgatggttagtgactgcttaatgaatgtaagtaatttaagtattggcccatgaaaaacaaagttagcagccacatctaatgaaccaacaaagaatgcgttctgaagtaaaaaaatgagattctgatcatccacatcctagcttccctccaggttccattagtgtaggttatcaagaacaggctgtgccttctagcccagtgcaaggtaggcagtttggttgtgggagctatattatgctgaccgacaggccctccatccactcaaaaatatataatttaccttgtaattcttttttatctttattattatttttttgagaaagttttgctcttgttgcccaggctggagtgcaatggcatgaattcagctcactgtaacctctgcctcctgggttcaagcgattctcctgcctcagcctcccgagtagctgggattacaggcatgcgccaccaagcccagctaatttttgtatttttagtagagacaggatttcaccatgttggtcaggctggtctcaaactcctgatttcgggtgatccacccaccttggcctcccagagtgctgggatgccaggcagaattcactgtgcccatcctcttttttatttgttaaggtaaaggtctcatcctactgtcgaaagacttctccatctctaaaatatattattcctctgtttagacaactatcctttatcagtgcttcttaaaactttaatacgtataagaatcatctggtgatgctgttattaataaagcagattctgcttccgtaggtgtgactgggcctgaggttctgcatcctcacaggccctcaggagatgctgctgttctagagatctttcccagatagcaaaggcacgaggccacttgaataagcattgactggtttaaagggagaaaatcagtttaggtgctcgggggagtgttgggttcctctgcttatcgttagtattctgtgggttcatgaacttcagccagaaactgattcttaataactgctgctgctgaaaggttttaacttattcttgagctcccccaggtggcacaatgaaaatttaactttgaaacattgttaacagcaaaaggaaggaaaagacagcttgatttgaaccatcacaattgtgcaaatgcatattaccaggaaatatgaagagaaacaatggcaatgttttctacaaggaattaaaatcttaaaaggagttcaacatgcttgtggctggattgtgcatgaatgcacttacgttaatatgattttaattttatctagcaattgtgggcacacttgaagctgaaaaagaaagaagaaaatctgggctatcctcaagagttcagtttcgaaaccaaggttctgagcccaaatatactcaagaactaactctgaagaggcagaaacagaaagtgtgcatggaggaaaccctgtggctacaggtgagggctgcagatggtcacatctgttttatgaagaggacagaaaaaggttatatggtgatatacagatttctgaaatttattctggcaacctcttaatcaatacaaaatcattgttttggaattccccaatagcatgtacaccccacttaactctgactgcatgcttttcatgcaggataatatcagagataaactgcgtcccattcccataactgcctcagtggagatccaagagccaagctctcgtaggcgagtgaattcacttccagaagttcttccaattctgaattcagatgaacccaagacagctcatattgatgtaagtctctctgactttcattttgccaaagtttttttgccatttatgatgctaaatcaaatgtctttgaagggaatagaactagtgatttgctttaaaggccattcttttgtgttaatatgtttttaatgtacgcaaagttagagaagacttgtttcccaaattagcaataaacataaaaacatgaaatacaatttggggccagagcgtattttccttcttcatttttggccattataacctatcgagactataaatggtagagcttatattctaacactgtttctcctttagctgtacatagaaagaaaaatacattgtgttttacttaccattgagaatactgaaatgtagaaagcagtgtgttgctagtcagaacattaaaatcaaggaatatcaaaattcagcaaagcaaaaaagtattattagcatacagtagtcatttagtgcctaatatagcctaagtcatctttggaagaaaaatgtgtattagatggcctgtgggatacctcatatgaggtggggtctgtttgctaggggtttaggatggttaaggtgcaaggttagcccgggcagctatgacagcttgatttggcattatgttcttgctttcaaaatctaattgatgatgaacgggtgtggtggctcatgcctgtaatcccagaacttcgggaggccgaggcgggcaggtcacttgaggttaggagtttgagaccagcctggccaacatggtgaaaccccgtctctagtgaaaatacaaaagttagcgggtatgatggagcatgcctataatcacagctactcaggaggctgaggcaggagaatgccttaaacccggcaggtggagttgcagtgagccgagatggcaccactgcactccagcctgggcaaaaagagtaagactctatctccaaaaaaaaaaaaaaaaaaaaacaactaattgatgatgagtgtctgtccactatggggctgctggta

SEQ ID NO: 8607 - DNA, 6000 bp, Homo sapiens
aaaatgtatcatctttaccattttaagtgtaaagtccactggcaataactacatttatatatatatttttccctttatcgccctccacctaccgtttcctctcctatagtaactaccattctactctctatgttcatgagatttgctttttaagctcccacatatgagtgagggcatgcaatatttgtctttctgtgcttggcttagttcacttaacataattgcctccaggtccatccatgttgctgcaaatgacaggattttaatttttttatggttgaattatattccattatgtatgtatgtttctttatccattcactcattgatgggcacttaggttgattccatattttagctattgtgaatagtgctgcaataaacatgggagtgtagatatttcttcaatgtattgatttcctttctttaggatatatacccacaagaattgccagatcatatcatcgttctagttttacttttttgaggaacctctattctgttcttcatagtggctgtaataacttacatttctagcagcactgtatgagggttcccctttgaccccattttgtcaccggcaactgtttttgccttttttatataagccattttaactggagtgaggtgatatctcattgtggttttgatattcatttttctaatgattagtgatgttgtacatgttttcttatacccgtttgccatttgtatatcttcttttgagaaatatctgtcgagatcttttgccaattttgaaattacattctttgttaggttttagttttgttgctattgagttgtttgagctccttatatattctggttattaatccctcatcagatagtgtgccaatgttttctctcattatgtgggttctctctacatttagttgatgttttctttgctgtgcagaagctttttagcttgatgtaatctcatttgtctatttttgttcaggttgcctgtgctttttaggtcttacacaaaaaaatctttgcccagaccaatatcttagagcatttccccaatgttttcttttagtaatttcataatttcaggtctataattcattttgatttggttttggtgtattggttatttcaatagatgctgagatagcatttgataaaattcaacattcctttatgataaaaattctcaccaaaatggatatagaaggaacatacttcaaaataatgaaggccatatatgacaaacctacagtcaacatcatactgaacacagaaaaaatgaaggcctttcctccaaggactgaaacagacaaggataccccctcttaccactgttattctacatagtgcagaaagtcctggccagagctatcaggcaagaggaagaaaggaagggtatccaaactggaaaggaagaagtggtgagaaagttttaattttatttttttgcatgtagttattaagttttcctagcaccatttattaaagagactgtttttttccattgtatgttctttacagctttgtcacagattagttggttgtaagtgcatggatttatatgtggattctctattctgctccattggtctatgtgtctgtttctatgccaatactgtgctgttttggttactatagctttgtagtaaattttgaagttaggtagtgtgatgcctccagctttgttctttttgctcaggattgctttggctattcagggtcttttgtggtttcttataaattttaggaatttttctgtttcgtgaagaatgtcatttgtattttgataggaattgcattgaatctgtaaattgctttaggtagtattgtaattttaacaatattagttcttccagtctatcacggagtatatttctgggtttttgtgtcctcttcgatttcttttatcagagttttatttatagtttttccttgcatagatattttacttttttagttaaattgattcctaggtattgtacatttttgtagctattgtaaaaggaactgctttcttgatttttattcagattgttcactgttgtcatataaatgctattgatttttgtatgttgattttgcatcctgcaactttactgaatcagatctaacagcttttaggtggactctttagatttttctaggtataagatcatgtagtctgcaaacaaacctaatttgacttcttcctttccaatttggatacccttcctttcttcctcttgcctgatagctctggccaggactttctgtactacgtagaataacagtggtgagagggggtatccttgtctgtttcagcccttggaggaaaggccttcattttttctgtgttcagtatgatgttgactgtaggtttgtcatatatggccttcattattttgaagtatgttccttctatatccattttggtgagaatttttatcataaaggaatgttgaattttatcaaatgctatctcagcatctattgaaataagtataccgtttctgtttttgattctgttaatgacttatatttagatggtatttaaagacataggaaatgggttagatctcctaaagagggaagatggaaagagaatgaaagagtttccagaatatagccctgggggtttcccgcacttatggcggagggaagggagccatcagaggaaactcagagtggccagatagaaaggcaggaaaaagcttaataaggtggtatcatgagaagagagtcttcctagaaggagaaatgcttactcttgataaaaactgaaaaatagggtgagtccacattagaattctcgctactggggaggactttctacacaaggttagagatcacttgtattttgtctactataattttagtgcataatgcatttttttggcatatagtgggcacttatatacatattaatctgatgacatttaataattgagtgcccaaatatttatgtcgagttgagagctagggataggcatgagtctttcttaaacatccttctcttctccttcctccaccccctcacttgccttcagaagcattgatcagagagatagcagtatcttcagttttttttaaagcaacatgaaacacactttattcctgctaacattaggaaaagcgagctgttttccaagccctggaggaaggaaattcagctaactaacgtgaggtaatgtagggtggctatttcttgaaaggtagtgaatcataactataaccatactatggaaaaaagtcctgccttaccaaccactccactgactgcttgtcaccaaaactacgctatgaaacgaattgtgttgagtggctttcattgtaaaagattttggtgaagggagggaaagaaactggtaggggttcagatcagaagatctggctttgccagtttctggagggtgtcagaatggcttcaacatacctacttccttggcctcaactggaggttttgtagctgtaaacaagaaggattgcatagttcagaataacgacactgtaagctcattgtggaactgggttaaaatcagcatgtagatctactaagaaagaaacacactcagcactactacagaaagaaacagccatgggccctgattgttagctttctggaagccatttcatttttacaatagatttatcacacactgtattgactttttccagtatagagtaagagaaagttaatattcctcatgttttgtctgttgacagactgaaaataattgcattgagtttggctagaatatcctgtcattccataaacatctcaaactccacatggctaaaacttaacccatccatgcccccatctgcatgcacacatacatgcatataacttcatttctcagtgtttttttctccatgaatggtagcaccattctctttcaagaaagagaaatacttccccttgggattatcctatctctacttattgctgcaggggcttccaaaattaggttttctgtgttcagtcttgcattcacacttctgaaacccagagctgaccgagacaaattcttcaacttcctgtcagtcccaacatagatttaaaattcctaacctggctcatgaggttcaccatgtattcctgcttccctaagtcagcctcatatcacaccaacctgtgtgtggagtggctaaatactctagccaggcaagctctctcagttcttctacctggctcctctggagccctccttattgctcatcccattcttagcctgattcaagattcctggtccttcaaatctctctttaagtgtccttacctggatctttctctagttagtacaaatttttctatctaccattggagcgaacattttttgaaactttgtatcagtcctgccttactcttggtggaatcctgtggtcctagtcaagtgcctgctccatgaatgtgctgaataaatgaataagcattttaattgtgtatctgtcattagtgtcagatgtgttatttattccagcatggttttagcacacagacacactctttgatgcagacttttcttttctttttacatatagcaacaataaaaaactagactttcatctcctgaaaatatcagtctaataatcacctatggctgtctctctggttgctgaaggaaaaaaaaaaaaaaggcagggcacacctggattgcattagaatgagactcactacccagttcaggtgtgttgcgttgtgggtctccggcacatttcagaggctcattaggaccctgaccccacactggggtttacacccctaaaagcaggtgtgtcccgtggcaactgagtgggtgcgtgaaaaggggggatcatcaattaccagctggagcaatccgaatcggttaaagtgaatcaagtcacagtgcttccttaacccaacctctctgttggggtcagccacagcctaaaccgcctgccgttcagcctgagaggctgctgctagcctgctcacgcatgcagcccgggctgcagaggaagtgtggggaggaaggaagtgggtatagaagggtgctgagatgtgggtcttgaagagaatagccataacgtctttgtcactaaaatgttccccaggggccttcggcgagtctttttgtttggttttttgtttttaatctgtggctcttgataatttatctagtggttgcctacacctgaaaaacaagacacagtgtttaactatcaacgaaagaactggacggctccccgccgcagtcccactccccgagtttgtggctggcatttgggccacgccgggctgggcggtcacagcgaggggcgcgcagtttggggtcacacagctccgcttctaggccccaaccaccgttaaaaggggaagcccgtgccccatcaggtccgctcttgctgagcccagagccatcccgcgctctgcgggctgggaggcccgggccaggacgcgagtcctgcgcagccgaggttccccagcgccccctgcagccgcgcgtaggcagagacggagcccggccctgcgcctccgcaccacgcccgggaccccacccagcggcccgtacccggagaagcagcgcgagcacccgaagctcccggctggcggcagaaaccgggagtggggccgggcgagtgcgcggcatcccaggccggcccgaacgctccgcccgcggtgggccgacttcccctcctcttccctctctccttcctttagcccgctggcgccggacacgctgcgcctcatctcttggggcgttcttccccgttggccaaccgtcgcatcccgtgcaactttggggtagtggccgtttagtgttgaatgttccccaccgagagcgcatggcttgggaagcgaggcgcgaacccggcccccgaagggccgccgtccgggagacggtgatgctgttgctgtgcctgggggtcccgaccggccgcccctacaacgtggacactgagagcgcgctgctttaccagggcccccacaacacgctgttcggctactcggtcgtgctgcacagccacggggcgaaccgatggtgagtagagttggactgatgcgccctcagcagctcagag

SEQ ID NO: 8608 - DNA, 6000 bp, Homo sapiens
gatatacctcctcttaactgtaagttttatcctcatgacaattgtcccctaacagttttctgtttaaacagaatgtgggtgtttcttattcctccttacaaaatatagttctgtctgtgatggaacttgcagctgtgattatgtcaagctggggatttccaggaccctgtccaccagtaccgtggtgcatctttctaggccacctagttcttctgctccagctgtggtctctttctcctggatatcccagcaataactcagctaatacatctccccatgcctaccccaccctacactagtggacaggtgctttctatgatgtggtctctgactatctctccagcctcattccttagctgtaggattgtgcacaggtctctaaacagttgtgtgttcttaggtatctgcacatggctgattttgtgttttgtttttttaaaataaaaagatgaagtttctgtttctcgcccacgtggagtgctggagacagtggtgtaatcatggctccctgcagtcttgaactcctgggctcaagtgatcctcctgccttggcctcccaaagtactgggactataagccacttttttttaaccgagatcacccagtctttgcctttctttgcataatcaagccctatttactgttaaggctcagttcaagtagtgttaccacttttgggaaagttcacgtaatctgaatttttctgtgttcatcatagcactccttccacagtattagaatttttttaaaatttcctttatttttctttacactgtgagaacacctgaaggctgggaataccttttatgtttttatctcactgcctaaaatagtggcatataggaaatgctaagatgtctgagaaagacgacaatgattgcttgctctccagcaaagttaataatcactataatctcatgatgatatttgcaatggcttctacatttttgcgttttgattttgtttttttttagtttcgcaagagggaagtcctgaaagaaatagatgtgaactatgttccttcgcctcctcctcccacgtagattgacttatacctggaacagctagcagtactaggtgtcattgggaactgatttcttttttcctgcttacaatatgaaggttttttggatccttttgtcttaaagagaaaaatatataggccccaaattctgccttttaaccccttaagtgatttggaagtattcactttaacattggttttaatcctacttttacttttttgaagtaccctatgatgagaggacctgatcctgctgctgctccatatagtactcagaaatcatctgttctacctctttatgaagtaagttctttcttacatctttgtgttccaaaataatttgtagaatttagaagtgtaattttgttatattgcattctagaatacttttcaggagctccaggtaatgaggcggagcctgaatttgtttagaacacaaatgatggatttagaattggcaatgctgcgtcagcaaaccatggtttatcatcatatgactgaggaggagaggtaaaagttcattttgtcttagcacacctcaaaaagcttttcattcaaagtcttctcaacttatattttttaaaattaggttttgattctactgctgtgtaccttgtatctgttttgtgaaccagtgtagataagattagtcatagatagtgttttactaagtaaacttgtatgccttcaatatcctaagggtagtggtaacctgctttcccgtgtttgagatatttgtgagaggataggggaagaaagactaatgtccttgtggatacacctattgtagttgatattgtactaatttctagaacctgagatttccatgccttctgttagcatatagtagttgttgaaagatttgtgattaggaatctccaaactgcatttttccaattttgtgcccttcaccataccaataggtttgaagttgatcagctccagggtttgagaaattcagtccgaatggaacttcaggacctggaactgcagctggaggagcgcctgctgggcctggaggagcagcttcgtgctgtgcgcatgccttcacccttccgctcctccgcactcatggtacgctacctggagggtggtcggagttttcaccaaaggtttatttataatgttccaataatttaggacgtgtgccttcatttcaagtcatttattttaatggtattaaaagcatgcatactgtttaaggagctttcccacaaatcagttgaatgtacaatttgtaataattgtcataaatagtatatttagaaatatgttgaaaatttttaatgataaattttaataacaggaaagaataagggcttatacgaaagttgagggtttttaaaggaaaaatgctagtgaattaacatatgactaatgtaaattttaattgttgcatgtaactgcagagaacacagatgcatattttgctgtttttttttctttcatgcctttaaataaaaaagtgttccttttaaactttttctttattttggattcttttccatttgtttttaaaggaatcaaatgatacctgtatattttcatacatatatatacatacacatacatatatgtattttcctaaatatatagatatatatccaagagaataaaaagaaacatgtttttgtaccacttttcatacttctaatgtttctttccataacatttgaacttcaacagttgtattatttttgcaaatatctttgaagttgtagaatatgttgctttgaaatgctgaaatagtgaattattctttgttaccttaacaatgtatttgattttgttaaaaagaaatggatgaatatacacacatacaattatgtgtgtatatactataaatgaagtagaataaacaatggtgtataaacacatatatgtatagcatagactaaggatgttctgtattgctaatgaatgtacttttcaacatggttttgatttatcattctgagaagtgtatgttggtgacgggagaactagaacatcctttttgcatattgtatcagttttaactcacaataatgcattttatgggatctgtgacacttgagagtaacctttgtgacataaagggatgcttccaggcactaattagccaattaattttattataaaagtcttgtgatttgaaaaaatatatatgtacattataattatatatgcatgtatgtatatatacacacacatatacatatatatattgttcttaccttttcagggaatgtgtggcagtagaagcgctgataacttgtcatgcccttctccattgaatgtaatggaaccagtaagcttctttcctcttaaatcactggggaagggaatgatacaacatttcagacacatagtttccctagtttagatgaaatatatgtttattttaaatacataatttgataaattattgttgattggaagtgactttcacctttgaaagtccattgctgtctgaagccactagaaagccacctgaattgcaatagtgatttatctttctgactaaaggaggtaatgcaccataaaaacatgtacagtggctcatgcctgtaatcccagcactttatttaaatggttgaggtggaaggattgcttcaagccaggagtttgagaccagcctagtcaacaaaatgagaccctttctctacagaaaatttaaaaatcagccaggcatggtgatatgtgcctgtagtcccagttactcaggaggctgaggcgggaggattgcttgaggccaggagctcaaggctacagtgagctatgattgtgccactgcactccagcctgggtgacagagcaagaccctgtctttaaaaaataataagccaggtgtggtggctcatgcctgtaatcccagcattttgggaggctgaggcaagtggatcacctgaggtcaggagttgaagaccagcctgaccaacatggtgaaaccgcatctctactaaaaatacaaaaattagctgggcatggtggcaggcatctgtaatcccagctacttgggaggctgaggcaggagacttgcttgaacccgggaggcggaggttgcagtgagccgagatcaagccattgcactccagcctgggtgacagagtgagactccatctcaaaaaaaaaaagaaaattgatttttaatttacatttcaggagacatgtgctttcacagtttgatcctggttctttaggtagttagagctgtaacatgaccacgtttttaacagaaatctgtctttattgtgttagacagattggttcatttgggggcaaaagcactatgagtaactatttttcactagttactcttccttacaagtgatttggacactttggtggtaacaagtaaaatttcatcctactatgtattctgtttacctgttttgttgcttcatctcaataggaatttaaattttacttaccatttttgcaaataaaattgagtagttattaaattaatggaatagatttatgtctttacaaattacatgattttaggcaataatgacaaccaggactttaacctttttagctaccaatcttaattccaagagagaagaataacatttttttatgatctccaggtcactgaactgatgcaggagcagtcatacctgaagtctgaattgggcctgggacttggagaaatgggatttgaaattcctcctggagaaagctcagaatctgttttttcccaagcaacatcagaatcatcttctgtatgttctggtccctctcatgctaacagaagaactggagtaccttctactgcctcagtgggcaaatccaaaaccccattagtggcaaggaagaaagtgttccgagcatcggtggctctaacgccaacagctccttctagaacaggctctgtgcagacacctccagatttggaaagttctgaggaagttgatgcagctgaaggagccccagaagttgtaggacctaaatctgaagtggaagaagggcatggaaaactcccatcaatgccagctgctgaggaaatgcataaaaatgtggagcaagatgagttgcagcaagtcatacgggaggtgggtaaaatctgtgtttcattcatttatttggaggtatatgttagaggagattttgtctgaatattaattatttacagaatgttcttttgattcactgtattcaataattttcacagagcttttaaattagctttcctgttgatcaagtttgtgtcaattaagatatatttgtaatggcatttctgcaaatttcatactctaatgtgaaataattacaattctctgtgttcagtatggtgaaaaagatatgtgaaggactcaaaataaacatgacgtactctttggacctcttgtttccacatctacaaaatgaggatttacagtttagatctcttcgaggattaaaaactgcattttatagctggacgtggtggcatgtgcctgtagtcccagctactcgggaggctggggtaggagaattgcttgaacctgggaggcggaggttgcagtgagccaagatcatgccattgcactccagcctgggcagcagagcaagactccatctcaaaaaaaaaagaaactgcattttataattacaattgataggagaaaatgattttgtgattttaataagtataaatagattgatttggtttggtgttttttattcaaaaatcaaaatatacgaagaaaagagggtttgccctaggtgatagcagcataagaacttgaagaattaccatagttatggatgaccaaaagaactgcaaaaggaaattacatatgattagtagtgaaagttcaaaagttgagaaaattagtaaaataaatgttttttgcactgagatcaggtaataggaaggaatagaatatatcgtttaaacagctcaatgcaattatctctgtttacctagtagtattctgtggattaaattgtacataagcaaatgtgaaatttgctgtatatgcagttctctagtatttcaatcatgt

SEQ ID NO: 8609 - DNA, 6000 bp, Homo sapiens
agcaattttcttgagcaacctagggagtattgctatcttaacattacatagttcagttcatgaacatggtatgtctttctgtttatttattctaccattttttcaacaatattttgtcacttttagtgtacttgtcttgcacatccttgattatgtgatttctgtgtattcttttcaatgctttttattattattattattttattttatttctttttcagaaggagtttttgctcttgttgtccaggctggagtgcaatggtgtgatctcgactcattgcaacctccacctcccaggctcaagcaattcttctgccttggcctaccgagtagctgggattacaggtgcccacgaccaggactggctaattttttgtatttttttagtagagacaggtttcaccatgttggtcagtctggtctcgaactcctgacctcaggtgatccacccaccttggcctcccgaaagttctagaattacaaatgtgagccactgtgcctggtctatttttatttttattttgtagagacagggtcttattctctcatccatgctggaggacagtagcatagttatagcttactgcaacctcgaaatcctgggctcaagcaatcctcctgcctcagcctcctgagtagctaggattataggtgcacccaccacacctggctaatttttaaatttcattttgtagaaatagaatctcactacgttgcctaggctggtcttgaactactggcctcaagtgactttcccactttggtttcctaaagtgttgaagttacaggtgtgagccactgctcttgacctcagtgctgttttaaaggaagttgttttcttaatttcttttttggatttcttattgatagtatactgaaatatgactcatatttgcatattgatcttgtgtcctgtacctcttctgtacttgtttttttagcttaaatagttttaatttggattatttagtgttttctatatgtaagatcctgtcatctacaaagagatagctttactttatcatttctaatctggataccttttacttttttttttctttttgaagaaagagtctagctctgtcaccgaggctggagtgcagtgacatgatcttggcttactgcaacttctgccccccaggttcaagcgattctcctgccttagcctcccaagtagctgggattacaggtgcccaccatcacgcctggctaatttttgtattttgagtagagatggcatttcaccatgttggccaggctggtctcgaactcctgacctcaagcgatacgcctgcctcagcctcccaaagtgctttgattacaggagtgagccactgcacctggccttaatttttcttacctaattgcactggctagaaccttccgtacaatattgagtagaaatggcttgattgctattgtcttatttctgacattagggagaaagaaggatgaagtatgatattagctgtgggctttttatcaatgccctttctcaggtcaaggaaactcttttctactcctaatcgtcaacaaatggtaccactactggataacattgtcatgaggtgtatatatgtgatatgtctaatacagtgtgatcagcatatagaaggtggtgaatatttatttcttttggctgccaacctcgaagttactgattaaaacattaaatgtgtcagaggccatcagcatgcgatttgatttctgtaggccctccatggaaaaaccattaaaaattctgttttcttttccatggggatgttgagatctggttattatatcttacaaatatcaccatgttatgggtttgcctaaagaatattgagttctagtcatagagtgaatcttttaatattatggatcttatctttctataacaaatcacgataaaaccaaccctttcatttacaaggaactacatgtgtggcaaaagaagaaaaagaaaagaaacataccaaccccttcacaataaaaagcattcatagactcaactattagcctgtttattttcaagacagaagaatctggataatctctttggccatcacacaaaaagaaaaaaaatggcaaattttcaaatgttgaagagatgatagaatgaccttttcttataagtaaaggatttgttttggcagggttgtggagttgctcagtgcttgaagattgtctgccaagttgggagattagacagaggaaagagtgcaatcttgtacgtaaagtcattactgtggactgagacttttatgaatgtaagtagacaggtgcagcatttagcaaacatacccagtgttttcaaataaatataaaaggcctgatatctgggaaatcatctaattgttatttccaaacagaaagaaaatcagaatcattcctattctctgaagtcgtctgcttcatttaatgtcatagagtttccttataagaatcttccaattgaggatatcaccaactccacattggtaagtcattggtttaggcaaatagaataaatttactcaattcaaatgctgtacatgtttttattttgttttttaaagaacgacagcttaacttttttgataatttaaactaatgaagttatatgatagcattataacctagtttaatattatcattttactccttaccccgaagtgattaaagctagaccttttagtttagcatcttgtccagtgtaagagatttcttagtatatactaaattatattggagaaattttaggaattttcgtttacaaagttagaaagttggaaattaactgcaacaagtgaggcattttgaagatatttaaggagtaaaaatgggatcagcacatagtaaactggattggattatttaaaaatcatttcaagctgggtgtggttgcctcacacctgtaatcccagcattttgggaggctgagacaggtggatcatttgaggccaggatttcaagaccagcctggccaacatggtgaaaccccttctctacgaaaaatacagaaaaattagctgggtatagtggcgcaggcctgtaattccaactactggggaggctgaagcatggaggttgcagtgagccgagttcatgcccctgcattccagcttggcctacatactgggcgagactctgtcaaaaaaaaggaaaacaaatcatgtcagatgcaatcagaagtcagcctatcattgggagtttcatgtgtgtatgtgcatgctcttgatatcaaatgtgaaaccactaaattatcatatgcaggaaaagaatatactgtgaattccattaaaataaaatataatatttactcagatatttgttgattaagtcaatggactgtttttaaaactaaaagcttttttcctcgataggttaccactaatgtcacctggggcattcagccagcgcccatgcctgtgcctgtgtgggtgatcattttagcagttctagcaggattgttgctactggctgttttggtatttgtaatgtacagggtaagtaacggacttagaaagaaggagagagggaaagcagaagaaaagggaaagggaagaaggaaaagaagaatgaaaagtaagggaaggaagaaagggactgtaatgatgatacttgatgagcattacttattatatgagggaagataaattttatgaaatacaatttaaatgttcttagtggtaatatagtcacccaaaaaatacttttcgtattctacactgatgtgacagtaataatggtttttcttcaactgacagatgggcttttttaaacgggtccggccacctcaagaagaacaagaaagggagcagcttcaacctcatgaaaatggtgaaggaaactcagaaacttaactgcagtttttaagttatgctacatcttgacccactagaattagcaactttattatagatttaaactttcttcatgaggagtaaaaatccaaggctttactgctgatagtgctaattggcattaaccacaaaatgagaattatatttgtcaaccttctccttataaataagttcagacatacatttaataacatagggtgacttgtgtttttaggtatttaaataataaaatttcaagggatagtttttattcaatgtatataagacaggtagtgcctgatttactactttatataaaatagtacctccttcagttactgtttctgatttaatgtacggaactttatttgttgttgttgttgttgttgttgttgttgttttaaagcagtccaaatttggaccttagcaatcatgtcttttgtataggtacttaatgttaatacatattacactacagtttacttttcagaatactaaagactttataactgcatgaacttggatttttttaatcactcatatggtagaattttataaacacatacatgataccatccaaattcttgcttttaataacaaaggtacaatattttgttttagtatgaaaatctggtagatcctattacacttctgtttatattaaatccacaatattttattacatttttaacttgtataaattttaggtcaaatccttcaagccaacctatactaaaaattagttccataatcacaaatggctcttttgtgtaattgtttaatttcacctgaatatcataatgcttaaagccatatggagttggaaattatttccaaagcatatttattccattgttttagtctggctatttacagtataaaaaaagcatttttattaaaatactgtgtagttctttgagatagttgcttatgcatatagtaagtattacattcttagagtagagcagagtttttagttagtattaatttattttcctccattcatgtacttttccttatatttccaaaactgttactgagaatgggtcaagatcagtgagaaatctttacagttgacaggaacctggaccccttaccccaactttatgagtaatgcttggaataaaaactcttaaggcaactcactgatttacttctagcaatagcatgatgttacaggaatattacctctgtttaagcaaggtaatgtgtaaaatcagtctcggctgtcagaataacttctaaaaggtatttttataagcagttcaagttactgaaaaccttttaaacctttctgaagttcgttagtataaattacttttctaggattattaataaaagccacataggtggcaagttgtagttttatatggctctgtagagtggtgaaccttctagaggaatatatgatttattcacagttcctcaaggcctggggatgatgatcagttatacctatttttgtgcaattacatcatgttgtacattagaaatggagagtttaatagctctttaactgctgtcctcattaggtaatgataaatatttcccttaaataattgactattttgctgtgttttaaaaatgattgaaatttatcttgccatatctcataatttcatgcacaagttgactgagctaatcttgagaatatattcgtaaaataggagcacatttagttgaggtatacaaggtaggactctagacaaaaccttctattttagctttagtgaatttcaaaagtaatgggtcttggagtatagatttttattagtagcttgaaagagcttaatcatatgcagtaagtatttttattaccaataaatttaaaattttttaagaaaaatatttttatcctagggccaagtgttgcctgccaccaatcagtaagttagtctataacaaattttaccctaacagttttaccacctagtaacagtcatttctgaaaatatgttggatagaaagtcactctttggcaaaagtgttagaatttgcttttgtgccatctattccttttatggcatctatcttgaaagtaatcttgtattggagattgaaagatgctgtaatttagaaattaacatgatatcttaaattacctttatgaaatatagttttgtataatagcatagattttccttcaaaaaatgaacatttatatatctacaaaaatatggagaagagtaatttg

SEQ ID NO: 8610 - DNA, 6000 bp, Homo sapiens
gttgctcagcgtggtcttgaactcctggactcaagtgatctgcccacctcagcctctcaaagtgctgagattacaggcatgagccaccttgcttacccttgttaactggttattcctattcacttaatatcttctgcctattttttgactgagtgcttgatcttttatgacttctatttattaaagaaactagttctttgtgttttttttccctctagtttgtcatttgggttttgattttgtttatgccttgcacttgtagaaagtcattttggtgtatttgaattattaaatgtttttctttatgccttctgggtatgacgttaaactctgaaaagtcttctccaaaacttaaagtttcttccacggtttctttaggtatttttatagtttgggtttttctttaaaaaaaaaacaacagattttgattttggctccatctgtagattttcctgttaaaagatataagaaatgtttaaaattcccctaccatcttatagattaagcctaagtctttaagacacttaaaatttcgcttgcgaaatgccctttcagtctcatttagcctgaagacatgacttggaaaaacatcaatggttatttacttacctggcttgaatgtcagttcaaaaggctagtttattatagtatttttaagtcacgcattttttgaatatgggctaggcactgttctaggcactggatatacagggatgaataagatcggggaagcacacagtaaacaactaaattaatagcatgattttagatacagattggtgttatcaagaaaataaagacagactgggcacagtggctcacacctgtaatcccagcactttaggaggctgaagtgaggatcacttgagcctaggaggttgaggctgtagtgagtggtgatcatgccactacactccagcctgggtgagagcataagacactgtctcaaaggggaagaaaaagggtgaagcccagtgtctcacacctgtaataccagcattttgagaggccaaggcaggaggatcctttgaggccagacgtttgagaccagcctgggcaacaaagtgagacaatctcttaaaaaaaaaaaaaaaaagctgggcgtggtggctcacgcctgtaatcccaacacttgggaggccgaggcgggtggatcacaaggtcaggaaatcgagaccatcctggccaacgtggtgaaaccccgtctctactaaaatataatggtgcacgcctgtagtcccagctactctggaggctgaggcaggggaattgcttgaacccgggaggtggaggttgcagtgagctaagatcacgccactgcactccaacctggcgatagagtgagactctgtctcaagaaaaaaaaaaaacaaaaaaacagacagagaataatgttcaaataatacgttgaagatgtatgaaaccatacataggcactgacttgttcaactgtgaatatacattcccatgcttccctgctgcctcaactttgctcggcttgtaatgaaatctcctgtagctctgcacataaatgctatccacactttaagacacatgacaactacatacatcattcacagtgtgccaactttgcttttagactggcttcctttaagccagaatggctgctgcaggcccatattgggtgatgtccattggcagaaaaaagagagcatctcttttggtatcttctgaagagcaagtaaatctttctccaaagtgcttcattacatcgtttcacatttcttttctttgttttatttttttttgagacaggatctcactctgtcacacaggctggagtgcagtggtgcaatcatggctcactgcagccttgaactcccagcgtcaagcaatcctcccatctcagcctcctgagtagctgggactacaggtgtgtgccaccatgcccagctaatttttgtatttttttgtagagatgggggtgtatgtggggggggttatactatgtttcccaggcaggtcttgaactcctgggctcaagcaatcttctcacctcaggctcccaaagtgctggaattacaggtgtgaaccacagaggctggccctttcacacttaggccaacaggaatttatccctcagctagatatgggtttacctttccctggtcatagcatgagagaagaacactgagcaagatcagaggctgtttgcaaagagcatgtgaaaggggctgcttcaatacttaaggcgttcagccttgtactgtagtaatctacataagatgctttcccattaatttcaaggctctttgaggaaagcttgtcttatatatcttcatgtttttcagcacttagcccagtgccttgcacataatatgcattaactcttttttttttttttttttggagatggagtctcactctgttgcccagactggagtgcagtggctcaatctcggctgactgcaatctccgcttcccgggttcaagtgattctcctgcctcagtctcctgagtagctgggactataggcgcacaccactgtgcccagctaatttttgtattttttttttttttagaaaagacgggggtttcaccatgttgggcacattggactcaaacccctgacctcgtgatccgcccacctcggcctcccaaagtgctgggattacaggcttgagccaccgcacatggcctgcattaactcttttatttggatttaaaaattccccaaagtgaatttttattggataattttttttaatgtgtcaatgatttgaagctcatggataatttgaaattacttatgatactttggctttataaaatattttcttctaaagcttcaaggttccatatttaattttatgcttgctttcatactttatggggcagagggaaagaactgctatgcacaatcttcattacacatgaagaaacatttatttgatagcttgttcaatgtcttaacagttaacaggcaagagaatctagattttccgaatcccagtccagagctattcctactggtgcatattgcctttaaacagatcactccactcctcctttacctgaaatattcaagtatttcatgtaactgttattgttgatcatgctttttgtttttcttttctctctcctcctaccccggacaaattaaccctagttataaaatttgtcttgtttggaggtacgtaatctacaggctgacagaggaatgaaaatgtgaaggttatgagctagaaacattctatccctaaagaacaaggtccttcctatgaacaaggccagggttgacatcagaatgcaactttattggacttttcaaaaacaacgaatgtgcattttgttcccgaatttaacacctactcattcacgttttttgttggtttcagatgggttgaaacagtttaacaaatctggaattaagagaaagtgaagatgattccattcaactataggtgactatttacagctcagggaaatatcacacaatctgggaaatgtaaacgtaatccttgcagtaagtgaggcgagttatctatagaccaagaggcctccctgggactctgctatctcatagacccaacccatctctctaagggaggcaacatttacgtgtcacttgtcctaggctctcgttgcatttaatacaagttgagcatccataatctgaaaagtccagaatctgaaatgctcccaaatctgaaactttgaacatccacatgatgccacaggtggaaaattccatacctgaccttctgtgaccggttgcagtcaaaactttgtttcacgcacaaaattatttgaagttttataggcgcctgccgccacgcctggctaatttttgtatttttagtagtgatgggatttcaccatgttggccaggctggtctggaactcctgacctcaagtgatctgcccccctcagcctcccaaagtgctgggattacaggtgtgagccaccgctcccggcctatttaaagtattgtataaaagtaacttcaggctatgtgtgtaaggtgtataggaaacaaatgcatttcacatttaaacttaggttccatccccaagaaatctcattatgtatatgcaaatattctaaaatccaaaataatcagaaatctgaaagtgttttggtcccaaactttaagatgaggggtacttaacctgtataagaatttgtgatttgcacgtctctgttgctggagtcaaggcaatttgtagtgaaggactgagccttatcatacttgtacattagtgcctaccatatagtggggcttaatgagtatctgttgaacgaataatcttttcatatgtagacgctggttctgggagggcaaaattaagtccctattcttgaagagttaccagtcaatacatcttccagagagaaccaacttcctgttgttaaacccttcaatgcctagttctaagtcactgacaattactcagctagagacccactcaacctctcctctcctctcaaattccatttctggaagctgttacatggcccttccctcagcattctcaatacaccttctatctagggacacttgatgttttcttcttttggaaatcatgctactgtatgcgttttttactttttgaactgtcttcccatctgctatcccaaggcctccctcaccccagataaaagattcaaggtttctaagcaggaaaaaaagtttgcgaaaatgctgtggtttcttaagagagaacacttaaaatttgcaacaaaggaaatgtggaatcctgtaagatgtaaaaccctcaccacctgtcaaggactactaatttcctcctcctgcttctgacttgaaaaacacgagctaaatctgtctgcctaacgcacaaaaccagatgtccactcttcatctcacataattgacatctgcgtcttttatctacgtaaacaaacttgtcattgaaaaagtccttggctttgaagtcgccggatggcgtaaataacactgacactcaaatcccccgtctgatttcagattgggtcgatttcacgcaggttctatagaatttgccaagactgctggcctgttttctaccctgattccttaggtggcttctgggacagaattacggttctctaagtatttgcttgcaggtgggtttactgaaacggtcgccactatacgaagttcgttcttcccgtgtaactaacgagagcccataccaacgtgcaacgcagccgtgcacactgccgcagcggtcgctgcgatcacgacctttcaaaccgccccgcagccctcgcaaagaggctcgtggcgcccgccttccggtgcctcagtccctgccagtagccacccgacgccgtccggctgttcctcgttcgccctctccctccgcctagcccgcttctacccggacggctcccggcgcaggctgcagctgttccgtcagctgccgctcctcctcccagacgcagagcgccgctctgccccgccccccgcgcaggctgccgtccctacatccgggtaccgactccagccgcctagacgctggcactatggtcatggcggaggggacggcagtgctgaggcggaacaggccgggcaccaaggcgcaggtaccatgtctgcacttttcttgtcgggcaactaggtgccgagcagtgctgcgcccggaagctggccgccactgcggggaggttgggccgaggcggcaggcgggcgggctggggcactggtgcccggcctgctcttccggagctgcagcccctcaatttggctgaggcggtggcggccgccgtgaggcctgcggagctccgacccaggggtaggcgtgaggggcgggtggggtctgctggtggtacctgcctgccgaagccctgggctgcgagcctgtcagcagcaacggcttcttctcgccttgcccctgagccccagctgactagcattggaggggcgcgaccagcctggtggagacccccggggtttcctgaaggtcggggccgctgaggtgggagggggtgtaaacacagcctacctcgacccggcgtccagttcctacctggcc

SEQ ID NO: 8611 - DNA, 6000 bp, Homo sapiens
attggtaagcttatagagctacacttatggaatttttaagtaggtaaataaatggttaagacaaaatagtgttatagccttcattctctgaataggccatctttgactcataaaattacccttactgtttattataacttcagaagtaatttatagttctgaacctatagtatcttttaccctgttcccaagcaaagactggtgactttatctgaaaatgattcctcttcccatgacctaaaacactgtgaggaaaaatcattcaagtggcatgccaagtccctatgaaggaagggctgctatcaaacctaccttttttgagcaaactgagactaaacttctctcttttcaaaattgtgttatcttccttaatcctattttcataatttttccttttgccagtttttcacattatctttgatatgtgagcaacatttattatttacattagagtataccttttagtaataaaatgacttgaaatcatattatttttaaaagccctttgcttctttcattacttataatctcctctaaaacaacctctgcatgttttttttaaataaagcactttctgtcaaataatggacttttttctaaacagaaattattttctattaatttgcaaactgatgatttcacttttttttacttttttttcgattatcagagtacttagtaaatgttatatagtttagttctaagatagttccagggattaaaaggttaagaggaaaacacaaatcaccaaatttctgatttatgtttttatctcctgaacaatattttctcactcatattcctctatcttatcacttagctaaagacagcctaaatttcccaattttctgtccaaaatatttgtgatttacttgtatataagccttctcatttgccatgtgctgtgatcttacaagttagatgttactatacctaccatttattcagctggattgctgaacacagttctggattcatagaattaagaatatcttgttagtgcccaggatttccacgttttgtgttttattggcccttttctttattcagccccttaatctattttcagtcttctggcacgtaatttttttcacagttattattcttctattaacaaattatttttatctttcctagtacattttcacttagttctcttgcccttaaatatctttcacatgcattttaggatattcttttcaaatatttgtaggacaactttgaatcaaaataaattatgttccttctccaatttgaagcattgaggataaatgaccatttgaggtctaactgatcttttcctgccagaagagttatcttacgttctgctatatttgtatttgggccagttgattgtaggttgtccaacattttttaatattgggaaaattatgataaaatgctttaaaaattaatatgccagattaaaataactgaatagtttactatttcattcaagcatgtttaaaacaaataatttcctttcaccagtttttcttagtaaactcctgaaaaagtaggaaaggtggaaagtatatatcatttttataaattttaaattgtacatcagacttttaaaatctgtaatatacaagcaagcaaaattattttaaatgacttaattgtatgctaatactcatctgataataaatgcttcttaaagttgacatttaactgctatcacaaagttttatatgtagaaaagtggggtccttttgaataaaagatcattcaactaaaaatattaaaatttatttcactggatggtaatgtaaccttaaaagcatcataataggtaaagtctaatattagttcccttaacaaaatcctaactgtataccagaattaggtcactgaaagaacttgatttgaattacgtttagacaaaaatgatttaattgtaaattcttaaaactttctaaatgcataattggcaaaaaaaaaaacccactgttaccagtgtaggaagttacaagaaggcacatactgaatgctgaagtatacatatgctatttctcttaaacctcagagcaaccatatgagcattgtaattaatattcccattttacagatgaggaaactgaagctaagagaagctaagtaatatgcccaaggtccacatctagtaacagacaaagctgggatttcagtctatgtctgcctctctccacatctctttcatccataccacactgcctacatgccatatgacaggatgtgtaatgggctaacgtttatttaaaaagttcaggccaggtgcagtggcttatgcctataatccccgcactttgggaggccgagccgggtggatcatgaggtcagacgttcaacaccagcctggccaagatggtgaaaccccgtctctattaaaaatattttttaaaaattaactgagcgtggtggtgggcgcctgtagtcccagctactcaggaggctaaggcaggagaatctcttgaacccgagaggtggaggttgcagtgagctgagatcgcgccactgcactgcagcctaggcgacagagcaagactgcctcaaaaaaaaaacataaaaattcagtcactatactctggcacaattttcatttgtatatgagccaaaccacataccttaatgatttgggaagttaggcaaatatgagatatgtagacatatctatgctgattgttgcttgagaaataattactaattctagacaaaactcaatcctgtatcttccatcatgaatcttaaaatcatttcacttcactcctaacatttcttacattgcagaactaatggtaaagtaaattttacggaaaaagttaagatagctttgggaacagagacctttccctaaattgattccatagcagatttgggggaattaacaaagaatttcagtctcatcaatcctttgaatccatcttcaaaacttctgcttttaataactttagaaaatttactaatctatagaactaattgagtaggatataggaaggatacaaggatataatgtcctttttataaaagtttagtatagcttctttacatgtatccacttgttccagaaaatgtgcattggttctgaatgtgaaaatatttaaagagagaaaggaacactcaagtaagtgtgggcttcagtgggaattatcacaaaacattggcaagtatttttatttaaattattttcaaatttgacttctacagccaagtggaattggtaggctgtagctgttacactgaaatttctagtctttgtaagtgcctcctgaaagtcatttaaaatggaaaaatatttcaatgagcttttccttttttcatatttatggacatgaatattttattggagatcattaactcctagaatttgagattatatttccatacaacattttataaagttatgttgaacttactacctgttatgtgcaggttattatgtaactattcacagattgcttcatatattgctttatcttcccatctaacttcttaaagttaaaatccggacacacatgttgattatctagaccagtcattctggaaattgtaacactcccacataaaccccaggagactttttcagaatgcaatgtttctaaatgtactgttactggcagtttactctccagcatataaggttgcattttaacttttagattatgaactgtgcaaactttacccaaaactatcttgcatgattccctcctaaatatattccttgattaagtaaatctggcaaatcactgtttgagctagttacataaaatttgttatcaagagaaggcttttctacaagtttccagattaacataaagaaaagagggaatcacagggcatttaagtgcaccttcccattactttccttaaatcacctcatagttaggctgggcgcggtggctcacgcctgtaatcccagcactttgggaggccgagacggtggatcacgaggtcaggggactgagatcatcctggctaacacgatgaaacctcatctctactaaaaatacaaataattagccaggcatggtggcacgcgcctgtagtcccagctactcgggaggcagagacaggagaatcgtttgcacccgggaggcggaggttgttgcagtgagccgagatcgcgccaatgcactccagcctgggctacagagtgagactccatctcaaaaaaaaacaaaaaaaatcacctcatagtttatgtctgacttactccaaacctcagttatctgatttgtagtctgtgtcaggaaagttttcttcatatctattctgtctccctcctctttgattttaaatttttttcttttacccagtaggacaaaaaagagcagttggtcatcatccccaatattcttagtcttcagtatgcttcaggcctctcaatgaacacttaagtctcaattcttcagacaaaattgcttaagctcttctcctcagtcctattttaatgactttatatttaagaatatagaattatattttcttttatattcaaattcattactccagttaagtaatagtttgatagtttgatagaatcgagagttaagatgtttctatttgaaagtggattcaaccatcagaccaccagcaaatcggcacttaatttttgtgttatctaacattttctattgtggaattttatgattttatattctcattagttataactaaaaagccatgcacacagaattgtatatcattttgccattaaaattttttaacatattgcagcaagcttagttttatgattgagccacaaccttttacatattttttgtatgaaatattaaacactaaatgcaagattaactttcaaaagcaaaccctacattaatcaggtattatctatggacatttttgtagaccacttttgaaatacttattattttgcaacatagactggactatacaactttcatttaacttttaggtgactgatttaagttgagtgtgcatatagagaaaaacctagaaatttatctcatggcagatacatttgaaagtacttcagaagaatttatgctgtatattaaaactaggctcaaaataaatctatcgtatctttaaaagtccaattctgttattactgtgatgtttgtagtgttactattaaacattgtgaacatacacatttttaaaacaacttgaaacccattttaaaatctgggtaagagagaaggaatcttcagaacaaaatcacatcattagggtgtccagtttatgattgaatttttaagcaaattactgtatttgaaactacaacttgatttggttttcagttttaaaaggcaacatgtgggttttatccattttatttatacctttagatttcagaaacatcttcatgttttagatgcattctacagacatcatgttacttaaaaactcagggcccctttcatccctttgtacactgaaaaagttcaattgttagcaagtaagcaattagatccagttgaatatttaaagtgtttgttgcacagttcatttaatgtttcatcttatttgactttttcacatagatataatatcagatttcattaattataaaaagttgcccagttctgtaattactgaacagagggaatgactcaactaattggctacatgttgcaacaaatttaggcctttagagttgaagcactgacttaaaacgacttacatttctgttctttggtcaaatgaccatacatgatatgggacaaattgtttcattttgtttgttttttaataagggaacttggtaaagtagttcctgtcagataggattttctcaagagacaatttaacgttataaagccttctaaaagtgaactaaatattttataactttagtaatagcttggatggttttgagaaaataacctgtatttatcacattgtcaaacagaatttttctttgaatcagacaagttcaagctctaaattgatgtgctatatacttaaaatcctaggaagttatctgtaaccagtctcttgtctcaggctcttcaccttgttaccaatcctcgtaag

SEQ ID NO: 8612 - DNA, 6000 bp, Homo sapiens
tgtgaatgaaggcaaggtaatgtgcactagtgggtggaagattcaagtttccaagaaaattcatctatgaatttagtaagagaatgggaattttctcttcaaaatatttctgaatgattaaaaatttcatatcgtagccctaaaatatccaattgcataacctataagtgctatgacgttacaaatacattcttggcctttggttgtgattgccaagtggaatctgtattttttatgataggctagaaaaagccttgttgaaaaatatctcctcaaaaagccctgccaagatgcctgacatactcattagcactcgctgtttgggaaaagtacccaatgcaaatactatgatgatggaatatccattgaagccccatccatgcattaacagtttaaggataaaagagcattaatttcaacttgcttaggttggcctacagaattcagactaaagcctgttttaaatccacgagtgagaatgcgatcaggaaagagtcatagccaaaactcaaaaccagataaggttaaaaatcattcaagtcaacccatcattctgtaggtgagaaaagtggttccaaattggttaacagaattttcaaggacacccaagtagagactgaaggtccagctgccctgtcctcaaggcttctgctgcccccacctgcttctccgcggtggtctccactgacgagtggagttgaggcccgaagctgggagagcatcataaagaccctgactcctggtgagtgctctgggaaagtcatccaagagagcgtagaaagaacatgggatgatagacaataatatgaatataagctagctcttctcttccttaaccaaacagacagtgagcattttcaaatgctgccttggtaatcagaacttctgctgatactggggttcctttcttggcaaacaagtatggtaaccacagagattgataagggtgtgaatttctatgggtttctatgggaattattcagctctggtcttttgattctgaggctgagttgtccaacatggtagctggtaagcacatgcggcaatttacatttaaatgaataaaattaaatacaacctacagttcagtgactcactcacactagccacatttccagtgcgcagtagccatgtgaacagcacagagaccaccgtccttgcagaagatttaatggagagtgctgttttaagggagagggttgactgggtctttttgatacgcttattgcctcaaaggtagaaaaattaatgtagcataggaagatcagactcatgctaaagccaggcagactggaagaagcaatagggcttctttaggttctttttccaaggattccagggaggtctgaatgaattttgcacattttgctgctgctttttaaattttgtttcataagggcccctcctaccagatccagtgtttgtgtctgaggaagaaatgagatatacacccagtatggagtgaaggagatttcaatactttatggaaatctgtaaggattccagaaacccaccaaatagaatatactagaaatatcaatttagaatagaaatgtcaaatagaaactactgggcaatattcaagtgtgctggaaaaaaaaaaagttgattgtttaaaaggcgagtaagaaaaaaaaaaaaacccttagtgaccagaaacctggactttgacatcaaacaaaagagagaataataaattaggacctattccattttaactgaagctttgcttctgagacagatgtagctaaaccttaactagggcagtgtgttaaattacagattaagatgcaattatgccttagatctttccttttcagggtgagagcttattgatgttagggctccgataaggggaagcaccatgtgacacgtgatatctattgtggaagcatgaaacttctggagcttttagatcctgtgttcccgagaggcaagacctaaatctctgtcttgctcgcatacctctggcatagtcatgcatccatgaacatttcgtaagtacagtgggatgaacacagatggaaaagcatacctgaaacgaacctctagtaaccaccaatggttgagtgggctggtgatgaaaggtctggctccagctcataaacccatcagccgctactttgaacatgtccctgcaaagctcctgcctgcatgaggcgaggcttttggtgttttcaaattggctctctgcagttgctgctaaaggtcacaggtaaatctgggaattccaccactgcagcattttcgagaacttgttcttggtggtttttccaagaaacctgaaacatctgccccatattgaaaagtacccagagaggaaatgtgaaggaatgcttgtccaggtttccttcaacggaagagcatttatggaaggctgtgtgtaaatagaacacatcagatcagaagttcccaactactggtctgtggaggctttgcatcagaatcacctaagatgtgtgttaaaaatacagattcccaaagaccactccagacccaaggaatttcacctgcaggaaaatggttcccaggaatcagaatttttaacacttcctccaggtgatgctgatataccctaaggtttgggactgtctagctgggaacacttaactttccacaggggtgtggcttggtaacagctttctcttagcatcatttaccaacctgtttcatgttcccccacatcccttcccgtcaaaggaatggaatgtggagtggattatctagtattattttacaactaaggataatgacatgaaacatcctaggtgagtcagtgatgtggccaggaatctcagcttcgctaattagctgttatctagtcagctcagtgtttttgatcacaaacccgatttttgacactggcctttaggtaggcaggcttccctatgggccagggatgtggactcacaaaatactgaaaagcacggtgcctacctagctctttaccactatacctctggtggaaaccagaccaactgcagtcaaaccctgagatcccagtctagagggaaacaagactggcaggtctgagccagtcccagtgtgaagaatttccctaaagatttgttttccatgtggcacatgtgagatttgtgtttagttcccaagagtccttggaagtcttaggttaaaacaattctaagccctctctgggccggtggggtcttgttcagagtaggctggggagagatcggcctcactctgaatcttccctggtctgataaagcactttgaactccttggaattaaaagcaccaccagaagtgtgaccctgggtggtgttaccattatttattgagtgctgccccctagaggattgaaaaatggtctggccgcttgagtccccagggatggaaacctgagactcactctctgtccaactgcaggaaatgaggccttcactcaaggggagtgggaagtcttgcagccctggtacagaggactcccaggaagtaagtgagcgtcccctgtaggacaccgctgaaaaatgaaaagttacagtgtaggcaaccaggccaggaacaaaactgattcttacttttctctactctggaagcagcctgatggggaccttcatccctgagaccccaagaccagaagtccagggttgtcattcttatggttctccagtgggcttaggtttaccttttctctcttctttccccctttcacagtgcccttcacctaaaccctggctacattattctcacaaacaggagtctcccacattgggcactggcaaaaatggtttggcatgcctggtgagtggtggggagaggtgatattaaatggccctctctattcagggactgtcactacagatagcgttctttgtccttagattagcatcttggcaatgacataaaccgggatctctgcttaaggttaataatccaaactgctcttttactttgttaaatatttaaggcttggagtcattctttacaattgagctttaaagaggagaaatgtaaatctggagtttttaataatgtggatgtgctctcaagcctagaaaggaaggaagaaggaaggaaaggagggaggaagaggaaggagggaggcaaagagggaatgaaaggtagcatttaggctagccaagagacatgctccctggaagaactcagaggcctctgtgctgtgcctttcccaaccaggcatctgagattaacagtgtgatactcagcctgtggatttccactctaaaatcccgcgccaccccccaacacagcttggctcaactatttgcaaatcacttctgattcaattttgttttggttatctcagtgtaaataacagttaagtgggagttacagatttttcaaacactaaaagtgataaagctaatgggcaagtccagataaggagggaaaccacccagaagaatccacaagtacaagccaagaagaaaatgggtagtcaggtgtgtgtttctcgtcaccgaaactgtatttttcttaatctacagaaaattttactttcttaatttaaaaaaaatcttaatctgtaaatatttttctgaattttcttatttttcatatacctcttttgtggcagaaaaggtgtacatgtgcagggtgtaatttaggctgtttctgttgcagtctttatgataatgtagtaataggtgtctggtgaagcaagacagtttggaatccacaaagccatcctcagaaacaaagatacaagtgtttccccaactgttagcttgcagttccctctaaacagttttcacgcctccatttaaaaatagttggcataatgatgttttctttctctaggctttgtgaccacgtttccatgggggaaaatgtgaatagacgtagttacagtagcatttggatgagacgccttcaagcacctatactttttcgggggaacttgatggaatccaatttaattacctgaagaaattatttgctgaagaaagtctttcctctttttagggtagttacagttaaaggcgcaggggtaacgaaatcctaacccagagaggagcagagcatgtttgggacataacaaaggatctgagtagtaaacgcagcgagtgtttggggttttattcagaccgggctgacggtgtgtgtcgccgccacgcaccgctgcctgttcgaacgcatggctgagctgccgaccggctcgctaccccaaacaccgtacgccacccaactcctcttgtaacgccatcgcgcgtggcattgtgttgggttctgcgtgtgtggcatcggagtcgtggaatttagggggaacaaggcttttccccccgtccccccggggtctcccttgggtgggggcgacacggccaaggcggcgcgccctgggggtgcccgggggcgcttcttccccagggcgttacgcaccggcggcccggcgcggaggtgcgcgggggcgatcgggagatgcggggcgggcgaggggtggtgggatgggcgccgccttaacttcgatcctgcggcggcccgagagaagccgtcgccgccccgcccgagctgggtgccgcggcactctgctctgcgccgcgcgtctccgcggctgcctctttaatcaggaacacagaaggggcgggccctgagccggcgcgtaatcggatagctctgccgcggctctgacatccacatgctgctcggcctgaaaaggcagtggggagccggaggggaggcagagatcgcgagcgaggcaccagcctgcagccggcccccagcacatcctcagccgcacagacactcggcgaggtggaggtgagggcgggcgccagcgaactcggagaggggctcgctcactcccaggcgatcccagccgccaccgccgccgcaccagcagcagcaacagcagcagcagcttccttcctcagactcccctcgagaggctggccaagcgggtgtagccgttgggggaggctcccgccgggggaacccggcgaggacaagagcagggcggccgccttccactcgggctgtccggcggcggctgcctccgcccgtgtgtccgtcaagggtg

SEQ ID NO: 8613 - DNA, 6000 bp, Homo sapiens
attctgcccttgcttccctggggaccaaaaaaataaaaataatttttttggctggtggtgggggaaacaaggtctctctctgtcacccaggctgcagtgcagtggtggtgtgatcacagctcactgcagccttgacctgctgggctcaagtgattctcccacctcagcctcctgagtaggtgggactacaggcatcaccattcctggctaattttaaatttttttgtagagatggggtctccctatgttgcccattctaaaaataattttaaaaaataaattgtgccgttactgatggacatttgggctgtttccaaccattacaaataaagcacccctatatatcctcatccttgctctggccactgtaattccggtgtctttgtgcattcctacagtggaattagtggtcagagtatgcaaattgtaaaatttgctatgtagctaaattgaccttcaaaagattatactaatttgtatctccataagctgtaacatagtgtttcctatagcctcatcaacactaggtattattaaaaatgtttaatttatgccaaaatgcatctccttttttttttttgagacagaatctcgctttgttgtccaggctagggttcagtggtgcgatcttggctcactgcaacctccgcctctcgggttcaagcaattctcctgcctcagcctcctgagtagctgggattacaggtgcccaccaccatgccagctgattttttgtatcttagcagaggtggggtttcaccatcttgcccaggctggtctcaaactcctgagctcaggcaactgcctgtctcggcctcccaaagtgctaggattataggcatgagccaccatgcccagccacatctcttatttttaactggaatttatttctttgctagtgagattaagcatccttccatatggttactacttttatttcttctttagagcattgcacatagatttctttttcccatttaaaaaaaaaaaaaggtttctgctgggtgcgatggctcatgtctgtaatcccaaaactttaggaggccgaggtgggaagattgcttgagcccaggagttcaagactagcctgggcaacaaggtgagacctcgtttctaccaaagaaaatttaaaaactagctgagtgtgggtggtatacacctgtggccccagctacatgggaagctgaggcaagaggattgcttaagcccaggaggtcaaggctgcagtgagccgtaactgtgccactgcactctagcctgggtggcagagcaagaccctgtctcaacaaaacccccaaaaccaaaagaaaacaaaaaaagcaaagcaaacaacaaaaaagatggtttctttttcttactgtggctctttgaattttaaagatattaactctttcttacatattgcgaatgtttttcctaggctttttatttttttaaatttctttcaccatatggaagtttggaaatattatatggtcaaattagctaatctttcccaatattctttgtcactatactacagtgccaactgaagtggtgacaactatggctggaggacggtaattaaaaaacagggaagcttcctaaaaataagaggtgaggataatgggatgaataaagggagaatctttcatctgagataaatacaaatgctcaactcctacttttttgttttgttttgtttttttaaagagatgggggtctcactatattgcccaggctggagtgcagtggctattcacaggtatgatcataacatacggcagcctctaactcctgggctcaagcaatcttcctgcctcagcctcccaagtagctgagactacaggtgcatgccactgtaccaggcctcaactcttattcttaacaacatgcctcggatgagtaaagtatgttatacacaaaaaactagggcagggaaataccagatcacttctggaaagccctgccaagcccagggtggtagagacagggtttttgcttaatccctggctgcagttcctgggtaggagggtcaatatggaggaaagaatctccaaggactgtaagagtagggacaagccaggattgggcggaggtgtcagaaaggtcttactttctggattactgcctagcacacatgaagcccttgcaggacagactgccaaaagcttggtagaaggctgtgcaccacttcgccagccttcaatcaacatgcaccaactgcaaaccaaatgacaacatctccaagtataaaaataggatgctaccttgtgttctcatcatatttatacagaatcaaaaataacccagacaaaacctcagagctgcttgtcccactggcctgcttgcaactgtgtttgtacctggggtctctccaggagcacctggggtcagggttccagctactgtctccacaatgatctccatgttccctggtccctcttcagttgctgtggcctctaccagcaggcagcctggctcagtaggtataggtgcagggtcccgggaaggacaggggctctggacaggccccaggattccacggttagagagaggcggggggatcagcaatagctcagggcacagtccatccatctccccggtgctactggctggctgtgagtccaaaagggggtctgtcatcaccaccgacttgtgtgttttggcttcttaaatgctgacaagccaaccagaagaaaaacaaagtaaggttagagttcttactttcttcctggctggcgtgggtacacagcccagtgcccacccacttaggcattttcttgcatggcaatatgccatatataccatatgagactaaatagaggctttcttttatgataatgttcagaacaaaaagtataaaaatgataacagaatattaggagacagccaacaagtattggccaatatattaatgactgcaggttgtcttctgctagctaagtgcccttagccaagtcattaagcaatttgggtctcagatttcttatctgcaacaaaattaggtggggcccaaatatctcagaagtccttttttttttttttttttgagacagagtctcgctctgtcacccaggctggagtgcagtggcgtgatcttggctcactgcaacctccgcctcctgggttcaagcaattctcctgtctcagcctccccaatagctggactacaggcatgtgccacacacgcccaggtaaattttgtatttttaacagcgatggagtttcaccatgttggccaggctggtctcgaacttctgaccttgggtgatctgcccgttttggcctcccaaagtgctgggattataggcgtgagccaccttgcctggtccctttccctcttaacctttgataatctcactattcctcagcatggattataaggaaggcccttccttcatcatctggctcctgctgacctcccctgactcatctcccacttctcccctcagcagatctctgaaccagatgatgtgccattctccagacccaccacattctcttttgctttcataccctcacagccttttgcgtctcttggcttgatatgccttttccccttctcaatctctctctcttatctggctaaccaattaactatccttgaagaagctgcacaaatgtcacttccaccatgaaggcctcctgacattcttttttttgagacagtcttagtctgtcacctaggctggagggcagtggcacgatctcagctcactacaacctctgcctcctgggttcaagcgattctcctgcctcagcctcctgagtagctgggattacaggcatgtaccaccacgcctggctactattttgtatttttagtagagatggggtttctccatgttggttgggctggtcttgaactccagaactcaggtgatccacctgcctcggcctcccaaagtgctgggattacaggcgtgaggcaccgcgccgggcctggcttcccgaaactcttatcttctctcttctggcgtcctaagggcactctgtacacagccctatcagaaacgaggtcacactgcactgttgtttacctgtcagtctctctccctagatgtatagcttttttagtaatttgttgacattatcacttcaatgatattactttgtgatactgacattatcacttcaacgaacacaaatcacccacaatcgaagattccagtgaagaaccacagatatggagctgcattggagtaaagctaggtatcttgtacaaaaccagtggttcctcacctataacgtaacacatttggagaaatttcaaactcattaactgactatggcctcaaactaaatatgggaacataactgaggaatgaatgacaattgaattgcataccctgttatacatggctaaaatgagtttaagctgaataattagtaattaataagaatgatgggaatcacttcatgaaattgagtcacagacaagatgcaaaaagaaaaaaagaagaagaaaccaggccgggcgcggtggctcaggcctgtaatcccagcactttgggaggccaaggcgggccgatcacctgaggtcagaagttcgagaccagcctggcgaacattgtgaaaccctgtttctactaaaaatacaaaaaatcagcagggtgtggtggcacacgcctgtaatcccagctactcgggaggctgaggcaggagaatcgctggaacccgggaggcggaggttgcagtgagccgagatcgcaccattgcaccccagcttgggcaacaagagcgaaactccgtctcaaaaaaaaaacaaacaaaaaccaagatcctgcaatctgatagtccctatttccagaatcccatggactcaaaacaacagatcacagggattcacaaggtggctggaaagtgcactcccgtggtcagagggattctctggaaactgcagcctccacttactgaatattatcgctgttctggggaatcttcaagcttgaccatacatggcctccggggggagccaaggaggacgctgagccgtcaagattaagaaccttcacctgcgggagggcagggtgaggtaggagacaggtgggcaccagagaagaaatacgcttatcttccgggcaggagggctgaggaagagaaaggacagactaaggcagagagaaggcctggagaaacaacgggccccggcctagcgacccaggttcccacctgcctctggctctgactcaccgcgtggtcttggacagacacagtcgcttcgcttctctgggcctcagctttcctatctgtaaaatggaggtgatgacagtgtccacatcgtcgggcaggagctggatcataagagccagcgaactggaaaggcggtttgtaacctggaaggcttgggatggagcatcgtcatgattttgtcctgagagcagcaggtacccgggcggggtccagaaccgtgacgcgactgcagcgccggggcccagctcgtctgggtgctcccttcagtacctccttccgagagttcccagcgcccaggcccaccctgatcccggggctcgaaaaactttgcctccagctcgctccacccgcattcccttcccagttccgccccgcagccgctcactcacctccagacccagagccggcgggagccgcatctctatggtcggccgcggctggaacggcccccggggcccgctttgtgcgaccgcctccggctcagccgcctctaggatattggggatgtggaagccactctctcttcctcttgccggctgccggggtactctatgttttgtctctgtggtttttcccgccctccacccccactccagccctgaagccggagaagcaccatcgagagctctggggtagagtggcgtgggcttctctgtgggtgtggcgggaagtagatgaaaggacccggggcggggccgaacgcagcttccccaaggtgcaggcgcggtgaaaccatcgagacggagggccagagagtcacggcggtgagagggctgagtgacgggttaccccaaaccatgtggctggaggcgcgagctggggtgt

SEQ ID NO: 8614 - DNA, 6000 bp, Homo sapiens
ctcaaaataagatgacatcctgaaatattaggaattaggatttcaacatatcttttttagggtagggaacacaactcagtccataacagatcatatgatttttctctttagttctatgaatatgatagataatatcaatggatttctaatacttaacttatttgcattactataatgaatctcactttttaaattaaaaagtatttttttaatgagctgctgaagtctgactcctgatattttaagatttttgaatgattttcacaagtgatagtattctgtcattttcttttggtactatttcaggtttcaagatcaatatattgcttcataaaagaaaatttgaaaaatgtcttcatctatgatctggaatatgttaattagcattgtgattacccattttttaaatgattgatagaatgtttttgtgaagccagctaggcctggtgctttccatagaggagtattttaaccccctttctctagctgttttatgataattagtctggttagactttcttttctgggatcaattttagtaagttgtgttttccttaaataatatctatttcatctatttttaaaacttattttcatagaggtgtacaaagtagcctctaaggcttttaaaatttttcctctgcttttaatgattatttttccttcagtatttaaaattttgtgcttttgtttttcctcttgttctttctttattagattagctaatggtttgtctattttgttgcattttttcccaataactctattttgcatttgttagtttcattgtttttctcttttctaatttaaggatttatactttctttgaagaggtccataattttggcagatttttgggataattctgattccagatttgagaattacagctgtgatacgtgtagtttttaatagaaattgtcatctggtgctccatttttttccctttagtattgtttttatattattgcacgcgtttttctctgtgtatgcatcttatatgtgtgcaacagatggaagctccttgaggccaagactatgcattgtatttcttagggacaataaatattgatattgtggctatgaaattagagaattaatgtaaacatgaagaacttgtagtatgcagcttctgaaaaggctcccaagaatccctaccatttactactcatattcttgtctcactccctctgtccttcagtgtgggctagatctagggccttgcttctatgaagtagaataggataaaactattggaatgttacctccaagattgggctataaaatacttctattttgtcctgttcagacactctgtatgtcttgatttcctcatttgcttgttttggtgaagtaaagggctgtataatgagctattctatgaagaggctgtataatgagctattctatgaaatggcccatgtgttgaaaaagagggaatggcctgtggccaacagtctgcagctaattgaatctaccaaccatcgtctgagtgatcttggaagcaaatccacctccagttgagccttgagatgatgtagcctcaaccagcaccttgactgtgaccctgtgagaaaccagagccaggggacccagctaaaaccacttggattcctgctctgcaaaaactttgagatgataaatgttgttgttttaagctactatttttatgtgataatttgttatgcagcaatagataatcaatacagaacccaaattctgtatacttgtcttgatccaggaagcattgcccaattgaaaactgaacagtctagttgtaatttggaagtaacgtgctttgcagagaaataactctaaatcagaacttaaaatgcaataatgtaattaataccaaaatttttcatttataatgaaggtattttgacaacacttaaaaaattactttaacttattaaaggttaccaggtgtccctgcccccatttttttttttttttgagataagatctcactctgttatccaggctggagtgcagtggtgtggtcatggctcactgcagcctcaacctcctggcctcaagcaatccttctgcctcagcctcctgagtagctagggctacaagttcatgctaccatgcctgactaacttttacaatttttttgtagcaatggagtctccctgtgttgcccaggctggtcttgaactcctggcctcaagcaatcctccgcctcagcctcccaacgtgctgggattacaggcatgtatgcctggccaattgtcttttggaataacttatttttagtgtggcttcttttaaaaaattctatctgcacatgagtatttataacatgccaagtgaatgacaagctgcctagataaaatgtgtagattatggctgaattataacatggatttttactgtacaacattttaaccaacattagtttcctaatactggtggagactgctggttgcccacaaaaaaattctgtcctccacttcttccacaggaatatagcttaagcttgacataaggttgccctgctagagataacatttccaattgtttctcactgatggaatgttagtgaaagtgatgtgtgaacttctgcctcacttgcttaataagacattgctgctcagaacactctctctcttcaccctttcaggagctgaacttcagatgttcagccctaacccagattcaaccatgcaaaagaggacgatgacctaaggctcagtttcagggcatggtggagcaataagatgaaaagaaccagagtcatggagtagggccatggagcagagcttcctactaacctcaactgcttgccttagaaccattctatgaaagagaaatacatgtctgtgttccttaagccactctattttggggtctctttgttatagtagcttaacctttatccgaactagtattaatatatccatcattgattccttttaaatatgtcattttgtaattgttacatatatacaagtgagcaaagtacaaataactggatttctgccctggcaaaaaaaaaaaaaaaaaaaaaaaaaaaaggtcggggggcgggatgtgaaatgtatttcccacaggtatgactagtgttcagtgatcaaagaactacagggtgtttctctggtatcaagaaaaaaaaattttttgcatgactgcaagctactatttgatatctctgcaccattacagcagtctttcagtcctaccacttctcaaagatgttgatttttgttaggttggttgggaaattcatgttcagaataatcagactgggccttagaaaaaaaaggttctggggaaatggactttaccactgcccaggaggctcaagatgtcctactcaagatgttcagagccaaattctcttgaggattccttcctagattgaatgactccagcacaatacaccttcttatcatgatctcactaggccttatagagcttgtctcaaggttatttttacaagagccttataagaaagacaagaagtgaggattatcatttcattacagggataaactgcgacatatggtgacttacatcaggtgacttggtgagccactagaagctggaatcagtaactgatcctccatggagataaaatgctctgtctacaaatacaattctttggcaattaacttaatgctgcgtgtgccatgttttgctttgcctatttttcctaactggtagaaagaaaaatcgaagcactaaattcgggagacacatgatgcaagtgccttcacaggaaaacatatttctttaacacataagcagaacaggtccccaacgatcacagctccagcttctaaaaccaaaccacagggttttgcctcacacctgtaaatgacagccagaagcattgtggagagatgcttccacctcctgggccggacatttctgtgtgtgatcccgccagacatgacaataactctgcgtgtcttctgtaagaggaaaatggtttcccttaagagcttcagcattctctcagtccccttgactttgctctccagacaggactgagaagcaagaaaagtagaaactagggcatgaaggggactacatcatcctggaaagtcacatcccaaagacattcaggcctaaaaggacaactgaataaataaggcattgacaggtgttcattaatcatttgtgcaaccaaattcttagtaggctttgcatggacaatcaggaaacatgcaggtttctgctgcaaacgaaagacggggttgaattgcacttttgttgcagactgatcacctgggcctaatttgattgttgcctcccaagggatctctgagcccaggagggaaatgtaggagggaggagggaaaaccaaggccggcctgcaggatgtttcctttgctatcttctgctgagtgctctaaagcaggtgcaggtgcaatgagatacctaatcctgtccccagtcctccagcactttgttctcttctcgtttaaactccctaaatggtctggtggggttttcccagtgtcattgcttaaagagaggcagagcggaaagaaagaagtaggagaaagcggtaagcatctttgttctcaatgcggaaaacccagaagggactttccttcccacccacctgaaaatgttccccagttgccaaatcagaagggcaggggcagcgacgcggaagatgactcagggcccactttgaacctcctgggtacttgagcaagctcaagggtgttcggacctctagggagacgttgcatcacgcagtttggaaagaacttgggaattctccctggggggctcgctgtatttactgggaactagtcttgcaggaaggtgagagtacgtggctggctgtggggagctggcgtgggaggaaatccgacttcaccttgggctcagagttgcaaggaaggtcactgtgggatcagcctgagcccaaaaggatgggctaatgggagcggccgcaggtgcacgcgcgctcggccgctcccattagtgttacgtctgccgggggaagaaggtggggtggggggttgggggcgccgggagaagagaggcgcagttcggagatcggcactcctccgtccagttacaggcggtcctgcccccgtggccgcccggggccgcccaagccctccgggacggagagaaagggggacgcgttgcgcaaggtggaggcagacacctgggcgggcgctaggacccgggcggcgcacctgttggctgggcccggggccccgcccgcccggcctccgcccggagtgcgggatcggcgggggcgaggcgggagtggcggtgccagcggagggcaccggcccggcgtggcagcggcggcggagcgcggccccgggcacaccatggccgagctgctgcggagcctgcaggattcccagctcgtcgcccgcttccagcgccgctgcgggctcttccccgctccggatgaaggcccccgggagaacggcgcggaccccacggagcgcgcggcgcgggtccccggggtcgagcatctccccgcagccaacggcaagggcggcgaggctccggccaacgggctgcgcagagccgcggcgccggaggtaaccatgggcaggtgttcgccgggtacggggagggggcggctgcggacgtgcgggtccctgcgactccgccacgcggggccggccgggccgagagggcgccgtccccggcagtgacccggctcccgccgctgcgagcggacggggaggcctggccttccagtaaccaggatgccaccctccaacgctgccaggggcaaccgggtctattgagatatccccagacgctttcaatgcagtccatttagagacttcccactttcaaaagtagttaaattcacgtagatgccagcaaatatgtaagagttacgtaatggaacggaggagcggggatgtccttggcacttccccggggagacgttcttagactcccccccacccccgtattcttgcatttccgcccatcccccttccctgatgcgcacaaatgcgggtgcagccgggctcagcgcgctcctcaccgcgctgc

SEQ ID NO: 8615 - DNA, 6000 bp, Homo sapiens
gttcgagaccagcctcaacatggagaaaccccgtctctactaaaaatacaaaattagccgggcgtgatggtgcatgcctgtaatcccagctactcgggagtctgaggcaggagaattgcttgaacctgggaggcggaggttgcagtgagccgagatcgcaccattgcactccagcctgggcaacaagagcgaaactccatctcaaaaaacaaaacaaaacaaaacaaaaaacaattatggtcattttgagaactggtagtgaagtttatatggtcttagtctccatttcaaccttggaggcagatctgtggcaatgagaatagtaatgtataggaacggtgggtctgctctgatgtcagtcttttatgatgatttgtatattaatacaaatcacgtttttgtgagtccattcatgctgtggatgttttcttaggcattagcataggtcatagtggacacatactgaataggtcatatctgttaaggctcttgctacaaagcatcaaaacttttcagaactatttcctctgtgaaaattcattttaagtagcaagttgtttttttctgtggttcattcccatgcctgagatttgcagtaatgtagaactagtttaccatcactgctgaaacactcatagaaggttccaaattcctggtccagggaaagagcaaaagcctgactcacataaataaacaactgaggttgcaagtttaaggaacttttttgatgaagtcaaggagtctttggatggttcgagttcactctactgcctgcttctttgttttcataataggaacatgtcccacagcctttagtaggatgtcagaattttcttgatgttgccagcaggatcctgtgtcccaggaaactacagtggaataaggggggtctgaggtgcttgctttggggagacctctagagtaagtcctttgctgccagcagcagttaagggaggtagctgtgacattgtcttcagcttctgccatcttgttaggtcccaggtgagattttgaaaaggattgttcaggggtggtaagagctcaaacaggcctgcctcagcctcatgataagccactgcatctggctaatttttttatatatgttttttgagacagggtcttgctttgttgcccaagctggagtgcagtggcaggatcacagctcattgcagcctcgatctccctaggctgaggtgatcctcccatctcagtctcccgagtagcagggactacaagtgtgcaccaccacaccctgctaatttttctcttttttgtagagatgaggttttactatattgccccggctggtcttgaactgctgggctcaagcaatccgcctgccttggcctcccaaagtgctgggattacaggcatgagccaccatgtctggccatgatattatttttaattcaaaaacaaacatgcaaaattaaattttagtgagagaacttagttggataacatctttcttctgggttattagggtatgtttattctttgcaactctgatgttctaggtgtagcaagaccgtttgttttcattttgccattttcctgtacagaaagctttaatgtctccccatgacctttatggcaaaaaccaaattccctcgaccagtctttggattactacacaatacattgtcaaagaaaatagcctggaatggtgaacagagcctgaggctcagttgggagtcctgacttctcatcagctgtgcatgagcaaatttggaggtgttccttaacttgtaaaatcgatttggatttttggtattttaagcatgatttcctttagttctttttttttttttccagagtgctagaattcagtcttttagttctttgaacatatttataatagctgctttgctgtcttgtctactaagtctgacatctgggccttcaaggacaatttctgctgcctgcttttcccttctttctgtgtgtcatacttttctgtttatttgcatgcctcatgattttgtgttgtaaactgggcattttagatagtattttgtagcaactcggaatactgattttccctcccctcttccagggctgctgcttgttgtgttgtttccttatttgttaactgacttggctgagctattacactgaggtttgtttattctgcacagtgtaccctcagatgtttctcctcaagagggtacacttgggcacgcacatagtcaccctggactgcccttcttgagagatgatagccgattttcagcagggctttctttaactctcagatctccttgttaagcttctgctttcattggtatcaccacccagcaactattcttcactaattgctaactgattgctttattgttttggacaaagctttgggccataaatttccccacttgtgatccagttaaattaagatgccctttgtataggggttgtgtttgatggcagtctttgaggcttgtcatgtcaaaaaggaggattcttaggtatctctttccctggttctctgtgaaacttctacagtagttggttagtctttcacttgctgctgtcacagaactaccagcctcattttttttttttttttagatggaatcttgctctgttgctgggctggagtgcagtggcgctatctctgctcactgcaatctccgcctcccaggttcaagcgattctcctgcctcagcctcccgagtagctgggactacaggcgtgtaccatcacgcccagctaatttttgtatttttagtagagacggggtttcactgtgttggccaggatggtctcgatctcctgattttgtgttctgtcctccctggcctcccaaagtactgggcagcctcatcataattgcttaccaccaatgtctgtgttgtttttgacagtgccattaggcatgaacttttccattctttgttctaaatatagtcggtcttagaaattgctaaggggctctgtgttcttacagcctgcttctccagcctgtgcagaacctttgtgccattgttctggagctggggctggggacagcagcttgattttcttatagttatatctgttctgtgagtggtctactaggccatcaatgtacccatcagtcttctctgtttggagcttcttggcctgcatggaacctctgctttacaagaggtgaggcaaagatgatctgtgcttggtgtccttggcctgatgcatctggggtagagcttctgccctaagaatggggactggatgaaagagaaaggattcttcagttctctcatctatctacacttgcctggaatagaatttctgcaacacagagctaggggtaggaggtgaaaaatgctggctgcttgcgtcacttgggaagaaatcgtagtcctggatttggagctgggtagggttaactagttactagttagcttcagttttgtttcttcaagaatgatggccggatgtggtggctaacacctgtaatcccagcactttgggaggctcaggtgggagaattgcttgaagccaggagtttgagaccagctggggcagcatcatgagagcctgtctctacaaaaaaaattttgaaaaattagctgagtgtggtcacacatgcctgtagtcccaactgtttgggaggctgaggagagagaatcgcttgagtccaagagtttgaggctgcagtgagctataatcttgtactgtactctatcctgggtgagatcctgtctttaaaaaaaaaaaaaaaaaggtattattacccacctgccacacaatggctgttcccctctgcccggagtgctctttcttacccaaataggcacatggtacgctctctcttccttatgagtctctgttcagatatcacttagctgtagcacctctccaacgttgccccagtcactttctattttccttacctgggtttattttcctcataacatttatcaccatctggcacgtacacatgcatgcatgcatacctacatatttgcttgtctacctctcccagtgaacgtgtaggttgcacgagagtgggaacttaggccgttttgtttactgttactttcgcagtgcttagaacgatatctaacatagtggattttcaataaatctgatgaatgcaaagtacagaatgaccaaagtatactgctttcttgcgtcatagtttaacctaacttgaaaactatctgtagagccattgtggaaaatgaattttttgtgtttgcaaactccagttgcttgttgctgactagagtgagaatggggctcacagggaaggaatgtggtgattatttggcagtggctgctggggctgtgagagaggatggatgtgttgtatttgtaaagtacttgccatccctaatgcagtgagatgctaaagcacaggaaatgggtaaatttttggtcttcccccaaccctctttctgacttgctccctttttactactgggaaatgtttgtggatacttaaggttttggttggaacagccgcctgtttacagtatgatgtggaaacttttcttgtaattccgttgttaatagatattgtacaaatgagtctcttagaaatatcaagacattgtaggggaccagtgtggtagctgctgcctgatagaaaaaaaaaaatcttcatttgccgatgtaacttttctttaaattattttaaaatgattttgaactaacgcctttctttttcttcctcctagattctcgctgaagtctgttaattctactttttgagtacttatgaataaccacgtgtcttcaaaaccatctaccatgaagctaaaacataccatcaaccctattcttttatattttatacattttctaatatcactttatactattttaacatacattccgttttattttttctccgagtcaagacaagaaaaatcaaaccgaattaaagcaaagcctgtaaattcaaaacctgattctgcatacagatctgttaatagtttggatggtttggcttcagtattataccctggatgtgatactttagataaagtttttacatatgcaaaaaacaaatttaagaacaaaagactcttgggaacacgtgaagttttaaatgaggaagatgaagtacaaccaaatggaaaaatttttaaaaaggtaagatgatctttcattgcctttgaattctttcgaataaaatatcctgttagaaatgaagtaaagggcaagcacagcctgcctccattagaattcgctgttgaaggagaagcagtgtaggaagggggctagactaccttctaatttcttcctgtacttaccagcactgatatgttctgagttttcagaaggacatcgcaacccagtggtgtggagctcttccccagtgtctaccagggtttggaatgtctagggcagttttgagtatgaaaccatactccctgtctctagagcagctgggtgctggaaatggctccaggttttggggtgggacctgctgtgttaaatgtggcttagatgtgggttgcagtgagtgcttcatgtctttgtactttggctgtggcagttgcatggttcttaaaacatttcttttcagaaatatggagaaacctgccattgttgatttgaaacaacgggcaagatgttctcagaggcagtgtaacagcgattaagagcctggactccagacccagactataggtctgaatcttggctttgccacttaactggctttctgaccctggaaaagtaggttaactaattcgcctcagtttctttttctgtaatatgaagataatgatcattactgacactcaagagccaagctgttctaagagctttacatatatcatcttaagactcacagttaccctatgagttagttgttattattttcactttacagatgacagcactgaggcacagatagttgaggtaacctaccccagggacactacagctagggaagctgggactggaatccaggccttctggctccagaactcataccctccattcttcactgatcacagctttcatgcttgtgaggattgagtgtgtgtgtatatatctgcaatg

SEQ ID NO: 8616 - DNA, 6000 bp, Homo sapiens
cacacatgcacgcacagatgtgggcatgtagaggctcacgagctggggctgtaaggggagaaaaacaagttaaatacaatcatcttcttacctctgtaattttctccttggcatttgcctttgattaatggtcctgtgtcaccccctccccagcctgcatacctggggatcagatttcagtttcctagtgtgtcctggtctcaggccctcggcaggaggagctgggtctcctggagcggttgggggagggtcccgtgccagccaggagggcaaatctggccagcttagccctaccccagtgtcctgatgcccactggccaagagggcctggcccgaaagcactttgtggagcagcggccctgctccatccaggtccttccctgtggcagcgtggggactttcatggctgtcgtccattcctgggatttggcgccccggcaggccccacggtggcttctctgctttcctgccgcttctctctccattccctcatttctgctctcttctctcagcagtccttgcatgtttcaagaccgtcagcagattgccagtgaggatgagtttctcttagtgtggagaaaaaatgtttatggtgaaatcacagaggcacaacctggccagcccctctgtccaccgccccactctctccaagttccctctccccatgagggctcttccagcagtgagcttttgttgtctggagatgccttgactatcagggatggaagagaagagggaattcgcctggcccagccaagccgagagcgcatctgcacagatgctgcccgtggggcctgcagtctggaagggaggacaggagagtgatggggacccctgaccctgttggcagatggcatctgtgcctctggaccactgggctctgtgtgctcaggtggacagtgtttgcccactctcctctcccccagctaggctctgtcttgaacacatacaagacacacacactcggtgggtgccctggcctctgtggtctggagcctgggaaagaaagctgctgaggaccaggagagatgtgggggaggtgagatgagactgcctccccaacccccatcttccctgttctcagcctgggcctcaggagtgcgtttctggctgccgaacccctccaggcaggctgcaatctgcaatcatcgttaaatcggcttgcagttaatttggacattgttactgggggatggggcccgggagcgctcccttccagctgtgggggtctgccgagttaatgctacagttggctggtttccccctgaccattttggccctggctttggtaaatcatttaatgagtgcccctgtgggtctcagtttaagcctgcagggagaggcccaggcctctctcgggtccctggacttccggctcatgcgcccttcgctcagagagctctgttgccttggaaacaatatgcaatatttttctactatctaaatgggagcccccctcctcagatacctcactgtcagtaactgcttcctatggggagcaacatttttctgggtccccagcatgataggtggtgcggctggggtctcaggaaggtgggccattcggccatctttctagtgagctgggcaccagggatcccaaggggccagggctctgggttgagcccaggctccctgatgccccactgtccccagacaggtgtaaataccccgagatcacaggctgctttgagggccaaagggacagtgagggttccagggctttggtgtttgagccttggtgttgattgggcacagtaggcagaggcagcgctggggcgggatttaggagttctgcctctgtgtggggctttatggaggaaatgccttcgcctccaagcagggacatctgcgctttcctgtctactttctggtagcctgtaatgctgccttctgcacttctgctcataatggtgcctctgagggtttggctctgcaggctggagcggagctgggagggtggcagcgtggctgagcccgggtgtgtgctgggggacatcagcagggccatgagagagaagtgcccacccgcagtctaggtaaggtgggggatccccagccttcacagtgaggggtcttggcaggaacccctgcccttctctgccacacctgccactgctgctcttcagctggggccgtggaagcctcaccttctccctgctctgtcttctctaacctccctcggtggggcctccgagcccagcccctcccccaggacagggagacacgggacccagctcaagttctgcagaccagcattaaggcggaaaggcggaaaggcgaggctgccctttgccataaagctagcaggcctcaccttgtcggtgaatttgatttgtggagcaggccctcgggctctcccacgtagcgctttgacttttttttttttcccttttctgtctttctggttgttagcaatctcacaagctagtttccctggttttccagaatgcagaagcaaaagtctggccacaatgcagcctcaacagctgtccacagagtcagccctaaaaaggaaaggctcggctgataaagatctgctatttttatctagcacttgatcctttacaaagggcttttaggttctttgtctcgtttaatcccagcaaaacccctgtcacgcagagtctgtccacattttgcatgggagacccgagaagggggaggttgcagggccccgctgggcctgtagccccacttgacccctaaatacaatctgagccctggtgtttgttgtgtcccgagggcagatttcccagctgctgtaggcagcctggcctgtgtcagggtcagccacctttccttaagacctgctcaggagcgccagaggggcaggagggcatccctggtgcctggtttgcaagagctcctgggtggttcgatccctgggagatgccaacggaaggtgtcacccccgtctcttgctgctcccgggagtccattggaaaaccaaagccatttagtcccaaccccctgtggccagcagctgttcctgagggccctgtgcactgtggccatgcccgtcacttgctggtgaccttggttagtgcccctggctgctgaggagatgacagtgggcaggtggtccatatgatcacgggacccctaaagcagggcaaggtggggagaggccccggcctcctcatgggccaggcagtgcgggcagtggtttgacctcccacacccacccagcaggctcccttgcgggcagacttgagtgtgagggtgcaggacaggcaggggcaccccatggtgaggatgctgggggcctgctgacctgctcacgcatgtccgcagtgaagggggggtcctccagacattttctgtccttttcctaagcagggcgggtcagaccctcagctccccagggcccaggccccacactcccctgtgctctaaaagggtgggaggtgaaacctgaggagcgaagcaggcgcccccagggcaggacccctgtgctgtgctgagagatagggcctgtcctgagtcacttaggcctgaaccacccccctccagggggaagggagaaaggaaatctgttcccatcccagaacgcctggccggaaagggcctgagaggtcacttggtctgacctgctcattttgcagatggggaagccgaggcccagaaagtgctaagcaggcaggtagtggcagagccagaatgagaagcttcaggctctggggctggatcccctcctctccccaatactgcggcagtccgcagggactgacctctaacctcactcttggccgtatgtggacaccacggaggaaggattaaatggtgaacattggaggcagagactggccccggggcttttgcattatctccaagggtgagcaagggcccgggggaaggcataggaggtagggaggagaagagacaggaaattgaccaagctcacctggctggctctcgtcagtgctctgggtaaagcagttttgttgaattttatactcacacacctacgtccaccaccccacacatgtgtggcctggagatgggttaggttggcttcttggcagccctgcagctatgatcttgagcccaattctggctcccagagcagatttttccaggatccttctagcctggccttccggacagccacatttctctcctggcaggagctccctggtggatggaagcttccgggcttcatcctgtagctgttacaccacttgtaacagcctgcttgactgccggtcggtgcctgtggggggccagtgtggatcacaggcctagagctccctggctggggacaagcacccatgcccagaccccatggggctcctggagcccctgcccccatcagtcacagcctccttggtggagttgagcagcctttacacagcctgcccacctcctattgtcctcattttagtctaccctctgcaccttggttttagagtggatcttgtcactccccagctcaaaagccttcccgggctccccatcgtccagagcagcagctcccagcctgcctggtgtgtctcaattcctacagagatttctaagtccctaaagtcaccgaggccaggtcggcacatcccctatcttctgtttgaaagaatataccacggtcacggctggtataagcaagaggcctaagagctcagataactcaaaatgcacctgctgaacccactgcatctctttcggtggcttccaggtgtgtcttggtttctctttcgaggtgtgtctccttttctctttcgaggtttgtctcggtttctctttagccaggacgagtccgggtgaccctggtgggccttcctttcccttctaggtgtcatctccttccctccctttcccccaagactccctccgggcccagccagcaggtgaagcctgacttagggaaggggggatttccaggggaggggccctggcccccactgacccagcattgctatccacaggaggagcagcccccacaacatcgatccaagagggggggctcagtgggcggcgtgtgctacctgtcgatgggcatggtcgtgctgctcatgggcctcgtgttcgcctctgtctacatctacagatacttcttccttgcgcaggtgaggggccgggccaggtaggggcaaggcctcgagaaagggtcatgtctagagaggcatggagggaagtgtctgcaagggggcagcaggaagccccagacatgccctcaggtgggagcgagtgcccggccagcccacaagactggggtgccccctcctccttggggcctccttggatgcaggccagtcccacatttagccccttgtcctggggagccaagcatgaatccgggtgacagcactgggcccgccccacagggtcaccctggggaattctcaccagaaactcagatctggcagaaactggaactgtgatccccctccacagctcagaccctgcacctgcaggtcacgctttaaggctgacctaactgtgcttgtgcatggacatttgggttaccaaacaagagagggagaggggtgggtacagagagtctccaccacctccttccagaagcaggagtgtgtccttgctgccaactatcatccccctccccgggggacctgggcacaaagctgggccaacccagacctgggagggagggagtgtcgctgtgtgcttggaaatgaaagtaggtaaattaaaaggataaacctacgtacaactcacagagaacctcagggtgacaaagaggtgggacttgccagtcatttatgacccaagtgacctcccactcctaagcgtttaactttgttgtcccccagtttttccacgatggaaattgctgaagagtttgcattcacggggctttccccttgaaagctcagctcacatacacccatcaccttcctttctgtgcagcatccccctgccccgccccactccctccatggcctgcgtccccctcgttccagggtcctgtgtgggaccttcccacaggcctcttcctgttgtggccctaccctaggacctgggccagcatttcctggtccc

SEQ ID NO: 8617 - DNA, 6000 bp, Homo sapiens
tggtctgacactctgactctggaggtaaggatgctgtggatactttgccagcataggcagggcctggcgccctgaggctcaccctggctgtgttctctctcctagcacacactcacgggacacagtgggaaagtgctgtctgctaagttcctgctggacaatgcgcggattgtctcaggaagtcacgaccggactctcaaactctgggatctacgcagcaaagtctgtgaggaaattcagtctctctgtctgtgtatatgcttagatgttagcgtggaggtgtgtgtttgcacgtcagagcctgcatttatgtaatatagtttgaatttcagatctggcttcatgtttagaggggcactgaggatagtgatagtttttcttgtttaaagcttcatttaagtgagtaactctgacaagtcagtggttagagggtggcagcattatgtaaacagccacgttggtgcctctgcttgattaatgatgtttgcatttctttcaggcataaagacagtgtttgcaggatccagttgcaatgatattgtctgcacagagcaatgtgtaatgagtggacattttgacaagaaaattcgtttctgggacattcggtatgatacccaagctcctgactggaggcacataagagtctccacagtaatggttctgtacatgggttgtgcttttaagatctcaggacatggcagaaatgagtttcggtacacgtatagtgttagcttattaacacttggctgttctttcccatgaagtagactgtggagcttagcaatcatttattgagcatgcagtgagtgctaggcccttcaccagctggcaggtaagaaaaggcaaacaggatactctttctacctttaggtaatttaaactgtagtagggaaggcagaacgcaaaagtcagtgactagtgtgttgaagtggaggcagctacgtttgttccagtgtgttaaagaatgcctctccagatttctccggagacgtgagtaggattcacacggcaggaaagccactcaaacttttgagtgtgtgtctggtggctgatacatggcaagtgagcaggaaacagggcagaagccagtgagggggctatgaggggttgaaatcaggttgccacaggcttgataagccattgtcaaatcactcgatcttgtaagtcgttgggtgtttagcaaggaaatggttgctttgcaggagtctagtagacgactttggtggcattttgagagggcatattagggaataggaaaccaatagagttgataaggacctaagttcaagtcagtagaggaacatgtggaggagagaatctatttgaaggagaatttggacagggcttattgacaggttggaggaaggggaagacaggatggagagtaaatgaggacagcctcccagcagggttgtagagagggtgggggtacagggcctgtggtgatagatgatgctttgaaacacagcatggcaccagaaagtcctgacaatgctcatggttcctggacaccacttcacattttattcataatctttagtttgcttttaaaacctgaaattggaacttgaaagatggaatttgagagttaagttggatgttcgaagtctcttagtccatcccataatttgacaggtgaagaccctgagtcccaaggaagtggagtagcttgcttcaagctgcatatttagcaacaataagataaattcttgcttagttaaggtgggaggtaggaaaaggtttcattgaaagcctacaacaaaatcatcacagaacaggtcagcaccccctttggctatgaatgtcaccaacagggccctgcccagggtggctgttagccaccctggacatgggccacagcacagagaagaagagggaggtgcgtagggccgtggctctgccctggctttcctggccccatatctggaggtggagggccacagagccacagtgaatagggcagaaaacctgcaagaggctagagttacacttacaaggcagcccaggcccactaatgcaggtttctttgccaactttatccaaaagttgaaatcacatcactgaaaataatacgaattgggtagtagccctagttagctcatgctgatcagaaaccgatgggcgattgttgtcattccaaaaatggatgaggaaattcttaccaacttcagagttctagtctgggaatgactgtcttagggtctgttgatgggaaagtaagaaaagcagtcacaggttattagaagactgggaacacattgactgcgctggcagagcgttgcatgctagttgaattgcagtgccttttttttcctccacggcatgatgtgaagtagttctggcctacgttacatttctcagatctgttctccctcttagatcagagagcatagttcgagagatggagctgttgggaaagattactgccctggacttaaacccagaaaggactgagctcctgagctgctcccgtgatgacttgctaaaagttattgatctccgaacaaatgctatcaagcagacattcaggtaactgaagatgtgctggttgcatgaagaccagaggcccagccctgctctcttaacgtgctgcgtggcctgagctccctcagtgacagtgccctgttgtttgtttcagtgcacctgggttcaagtgcggctctgactggaccagagttgtcttcaggttagtagtgacccaccccccgccaatttggttcatcacaaagagtcctgcatgggcattttcccactggggatatagagctaaattttgttcagtgcccaacctatgtttccaggagtgtgcctgtaagttcataattgcaggccaccattattgtctcttcctttccagtgttccttttgtgattacatgaacctaacgtgttgtaccaaaaaataacagttggctggttgctttgttgtgggtgagcccattaggttcacttctcatcactcattcacgcaagagctgttggagagcctttagaaaagggcaggagtggccgtgggcctggggcgggactgaaaaggctttttggagaagggtgtgcaggtggtctgcagttttctgctccttgttcccttcttccatgtatcctgcttcttccaaatacctttccaggctcagttgctaagatgtttcttttcttccctcctctctttgaggcatgtaacaaggcagtccatgggctgaaacccttagctatgtggaggttggctttgatctccctatatgttgttttgttgaagtctgtagatggttaaggacttggagccccaagaagcaatgtgatgccactgttcattagccggacggggctgaaatactggggaaaagcagatttggctggaagggccatgactagcacacattctgaggtctgggtacacaggagtggtcatcagtgaagaacaaacattccttcttgggaaaaaggccacagagatgctgaattgggggtggggaattgacaacctttcttttcttactgtcttctgtagccctgatggcagttacgtggcggcaggctctgctgagggctctctgtatatctggagtgtgctcacagggaaagtggaaaaggttctttcaaagcagcacaggtaagatgaaccctgtctcagccccccgttgcgttgtgagcaaggcctttgacttcatctcaggggtcatccggtttagacctcagtcggcgctgtgagggcactgtccgcccacctgctcggctggctgagctaggtcagtggagagaagctggggccactcacacagcacagcaggccacagtctacagagtacgccaggtagagcggttagagtggcagccgctggagaaagggttatagaaacacatccctgactctttggttatgtccacgtcctctgtgtctccttccccttccctactctccttcctttccgcctccctgtctcccttggaagtccctgttgtcagtgcatttcagtgcattgacgtgtcctaaacactgatctccacacaccttcttttatcttccacctgataggcaggccccagacccccttttttcctagctttgttctgcccacacaagcccacctgctagttggaacccagataccattttccttcagaacctctctccctgtccttgggcagcagcaactgctcccagacctaaccagtgctgaccaccactgcccggctcttcagaggcatgtgtactgtctttccagctcactcagagctcctctcttagggagagtgtgataaggcctgactgccagaggggccaaactcccttcatcccagcatgacttaattaagtacaccactggattttttctgaggtcttttgcatgttagtgagctcctgccttgtcgcgggcacagtgccagagagtaaaatggaagttggaaaaattaggactccctgaatgcacaagcttctggtgtttggtttaccaagatctcatcccaaatgttctgaaacttggtgcttttctgatctctcctttgaagctcatccatcaatgcggtggcgtggtcgccctctggctcgcacgttgtcagtgtggacaaaggatgcaaagctgtgctgtgggcacagtactgacggggctctcagggctgggaggaccccagtgccctcctcagaagaagcacatgggctcctgcagccctgtcctggcaggtgatgtgctgggtatagcatggacctcccagagaagctcaagctatgtggcactgtagctttgccgtgaatgggatttctgaagatttgactgaggtctctcttggcctggaagaataacactgaaaaaacctgacgctgcggtcacttagcagaggctcaggttcttgccttgggaaacactactagctctgaccttccatacctcacttgggggagcacagggccccgctgggcctcctcaccaacggcagtgccaaaatcagcccccacatcaaggtggtgttctctgtgctttctctcgtccttccaaagtcggttctggcctaacgcatgtcccaacaccttgggttcatttgcccggtgaactcactttaagcattggattaacggaaactcccgaactacagacccctccctggtgggttgcatgaatgtgtctcattactgctgaaatgtcctcacatctctttcactgttcttcagagctttctggctctctttcccccacaaaattcgacatatttaaaaatctccgtgtggctttaaaaaatggttttttgtttttttgtttttttgaggtgggagaggatgtgtgaaaatcttttccagggaaatgggttcgctgcagaggtaaggatgtgttcctgtatcgatctgcagacacccagaaggtgggtgcacactgcatgcttgggggtgccaagggattcgagacctccaacatacttgtctgaaggtggtgattctggccatggcccctctgccaagcctgtgtgcgatgcccttggtgctttagtgcaagaagcctaggctcagaagcacagcagcgccatctttccgtttcaggggttgtgatgaaggccaaggaaaaacatttatctttactattttacctacgtataaagttttagttcattgggtgtgcgaaacaccctttttatcacttttaaatttgcactttattttttttcttccatgcttgttctctggacatttggggatgtgagtgttagagctggtgagagaggagtcaggtggccttcccaccgatggtcctggcctccacctgccctctcttccctgcctgatcaccgctttccaatttgcccttcagagaacttaagtcaaggagagttgaaattcacaggccagggcacatcttttatttatttcattatgttggccaacagaacttgattgtaaataataataaagaaatctgttatatacttttcaaactccatgcctcttggtgattattttattctcccttatccttagaaaggggaaagaaagtgatttctttgtttacctggt

SEQ ID NO: 8618 - DNA, 6000 bp, Homo sapiens
tgaaatatttgattactatagctgtgtaataatctataaatgaggtagtgttacctctaattttttttttcaaattgcttttgctattggaggtcttttgcattaccatatgcattttaaaataagttcattaatgtgtgcaaaaatcctgctaggattttgattgggattgtattttatttatagatcaactggggagaaacaacatcttagcaattttgagttttccaattcattaacatatctttttatttaggtccgtcatcagtgctctgtagttttcaatgtacagtctttcacatcctttgtcagatatatccctaagtatatcatgtttttgatgctatttaagtggtatttttaatccagttttcaagtgttcattgctagtatagttgacccctgaacaatgtgggaatgaaggggaccaacccgtgtgtagtagaaaatccgcatagaacttttgattctccaaaaacttaactactaatagccaactgtttaccaaaagccttgccaataccataaacagtcaattaacacatagtttgtatgttattagtattatatcctgtattatgacaatgcagctagctagagaaaagaaaatgttattaaaaaacgtaacatatgaaaaaatgctcaacatcactagttaccagaaaaatgaagatgaaaaccacaataagatatcatctcacaccagttagaatggctgttattaaaaagtcaagaaataatagatgctggtgaggctgctgagaaaagggaacacttgtaccctcttggtgggaatgcaaattagttcatcccctgtgggaagtagtttggagattttgcaaagaacttaaaacagaactgtcattcgacccagcaatcccattactagatatatgtaaaaaaaatcgttttaccaagaaacacatgcactggtatgttcattgcagctctattcagaatagaaaagacatgaaatcaacctaggtgcccgtcaacagtggcttagatgaagaaaatgtggaacacatactccatggaatatgcagccataaaaaaagaatgaaatcatgtcctttgtaacaacatggatgcagctggaggtcattaccctaagggaatatatacaggcacagaacaccaaataccattgttttcacttagaaatgggagctaaatagtgggtacttttgggcataaagatggcaacaatagacactatggactcctaaaagggagaggaaaggctgcaagagttgaaaaactattgggtactatgctcagtacttgggtgatgggagcaatcatgccccaaacatcagcatcacacaatatactcaggtaacctgcacatgtactcctgaatctaaaataaaagttgagtatgtataagaggaagtcattcatcataaaggtctccatcctcatcatcttccattgagtgggctgtggaggaggaggagtagatgttgattttgctgtctcagggtggcagaggcagaagaggtagaggaggtggaagtggaggcaggagaggcaggtgcacttggtgtaaccttatggaaatacatcataattactgtctgtttttttctctttgatgtatttaaaaatgcttttatacagtactaatccttcttccccatttgctttagtttcagtgcccataagggttcatgtcttaatagaagtcaatagcagtcttaaataattggaagcatttctatgaggcttgtattgtgtaaggccaattttttttctggcactgcttcttctacatcttctttctcatcaagtactgattggaaagcactcatctctatcaggtcatctattgattccctgagtgtggcatctattggctcttgaatttctccaagagtcatattttgaaataccttatccccaacattttgttgctgtatccataatcccttcatgacttccttgattggctctgtcataaatcctgtgaagtcatgtgcaacatctggtcacagttttctccagaagaaatgtactgtttggggcttggtggctttcaaagctctttctataataacagtggcatcttcagtggtgtaatccttctggactttcatgacattctctatccagattctcttccatagtattgacaaccttttccatagaaaactgtgtgtaatgagttctaaatttccttaagacacctgattgagagactgaattagagatgttgggtttggaagcacgtagaccattttgacaccttcagtgttgaacttgtgggttctgggtggctagggaatggtccaatatcgaaagaactttaaaagacagtcccttgctggcaatgcattttctgccttcacggacaaagccttgatggaaccaatccagaaaacgcgttcttattgttgagtccttctttttgtacaacaataaaactgtcagtgagtgttgatcttttcctttcaaggcttgaggtttggcagttctactgatgagggcagtcctgactgtaaacttgactgcatttacacaaaacagtagagttagcctatcccttcctgccttacattctggtgcttggttttcttccttgccaataaatgtcttttgtgtcatctttttttttgtttgtttgtttttgttttttccagaatagggcactgtcatctgtattaaaaccctgttcaggcagatatcctttgtcctcaatgcttttcttcatggcatctgggaactcatctgcctccttttgcttggcagaggctggttctcctgttatctggacaattttaaagccaaacctctttgtaaaactagcaaaccatcctttgttgccattaaattctccagttttagattcttcacctctcttttgctttaagttgtcataaaatgactttaatttttctcaaatcacattggcatctataaataagcctttcttatagcaatcctacacccacattaaagttgcattttcaatatgagacaaaaatgtatttcacaaaaagatgcgaggtttggctcctgctggcatagctgcagcaatgtcttcatgaatcttttcttctcttttctttctttctctctctctcttttttctttttctctttctttcttttgcaatggtccttatctatcttcattgattttgaaatggcaggcaatcatagcggcagagctcaatctacggtacctatcaagtaattcaagtttttttggtaatgtcatgatttttctttgcttcttgggagtacttgcagcatcattagttgcactttatagtcccatggtggtattcaaggtttaaaaaattacactaaacatgatgaaaaatacagtagaaccataagagatcattttttactctgacatgcaatttactagagagaagaaacgcgcagagggtataaacgtcatatcacatgcatttaggccacactttagctccctgcaatagcaacaggaggtagcaacaaaattattatagtagtgtagtatgtactagaggaaagtgactaagcaaatgtctagtaccagttagggtgtcctggaaggaaccatcttgtgcttctacaagaattatgccctgaggttggctgttgaatccctcacgaaatgctcctcagtgtgttgcctaacacacactgctgagctcacccattaaaatctgcatgatggaattcagcccaatgcaatgagaattcccatggacttcctctgtgcaaggcaaagcatgggtgctgtggaaggaggatgaaaacaggtagaagatgtaatctcatcctcaaggggtgctcggtagaatggaggaaacaatacatagattcctgaagatgagcaccaaagtgattggggtgggcccatagcaaaggcctgcagctctgttcagaatgcagaagcagagtgggcagagagagacagctcattagagtgcttgggcaagcatagggacggcgactcaccactgcagacaatgtatctgaggaaagccatttaaaataggtgacagtcacattccatcaaatttctggaagggtccatggaggcagggttgtcaatctcattacagcatttcagaggcctcagaagatttggaaatgaaaaaagacaagcagcacttgtggctcacctgtgtcacaattgtggctcacctgtgtctctgcaatgcgcaagtgagctgtgtattgcagagacacaggtgagccgcaatttcctcccagttaggaggtcaacgctaagacccttgctctctttccgtcgaacatgagatgccaatttctttctgggcagaggacaaaataaaaattgtctataaactttggccaggtgtagtggctcacgcctgtaatcccagcattttgggaggccgagatgggcagattgcctgagctcaggagttcgagaccagcctgggcaacatggtgaaaccccgtctccactaaaatacaaaaagttagctgggcatggcagcgtgcgcctgtaatcccagctactgaggctgaggcaggagaatcgtttgaacccaggaagtggaggttgcagtgagcctagatcttaccactgcactccagcctggatgacacagtgagactccatctcaaaaaaaaaaaaaaaaaaaaaaaattgcaaatttttctttgtgacaaattccaaaattattagcttcgttcaaatttactttcctttttatctttcaatgtcgtcaaggccaaaagcattgcttaataattttgtttctaaactcatattgcagcacagggcatgatctgtccccaaggcaaagatgatgagttactcttttcttgaaaacatataagcaggtatctcagcaaaggctactcatgtattattatgagtaaatcattggcagtgaatgtgaatttttttttaaatgaatgaataagtacacgccttcttttgagggcaggttctatctgtacttcttccacttactatattataggagcttagaatcccagctgctggctctgggctgaagttctctgatggctcgtgcagggtggactggcctccttcccctatatgtgtgtctactgctgacctgtggctttgccaaggcagggaagctgctggtagtgcccatggatgggagccactggttcaccatgcagtcggtggtggagaaactcatcctcagggggcatgaggtggtcgtagtcatgccagaggtgagttggcaactgggaagatcactgaattgcacagtgaagacttactcaacctcatacactctggaggatcaggaccgggagttcatggtttttgccgatgctcgctggacggcaccattgcgaagtgcattttctctattaacaagttcatccaatggtatttttgacttatttttttcaaattgcaggagtttgtttaatgaccgaaaattagtagaatacttaaaggagagttgttttgatgcagtgtttctcgatccttttgatgcctgtggcttaattgttgccaaatatttctccctcccctctgtggtcttcgccaggggaatattttgccactatcttgaagaaggtgcacagtgccctgctcctctttcctatgtccccagacttctcttagggttctcagacgccatgactttcaaggagagagtatggaaccacatcatgcacttggaggaacatttattttgcccctattttttcaaaaatgtcttagaaatagcctctgaaattctccaaacccctgtcacggcatatgatctctacagccacacatcaatttggttgttgcgaactgactttgttttggagtatcccaaacccgtgatgcccaatatgatcttcattggtggtatcaactgtcatcagggaaagccagtgcctatggtaagttatctcccctttagcacattaagaataatctggctttggaaattaaaagatttcttacagaatcataatttatcatttacatttgtcccatttggaatttctttctggtttaaggaattcttttgtaccaattcactta

SEQ ID NO: 8619 - DNA, 6000 bp, Homo sapiens
ctctgagagccaggcgtgaacctggtttttcagaaagcaaatggaagttcacctggtggaggatgaagcgttgttgtcacgggggtccctgcaaagcagaccccaagacagagattctggtgcaagtaactgacgtgtgcatcaccccagaagtagtctccactgtgccacagcccctccaagacaccgtagagaagccctcaaaactgttcccgacgcacagcccctcctgggtgagggccaggcatgtcccagcagctggggtcgcaggcagcagggtgggtgcatctggagccatccacaggtggcctctgggctgggctgggacctaagtggacccctgctgagtgacccctggcctgaaagacctcttctccttttggaagaggaggaggaggagagaaacttcgcatggggtctgggccatgagccagcccaactgcaaagtggctgcccccaaaggggtggtgtccatttcatgtgagaggggaaagggaaggctggggatggagtggggagtgtggctgcgggtgccacaacggaccagccagagggctctcaattgttaagtgggaaaagttcccaactcaaactggcttaaacgaaaaagggagttttcggccaggcgtggtggctcatgcctgtaatcccagcactttgggaggccaaggcaggtggatcatgaggtcaggagttcgagaatagcctggccaatatggtgaaatcccgtctctactaaaaatgcaaaaattggccaggcgtgatggcacgcacctgtagtctcagctactcgggaggctgaggcagaagaattgcttgaacccaggaggtggaggctgcagggagttttcttggctcctgtactgaaaacgctcagggctacgcgggcttaggtatgaatgatccaggtgttaaaaatgctgcactgctattcccagcattgcctgtgttctcagaaagattatccccatctggagggaaggtgccctgcagtgcggccgacactctcggacttagcaccccttgcaaggcacgtgttcccaggaactccacctcccactggctcgaactgggtcaccgattggtggggcctgcctcgtgggtctgtcttgaagccagaggctacagtcagccccatgtaaccccttgtgggtctccaaaggaaaactggggtgccattaggtacatatagcagtgccccctgcagctttccaatgcagtcttccagctggacctgggggctcctgtgaggtcgggagggagtgttatggtgggagcatctctgcaaccctccaggtgcccaaggcatgtcaggagggaggtgggggccgggatgagggccagctttgagacaagaagggatgcgtgggtgagtggctggtccccctctcccagctaacctgagccctgctgccgtagtgcgcggctggaggctgcctgatcgagctggcacaggagctcctggtcatcatggtgggcaagcaggtcatcaacaacatgcaggaggtcctcatcccgtgagtcccccactcctccctgggtggcatccaaggaccgagggaccccagagcacctggcagtagcagcctccagcccggccctagctgggagaagaggtgaagggaaggcaccttgcctggggagggggagggggagtgtgcccggccgtctgccccgggctctgggctgcccgccctgcagctgccctgtggctggctgaggtcttctgggttgtagttgtgggagacgctacccctgggaccagctttggctggggagggggtctgggctcctggacccaaggctggggtgatggctctgtccgttcagagatgctgcggctgggccagagtattccttggcatccccaggccccaacgcagcacaagagggaggaggaaaaggaggtcccagggttgatcctcagacacacgtctgcctcagatgcccctgccagggacaccctgaccacaaggctcccatagccagagtccttcaaagaggctgcccagggcctcgcctcccgctcaaggccagactgacctgaacgccctcccagcgccccctgaacacctgatctgcccccagaaggcagctcccaaatcagcactgacatttctgggccaccaggaatagcagttgggagatggtggccatgccacatcccgagagatggccctgcctcttggaactattggtgctgtgaaaccacaagaccataaggtgcagggtggagctctgtgcctggcaggagcagggcacggatgagtgacagtgtgataaggcaacatgcacacatgcccctgtgtaggacgaacccaacacgtgggcctccacatctgctttccctgggacaccacagtcgtcctcgtccactccctcccaaccttggcagagctcttggcactgctttgcaattccgggaggagcccattacccctaaagccttaaggaacaatgcggggggctgggcgggtggactgccctcccacatctgaccaacagacacagacgctttcactgagtccgatctgcaaagctgttggctctcactgcgtccacccctcagccccagaccccatccctccctgctgcccttcaattgcaaagcaacaggcttgtcccggccacatctcccccaaggactatagcagccactgagacccatgttggatcaaaggccattttcctgtattcccgtccccaggaagctaaagggctggtggcagaagttccggcttcgctccaagaagaggaaggcgggagcttctgcaggggctagccaggggccctgggaggacgactatgagcttgtgccctgtgagggtctgtttgacgagtacctggaaatgggtaggagcccgttagcagctgcggcaatggctggcgccgtgggcagggatgggtggccactctgctcaagggcctcccagcctgacattcctgtgtctgcatctgccctgaaatgtgctgtgggggtggggtgggaacagagggtcgggcctgtggagaatccagaaaggaattcttttcccctgagagtgcccaagagggttggctgaggacagaggggcaccggcacggggaggaggcccccgcggccgttgcagagctcccctggggtccctggacctagaaagcatgggccagagcaagggaagaattaggagagcaggccctgggggctgacagaagtcctccaagggtgaagccacagtgggaggcagcggcctggagagccaatgttcccagaaatctcaatgcccacgctatttgcagacctaccactgtcaccttaccaggtggtggccagtgccaggggctcactgcctgcacgggtggtgcactctggagggtgggtctgtatcacctgtgccgtccctgcagtgcagggtctgactctgagctgacaaaagggagaaggaatcatcaggcagtttgtttgtttgtttttgttttgttttttgagacggagtctccctctgtcgcccaggctggagtgcagtggcgccatctcggctcactccaacctccacctcccaggttcaagcaattctcctgcctcagcctcccgagtagctgggattacaggcgcccaccaccacgcccggctaattttgtatttttagtagaggcggagtttcaccgtgttggccaggctggtctcgaactcctgacctcaggtgatccacctgcctcagcctcccaaagtgctggggattacaggcgtgagaaactgtgcccggcaggcagctcttaacctagcaagcgggcatgtgagccggcaggccccggagctccccagcgtagccgcggcatctgtggaaagggagcaggccagttcccagggcgaggagtggacgccctgaccctcctccactgaaccctggaccccaatgatctcactagtaattctcggcgaagacccagaagccccttccaaagagccctctcctaacagctcccctgtggggtgactggagaagctggttgtaaaatcaggagcaggtttctgccccaacgcctgccctgagttagttcctgagctcaccgagccggagaaggcccgtgaccagccagaagcacggagcgcagggcaggacagccggcctgaggccggtcaggagaggcggccctggcgctgcgcggtccaggacgagggagaccaggaggtgggggcggaatgagccgcgatggggtggcggcaccacgtggactggccggtcctccgcggggggcgcgttccgagggctgagggcggacggtggcggagagcccggccgtgaccccctccccgcagtgctgcagttcggcttcgtcaccatcttcgtggccgcctgtccgctcgcgccgctcttcgccctgctcaacaactgggtggagatccgcttggacgcgcgcaagttcgtctgcgagtaccggcgcccggtggccgagcgcgcccaggacatcggcatctggttccacatcctggcgggcctcacgcacctggcggtcatcagcaacgtgaggcccgggcgggagcgcggggcggggcgggggcgcgcaggggcgggggcggggggggcagcgggggcgcgcaggggcgggccgggggcagcgggggcgcgcaggggcggggctgggggcatcgggggctcgtaggggcggggcgggggggcggcgggggcgggcaggggcggggggcagcgggggcgcgcaggggcggggcggggggggcagcgggggcgcgcaggggcggagcgggggcgcgcaggggcggggcgggggggcagcgggggcgcgcaggggcggagcgggggcgcgcaggggcggagcgggggccgcctcgcgctgacccctccggcgcccaggccttcctcctggccttctcgtccgacttcctgccgcgcgcctactaccggtggacccgcgcccacgacctgcgcggcttcctcaacttcacgctggcgcgagccccgtcctccttcgccgccgcgcacaaccgcacgtgcaggtgagccccgcgccaggtggagggggccgcgggcgcacgaggacgaggcggagcggggctcgggtggggtgggggtgcggcggtggggagccgggaggggcgggcgccgccgggcaaggccgggggagggggggagctgggggcgccgtgggcaggggctggggggaggttccccgcggtaagggacggagctttgcggggctggagggcaaatcgtggattctaggtgaattgctagttggtcatagtgtagcaggacgagtcgcagacagaactcctcagacaccggattaaagaaggaagaggtttttttattcggccgggggcgtcggcagactcgtgtcttcagagcggagctcgccgaaaaagaaattcttagccctttgaagggcttacaactctaagggtctacgtgaaagagtcataatagatcaagtaagcgtgaggaacgtgactgtgggctacatacatcagctaacggtacaaaaagttttacggtgctttctcatacagcgtctggaattcacacataacaccagtagttttggtcaggggttaatattattgttattttaaccgccagggccaggtggtggcgccaaggtcatctagctatttatcttctgtttctttccagctttttgctttcttccttttctcctgtcttataaactagggaaaaggggaggttggggagaaactgggaaggacaacaggagaagtggtggcctcataccataatagaacctgcagagcaggtagatgtacttcacccgcagttgtggagacttcctttgtgatctggttacaatgaagttttgcatgtgtttcaataaacttgaaaagcatcatagtctcctaatgttggagcaaatctcagcagtaaaattacgaaaccatagggttatcagtcttttcatatcggtctctctcaggttttgcttttgctctatgtattttgagctttttagttgtgtacgaattcatacttgtgatctcttcat

SEQ ID NO: 8620 - DNA, 6000 bp, Homo sapiens
agcccagggacctccgcaggccaccctccctcccccctcagcccagggacctccgcaggccaccctccctcccccctcagcccagggacctccgcaggccaccttccctcccccctcagcccagggacctccgcaggccaccctccctccccctcagcccagggacctccgcaggcctccctccctccctccccctcagcccagggacctccgcaggccaccctccctccccctcaacccagggacctccgcaggccaccctccctcccccctcaacccagggacctctgcaggccaccttccctcccccctcaacccagggacctccggaggccaccctccctcccccctcaggccagggacctccgaaggccaccctccctcccccctcagccaagggacgtctgcaggccaccttccctccccctcaacccagggacctccgcaggccaccctccctcccccctcagcccagggacctccgcaggccaccttccctccccctcaacccagggacctcggcaggccaccctccctcccccctcagcccagggacctccgcaggccaccctccctcccccctcagcccagggacgtctgcaggccaccctccctcccccctcagcccagggacctccgcaggccaccctccctccctcccccctcagcccagggacctccgcaggccaccttccctccccctcagcccagggacctccgcaggccaccctccctccccctcaacccagggacctccgcaggccaccctccctccctcccccctcagcccagggacctccgcaggccaccttccctcccccctcagcccagggacctccgcaggcctccctccctccccctcagcccagggacctccgcaggccaccctccctcccccctcagcccagggacctccgcaggccaccttccctcccccctcagcccagggacctccgcaggccaccctccctcccccctcaacccagggacctccgcaggccaccctccctcccccctcagcccagggacctccgcaggccaccttccctcccccctcaacccagggacctccgcaggccaccctccctccccctcagcccagggacctccgcaggccaccctccctcccccctcaacccagggacctccgcaggccaccctccctcccccctcaacccagggacctccgcaggccaccttccctcccccctcagcccagggacctccgcaggccaccctccctcccccctcagcccagggacctccgcaggccaccttccctccccctcaacccagggacctcggcaggccaccctccctcccccctcagcccagggacctccgcaggccaccctccctccccctcagcccagggacctccgcaggccaccctccctcccccctcaacccagggacctccgcaggccaccctccctcccccctcaacccagggacctccgcaggccaccctccctcccccctcagcccagggacctctgcaggccaccttccctcccccctcagcccagggacctctgcaggccaccctccctcccccctcagcccagggacctctgcaggccaccctccctccctcctccctcagcccagggatgtctgcaggccactctccctcccccctcaacccagggacctccgcaggccaccctccctcccccctcagcccagggacctctgcaggccaccttccctcccccctcagcccagggacctctgcaggccaccctccctcccccctcagcccagggacctctgcaggccaccctccctccctcctccctcagcccagggatgtctgcaggccactctccctcccccctcagcccagggacctccgcaggccaccctccctccccctcaacccagggacctccgcaggccaccctccctcccccctcagcccagggacctctgcaggccactctccctcccccctcaacccagggacctctgcaggccaccctccctcccccctcagcccagggacctccgcaggccactctccctcccccctcagcccagggacctcggcaggccactctcccctcttagcccagggacctcggcaggccaccctcccaccctccctccctccctccctccctcccccctcagcccaggaaaggcacaggagaggatcctgccaggtaaagggaaagtggcccgggaggagcccacgtgccaacaacaggagtcccagaagacagaaaagaccacagatgagaaagcagttcacgcagagaacaaaacgttcccggaccaaacccagggtcgggttgctcattcccgaggcccgatagcgagatgcagatgaactggggaagaagagggattttatttctgtaactggttacagggagaaggcctggaaatgatcgccagaccaactccagattacagtttttccagagcttacacaccttctaagctctgtgtctccgtgtcagtgtgcattcgtctaaagacgtacgtgattcaattcttctcatctctaactgaggtttggtcctgaagatcttcctctgaagactcagtaaatttacttgatctaaatgggcccaggtgtttacccttatcttgttttctgctaaatcatggaggtttggggagttccttctccacttgtttgtggaggcctggggagttttttcagacccccagtaaaacttgcttaatcctaaacgggtcctggtctcgtcatgcttcaaggcccaagaaagccctgggcaaaactcttgatgggcttttgttacgtcccagccctcgtgtgagggcgctggctctcagctttcaggatttcacttcaccctcagtcagtgctgaacagttgtcgcggaggcctgcgtgagtgaggcctggcgtgccctggaaacattcccctgagttgaagaaagactcacagttttcagcatccagttaccctctgagcatcaggcagaacccgccggccccaaaaccaggcccccttggcacatgtgggcccgagtgagtccagcatgaggaggtgccgcttctgagcagagctcaggttgtctctgggaggaggagcgagcgttgggtgcggtggccgctgcgttggcagccctgtccctgagcggaacgcaggtcgtctctgggaggaggagcgagggttggactcagtggccgctgcggtggcagccctgtccccaggcgtggactctgccctcagcttcacagtcaccgaagaaatgaagttacaggaggggcacaccgtccttttgtctctgcctttgaggttggcgggaactgaaactggtacggtctttttgaatagaaatttggggtctttctggcgacgtaaaactgtgtgtagtttgcagtagagagtgttgagaacagcctgtctgggctgtgcattgagaaggggcggttaaaatgctgccacgtcgtgcagcccataaaagggggacacagagtagccgaaactgctcttgggggagggggcacgtcccagccttccgtgtgatgctggggtcagcgtggcccctcggctgccagagctcacgaagacggttaaggaaagcttcccccgggtggctttcaccccacggggacagagccccagatgggcccagggacctctgagcagccgtgggccatggggtgacagttgggggttggtgggacccgtggctgtcatataccctgggtagacggtggcttgtccaggcagagatgcccaggggaagtgggtggcacctgagggcagatctgacttttcaagagaagctgaaaacacgggtttttctgtgaaatctctagattgaaaacagtgggcttgaaaagcctggagcagagggagtgaggcctgctccccaccccagctctgcgggcacaccctggccagacagccctgctccagacctggcctgtgtctcagggtggcccaggaggggactttgcaaggtgacgtggggcttggaggtcccgtttccctgtaagcctgggtacttaggggatggccctggtcagactccaccagtcccagacttgggggacacgagaagggagatgggccacccagttctggttgggctggggtggggcttctgaggggtggggaggttgtcccttcccacccacctgcccctgccccaggattctcggctgtgagcaggaggatgtgtacgatggccaagttgcctggactgggtccgcccctcctggggctgtgagtgcacaggacactgggcccacaggcacctctggggctctgtccccgtggggtgaaagccactggggggaagctttccttaaccgtcttcacgagctctggcggccgaggggccacggggggcattcagatgagtcagaaggagctggggcccacccctcctgcttcctcgccgcccccctcccagctgcccccagtaaatcccctcaggcccctaggacctggagggacgcggcaggtttatcatctcagcctggaaaccacgtgacctacctgtttcccaccacagcgccccaggtttcagaagcagctgaggatgcccttcgcaggggagggagggacagtgagaaaggagggtgttcagggcccagggatcccccacggaggctgccccatcagaacttaccggggacctgtggcctcctctgagattctggcctgggcagtggtcatttgagcattggttaccaaggctgcctctgaaatggcaggctgggggcaggccagcgtgaaagggactggcaggagtcctgtggggacaggctgggggcaggccagcgtgaaagggactggcaggagtcctgcggggacaggctgggggcaggccagcgtgaatgggactggcaggagtcctgcggggacaggctgggggcaggccagcgtgaatgggactggcaggagtcctgcagggcagctgtgctggggaggggtcaccctgggccctgagaggcacaggacattgcgatggggtgctggcctgccaggagcacagatacagagctagagcccagcgaggcctgtgctgcgaggggctgtgctgtgccaggggaggccccgcacccgggaagcccagaggagagtgtgcactcacggagccctcctggcagggccgcgtctctggagcagcagacccgtgtccctctgggaggtcaactgcggcctcacagctgggcctgtcccagcacagcccttgttggagggcgcacccccgtgtcctcagcaccccagtgttgagtgcattgacctgcagaggggagcctgtgctggtcccgggcgtctgtgtggctcctgggtgcccatctgcacccctggccctgctctgggcttcagtggagccgtgccaccgtgggagtgtccagggtcctgacgtagccctgagacgtggccagctccctggcctgctgcccgcacagtgggcccttgtctctgctctgggtcaggcgaggcagccacccatgatgagctctgcagccttcccaaggtggctggtgagtccctgccctttgcacccccagcaccctcacccctctacccgggcgcccggggtcaggacccgctcctgaggtatctgtccagctggccgccccctctgtctgggggtgctggacgagtcccactccttgccaaccccagggtggctcctcagctctcaaacaaggggcgggctgcagggattccgagggcccctccagcaagaggtcccacatgcatctcccaatgggacacttacctggcccacagggtgggtgtgacactgagggttcctgggggcagattcagggcatgggatggagacagactggttgtgaggggcccaatgcagggggccggccccagcccacagggtcgttctgcagatgggctggtcggggacgctctaccaggtgaagggtctgtggtcggagtcttcgccctggccagggcccaggacgctcacggtgcaggctgagggtcagagccgccgagggccccctgccgggattctgtgcaaagggcctctgcac

SEQ ID NO: 8621 - DNA, 6000 bp, Homo sapiens
gactttttgcctgttctctttgtcttggggcagagttagcgaacattttcttttttttttctttttttttgaggtggagtctcgttctgtctcccaggctggagtgcactggcgtgatctcggcttactgcaacctctgcttcctgggttcaagtgattctcatgtctcaccctcccaagtagctgggattacaggtgtacaccaccacactggctaatttttttttgtatttttagtagagatgggggttttaccatgttggccaggctggtcttgaactcctgacctcaagtgatccacccgcattggcctcccaaagtgttgagattacaagtgtgagccactgcgcctggcttcctagagtttttatgcttttttttttttttttttgagacggagtctgctcttgtcactcaggctggagtgcagtggcacaatctcactgcaagctccgcctcctgagttcaagcgattctgctgctttagcctcccgagtagctgggattacagacacccaccaccacatctggccaattttttgtatttttagtagagacggggtttcaccatgttgatcaggctggtctcaaactcctgacctcaggtgatccaccacctgcattggcctcccacagtgttgagattacaggcatgagccaccgtgtgccccacctatgctttttaaaagtcccttgacgtttatttatagggagtagagagaggtgcattctactctctgcactaggtgtgttcaccctatcatttttcaactgtagattccagacaaagctattacttttttgttgatgagaattagggttaaaataccaggttgagtctttaagccctggagggagtgttggatagctaatcaggatccccacatcctttcatagtggtttggatctgagggtagaagacaaaggtcctaggagcccagagaaagaaattagagcaaggaagagagaacttgcttttaatgctcacacattctgtccttatttcaggcatggtggttttctggaaccttcccactaactcacccctgcagcggatacggctctctgatggctccttaaagctctaccccttccagtgtttcctagcccatgaccaggctgtgcgtacccttcaatggtgcaaagctaacaggtatggaataggaggtatgtggagggggaaggtgaagactgggacaggctgacttccggatttgtttggatttgaccttctcccgtctttttacagccatttccttgtctctgcggggagtgaccggaaaatcaaattctgggaccttcgacgtccttacgaacccataaactctatcaagcgcttcttgagtacagaactggcctggctgcttccctacaatggtgtcactgtggctcaggacaactgctatgcctcgtacggcaagatggagataggacctctagggacaggccctaagggttggaatgcaaagcatgccagattgttgtggggagaggagggtagagagttggttcactgaggtggtttaaattctggaagaggttaagaagaagaaatgaatctaaagaaaaggaaggtttaaatttatttctcttttaacagttatggactctgtgggattcattatattgacgctggttaccttggtttcaaggcctacttcactgctcctcgaaaaggcaccgtttgggtgagcccccctttcttttgcagtcttcattacaaaggaaaatggctcatttatgcactattagtagtcagaggcagtagttttgggtagaaggagaagatagggatgttgtaactctatcatcagggctgtcggttatggtaaactcatttttgtttgtgtgtctgtctctcagactgtgcagctgttaccagttcatagctctgaatgaatatatgaatgaatgaaatctgtctctttctattagagtctttcaggatccgactggcttgggacaatagctgcaggagatatatccggggagctcattgctgctatattaccagatatggcactgaatccaataaatgtcaagcgacctgtagagcgaagatttgtacgtatacgaacatctaacagcagctgttggatcctaacccacatgccctcccaaattctggtagagtacaaactagtgtcaggtctcccggccctgatatcccagaaaatcttagcacagagttgtatataatcttccctaccgtactgcatctgagcatatatttaaagatactacttttttccatctttaagcctttcctgcccaaaccactttcctctgcttttattctgtcttgagtattatagaacctaatttcatggtctcctttccagcctatatataaagcagatctgataccgtatcaggacagtcctgaaggtccagaccattcttctgcttcatctggggtccccaaccctcctaaggctcgaacttacactgaaactgtcaaccatcactacttgctctttcaagacacagatttggtaagctgaggccaggagaatgggtgtggtattagaaaaggtagaaaactttagtctttgtatagtacgcaagcctgagttcagcacaaagatgtaaaactaaggagcctcggccaggtgcagtggctcatgcctgtaatcccagcagtttggggggattaggcgggcagatcacaaggtcaagagatcaagaccatcctggccaacatggcgaaactccgtctctactaaaaatacaaaaattagctgggcgtggtggcgcgtgcctgtagtcccagctattcaggaggctgaggcaggagaatcacttgaacccaggaggtggagattgcagtgagccaaggtcacaccactgcactccagcctggcaacgcagcaagactccgtctcaaaaaaaaaaaaaaaaaaaaaagggccaggcgtagtggctcacacctgtaatcctagcactttgggaggctgaggtgggcggatcacctgaggtcaggagttcaagaccagcctgaccaacatggtgaaaccctgtctactaaaaatacaaaaaatctgccgggcgtgacggcgggcgcctgtaatcccagctactcaggaggctgaggcggagaatcacttgaacctgggaagcacaggttgtagtgagctgccaagatcgcgccactgcactccagcctgggtgacagagcgagactccgtcttaaaaaaaacaaacgagcgtctcactttctctctcctattccatttcccttccccagggttcattccatgatctgctccgtagagaaccaatgctgcgcatgcaggagggagaggggcattctcaactctgcctggacaggctgcagctggaggctattcataaggtagtctctcatcctctccaccctccactctcatttccccccagttctgggcctggggctgatgaaatggtagatgaaaaggttacacagatgacaacctcctcctcctccagagcatgacagacgtacctcattcactggcttttcattcttacctctgtcacccctcatggtcctgtcctttcagattgtggctcattttttttttttgttcatacagctaggagtcaccctaaagcaccacccatgagcatctctctcttgttttctgttctcttcacaggtacgtttcagcccaaacctggactcctatggatggctggtatctggggggcagtcagggctggttcgaatccattttgtccgtggactcgcctccccactgggccaccgtatgcagcttgaaagccgagcccacttcaatgctatgttccaaccatcctcccccactagacggcctggcttctctccaaccagccatcgccttctgcccactccctagccttggcccacaccagatccttggagtgaagtcggtcaagaacaaatggcccctatgcacagagccataggaactgggggccttccctggacagtgatcatgccaggcctggacctttaggcctgcctccccaggactccttagatcccactctttctacagacttctgtgatcacagccccctgcgggcaggggggctctccctccaccaactctcaaggctcctcagcctaagactatggctcatgagaaacactcaggcctgacctaggcttgggagtcaaactgctcatattgagcatattgttaagtgggtaaagccaagtaaaggtactgggtgtttttgtgaccacttgtgaatgggtgtatggagaactgaaaagggtatctgcatgaaggctcctgtctgactattccaggatccaatattactgccttctgaaacttcctctttagggtaaccatcatgtatgcccacgagggtgatagtaattcgtgagactgaagttgcttagagtacttctttgaccaaggaataccacagacaccctaccgatagaacagtggctcagatcttacttgctcctgcttacgaagtattcccaatcactggtcatctgaccctacttgaacactcctgaacagtcatgttttttaaaatcttcctttatatcaagtcagagagtatacttctataaatttcactcatggatgttaggaaatctagtcatcttccctgtgattgccctgttaagtatttaaccatagctatcatgtgtttcccaaatcttctctagattaaatatcttcagttacttcaaccattcttttacacgtcatgatttttgatccttcatgatactgtcacattgttgactcattagaatgtttacctacttcagttctatgtataggaggtgtttagaacccaagtactgtaatgtattgttatatctcatcttgttagagtcctcttgtgggatgctgcagactcacagtgactatgatactgcctcctaagcaaggacacaccccagtgatgagaaataggcaaaccatggtcttgaaatgcctaggagtataggctggggtttggagggaaatagttggatgacctcaggaaatagaaaaaaacaggcagctgctttttggagagagtggagatgagatcagtgcctacctggaacaaaaccctctggcattctagactggctgaatatgtagtgtagggactttatcatctgtcagaaaatctcctttaagaagaagcgatcaagaagtttagtcctggccaggtgtggtggctcacgcctgtaatcccaacactttgggaggccaaggcaggcggattacttgaggtcagaagttcaagaccagcctggccaatgtatggtgaaaccccgtctctaccaaaaatgtaaaaaattagccaggtgtgatggcacacacctgcaatcccagctactcaggaggctgaggcagaagaatcatttgaacctgggatgcagaggttgcagtgagccgagatcctgccactgcactccagcctgggtgacggagcgagactccgtctcaaaaagagttcagcccctatcctgtacagatgagaaaatagacctggaggaaacccaagtctatcaacagcagagaccacaacccatgtcagtgcaaagaagccaagtgttgcactaccctattgggatccagctcacattgagccagttttgttttttgagctgttacgcaagtgccttctgtcgaagagaagctttactcaattctacagggcagcccccttcctattttcagtggtagaaaagatgagacctggggatccacacttgaggctgtagattggtgctggcagccctgcttctgcaactgagtctcagccctagtcttgaccttgttctttttctctaacaagccttttctctttctaaccctccctcccaatatacccacttcatactatccattgttcatacacttctctacctttattcctcttctcatattcctcccttcgccagagtgtctttttccaccatcttcacctgagttcaattcatccttcaaggtcccggctcaaattccaccttcaccaaagagcttcccagttttctccagtaaaaaatagttt

SEQ ID NO: 8622 - DNA, 6000 bp, Homo sapiens
atgtggggcacaggaggctcccctcactggatggagcacaccctgatgaggagagtccctgtgttgggtggttgcagaggcgttggtttaggaggccatttgccagggcagagattgtttcttcaacagtaggaattcggatgggacttccatctatcatagggaaaaaagttggtttttgagtgagttccgtgctgtaggttttcctagcgtgtaatcatggggacagctctttgccttggacatgctgaagccttggagaggttttcttcctgctcaggcctctaggcatcttcccagcatgggtgagggagtcagcttttcttccaaagcaagaggagtgggctcccttcctttgaatgtattcagagaagttgggaaaggtgtagagattggagagagctgtattaagggctcctggtctggggaactacccgacccttagattctgtggagcagattgccttcggagaggcaggttctggttctgggccatcaggcccttgttctcttttcctcgtggtcttaggaaatgtctccactcacctagtgacaggatctccaaagagggcgggatgaaatgaaatctctggtcgctgggccccagtgcaagtgaagtgaagaaggcatgctacactcctggcttaaggaaatttattagacttttttcttagtttcaagaagggctgattctttctattaatagctcaagtaaagagttctttaaatttgactttttaacgttaatttcattcttttactgcctcccccccaattatccagcaaagctctaatttctaactgaaaaatcctgtaacaaattgagtgttttaattcagactgtatttgaatggtaaatactatgccacttaaaagtagctgaaaaatgttttaatttcttctctccctatcatttgtttgccatttggagaatcatacaataactgactaaaattttaaaaatatcagcaaatttgtctcttatttctaagaaactaaatatagtccaggtgtttagggcttagtaaaagcaaaagaattgtaggcctgagggtaattttcaaggaaggtattggaaatgtaaaggctttgaataaaatgcctctggcccatgtaagtgtattggtgctgtactagaaatacaacaaacaccattagaaaatagcttgtctttctgtaacatttgcatcccaccaatgccttaagtatatgacactgttattttattcctcatttagtagataatttctctcattaaaaaaagtcataaattttagagagagaccctattaatctactcatacttggtatgtgcatattggactctgtccagggaattttgtaactgtccaacgggttcttgttgcccgcttcctagacagagccaatgtatcaagacaggggaattgcaataaagagtttaatacacgcggagtggctgaatggaagactggagttttattattactcaaatcagtctccccgaaaattcagagactgggtttttttttaaggataatctggcgggtagggggccagggagtgggaagtattgattggtagggttggagatgagatcatggggagtcaaagctgtcctcttcctctgagtcagttcctgggtgggggccacaagaccagatgggccagtttatcgatctgggtggcgctagctgatccacccagtgtaggatctgaaaaatatctcaagcaccaatcttaggtttcacagtagtgatgttatccctaggagcaactggggaggtttagaattttgtggcctccagctgcatgactcctaaaccatcatttttaatcttatggctaattcgttagtcctacaaaggcagtctggcccccaggcaagatgggggtttcttttggcaaacggctgttttcatttttgtttcagggttcttcccaaagttagtgcagcctacacccaggattgaacaaagacagcttggaagttagaagcaagatggagtctgttaggtcagttctctttcactgtcaattttctcattgttgtaatttttgcaaaggcaatttcagtgtgactctggcatgaccagaagtagcccatgatgagatgcatgctcatcctttcagttgctgtgtgggtgcctgtacaaggtgctgtgctttctttccattctaaggcagttcccaggagcaggtgtctgggtggtggtacacagctggctcctgcagaggctcttgtgagtgactgagaaatatgcaaatggcaggttgggatcccaggtagtcaagaaatcatatgtggtcacttcttagatgtcaagaagctttttctaaaacaaaaacaaaaacaaaaccactgagcctctatcccatgggtatggtgagaaattcaccgtgggtcatttttggcctattctgggttgtcccaaggcccggagtccaggcctctggttgtcagcgctgagtcagtggcggatgtgctgtgtcccagcttcctttcactctcctagcccactctctcccccaggtccctgcaggaggccctgtcccagggacctgcagatggaatctcttttagtcaggctggggagctctatctctccctaacctttgtttcccaaagtgacctgatagtttttggaaagaaataccaggaattcctctctcaaacttccccagaggcacagaatgatacctactcaaatcagagaagacagaggggcaaagcaggaagggaagatccattaatggccctgtcacaagcctccccagtctgtccagagactaacctttttcagggctgcccatctggttgtatcatttaaaagtgctaatttccactcatcagaggtcatttataaactgaacagggacggaataaggctgccgtgggctgacgcctgaagcccaggattcctgcacagcttggttttcatgccatctgattttacctcctgtgcctacatcctacaccatgcctccccatcccagctttctgaagtggtcttattcattgtcagacacccaggaaccagtttttgaagaccttcattgcttgagcccttgtttcatttctaatgtttgcagttttgtcactcttctatagcatcccaaagtccccaatgcattttttggaaaataatctgaattagaaagcagggccagatccccagctcctctcctgggggagtctgtgaaccctgccatggcttttgaatattccaccccagagacctagaatcgtagactcaccatctgtttggggaagtgagtctggacatgcccgtgccctctaccactggctgcaggcccctgccacttgcctgtatttatcctgggctgggtgtgagcctttttcctcacagggtcctcagagactcatgctgcacacaagcggcaggagatagagagagtcccaccttctctagctcccatcatgtcaagatcaagtgtgttttactccccgagtttcctgatagacatggcagccagtgtggccactggcagtgccaggggtgactgagattcctctcttcctggctcagtctccttgactgtgaaatgggagcagctcactctagaactgtctgacccccacttgcttaccagcagtctgagtcttttcaggttagttatgaataactgtgaagtgagaccttatggctataaataattatactacagatactctgtgtctattacttttaattattttaccagaaatgctagattaaccaaaaaataaatcagtctcagtcctcagatgttgagctgattaagaaagaacccctttgggataccgaagaacatgaacacacacatatacacacacaggcacacacacaggtgcgcgcgcacacacacacacacacacacacacacacacacacacacacacacacacagaggtaccctggggaattctgcaggagctcctgcaatgtgctggctctggtattttggtttttcagaataaatggcctgatgtgaccttctgaggtgacagtctttgcatttggcagtggctgctgccatcccagggcctaatgagagctagaggctgacagagggatagaggaggggacatctctgtggtgtgggaggtgtgtgccacctagggcatcctctttcctcctgatgttctgtccatgctccatcctccccttcacattcttcttctgtcccctgaaaagccagcctggctatacagccccagggtcctgggaccagggctccagtggtggctggccctctgccctctgctctgtagaagcccaacacttccctgcaggccccaaggtcaggagcagccacctctgagagcaccgctctggacacaaagctagttctttcctgaaggaaggaggttgccactctggcctttctatcagcaggagcccttatcgctgggaatacagagccatctgatcccctgcatcctggacaatgctggtttcaagtacaaagccttttctgcgtgccatttcctggagacaagatgaggcacttaaaaaataattaaattctccttatgtcacttgtcttcttaactgtaagcactacagagatctttcaaggaaatgcaggagagcagggcacactcacatgtctctgccctgggatttgaatgcccagatgaagagaacaaccaccccggctgtcttcttcctaatgatcctgctcttgcaacccgatctgcatgcatgctaggcaaggagagagcctgaaacatctatagaactagtagggccactctctcttgacgagctctctccaaagaggttaactgtctcttttctctgtttgcactatggtttggaaataaggattttcttccttagttgtctgggctgaagatttatgtagcttctcttattcctcagagaacagtaatcattgatgtccctcccaccccccacctcccagccatagagactggtccaatcaatatttatgtgcccatctctcgcagctgcaacatgcaggcataatagatgccagattccttgatggccactgaaaaattagctggtgcctgtatttcaggcttattgtttcctaggatctcagggagatcaggccacgtggtctgtggattaattaaggcacccagataattggctattaatagatggccaattgatggctgccagctgggtgctgaattgactaatgtccttatggtgggcaggtggtctttatcagaagaggagctagctgaaagactttactaattaaagggtgaatcaggaaaagaagataagaggtagcttttttccccaccacttggtgtgatgttttacagtttacaaagcatttatatccacagttgcctcatttgatccttactgcgactttgtgaggtgagtgttattattattctcgttttctgaactgtgatgaatctgaggtgatagcagggtagggacttgggcaagctagcctaatcagcaagtgggcttcaactcgctcttttgactgtcacgcatatgctgtttctgttagagccacgctcaacttcaggtgagattcctttgccagggaagatgaaatatatatgtgtatgttatatgtttgttttcatatggacaaaaagctagtgcacttgctgagaaaagatgccctccctctgctgaaacaccagcattgctttgtgtgttttttttttttttcaattttattttttaacttacagaagggaactggaaaagggattaagggaaatacagagcttgtctctggaaggccaccagagggtctggaggactttgggttttcttctaggaaaggccaagtttaacccatgcttgggccagtcagggccagtccacgggaccactgctttctggagtggaaagagctgggactgtaacggcagactcggtggtgcaagaagtggagagaggctctccgcccttccccctccccacaagtaccccacatcaggttctgactctggcctagccaggagcccacgctgccctgctactacctccctcctgggcctgcagggtt

SEQ ID NO: 8623 - DNA, 6000 bp, Homo sapiens
agtgcttgccttggtagtggataaggatttatggttgctttaatgttgccttagaaacagattaattgcttagctttgagtctttcagtcagcaagaattacatagaagggaattccaagtactgatgaaggccatcaaggagttccttggaataaccccagctgccaatcaagaggatgccattaggatgactgtccaatatattgggctgttaggaatgccagcatatgcctttgctctgagtcacgtcctccttggtagtcaaaactggctatagcttccagcagggaatggtcaccgtgctgccaaccactcttcaggcctctgctccaaaagctctccctcttcctttacaaagcagttggatctatctcttgtagatgtgggtttctattccttgtagctgtgacctcttcctccgacacaactggctggactactcacagctggatatctttttaccatcctttgtcagtgtcatttgggtctgtaatctgtgggtgatgggttgtgtgttgttttaaaataaatagtgatcagaagataatttgggtattcttgatactgtgctaaagtctcatttcatgatgtaatggatattttaagttagtactgctcacagttgtacgagttgatctgaatccaccataaaaatcagcctatactttgtattggtaaattaaggcagaatataagaaagccaggcagcaaatcaacatatccacagtctctattcttatctttctgcttaatttgtatggaaatgtatatttgagggaaaatggggagagtttagtagaactactttgaatctgatgatagaggaaagaccccgaaagaaagaaaacaaaaggatgaagaaggaactcacatttagataacatctattccacatcttcgtgggcatttgaatttggtattaatttaataagaaaaagaaatttaagtccagagagttctttccaattgcttcattgccaataagctacatcagtgtgctgtgtccactgttcacaaattataatactgctctcttttgaatataattgtaatgtttttagttaacaccggaagcccccttcctttttctctgataatgatgatggatttttactgacctgtctacctttagacatctggtgaccttttggctaagaacatattgtgggatgtgggctagggaagggataaagggcagggctttttcttggctggcccaggagattgccctgacagtgcatgcaggaagaggttgccaggcaattgctaaaagaccagattgaagggcagctgtctctaggaacatgctagccctcatgttacatcacagttattgatgcttgtctgtttgagtctaatgcataagataaaagccaggctattggaaaccttccacaagacttttgctaactaggccctcctgaccctgcatggaagccaagaggctttccaacgggctagtccaagccaaccccaatagttctcaaagattacttcacacactatcagggatgatataatggagcagttagttatatcagtcttggaaaaagaccaggggttgggtcttagttgaggagtttactgtctgtatgactttcagcaagtacttaacctatctaagcctcagttatccaacctccaaatgggctaatagtacctactatttaggattattgttagggtactgtgcattgcacatctccaggggtgctgttctcatggactataatggaaatagcaacactaggcattttataacagcaatgctggctaatggaaatattaaatataattgatatgtatagagacaatttagcatggtatctgtgactgtttaagaatggaatctagtattctctcaggaaattggttataatttggtgttcagctcttttgaaacttgcttctaagaaggaaaaagcaaaatagttttggacacagaataatctgcaaagacttggatgtaagaaattgttaccttgttcagggaatgggaataatttccatattctggagctcagatgccagatcataaaaggtcttagaaagcctgttgaggggtttgagctttgtcctcagggaagtgggaaaccaatgaagagttttaagggacgtgaagagtgtcagatctgcactttaggaatttcattttggctgaaacgtgaagaatggaatgatgcgatttggcagtaatttgaagggagtggttagttatatcagtcttggagacagacacaggtttgaatctcccttcagtgtttatgttcagtactactatttatcacaaatatttcacctttctgattctttcaggtccccaagacatttctttcaccattttaaatgttaaatatcttctgtaccattttgtatacctgccaagtattgggatcacttataaattagattttatatagtaggcaaaatctggtctccttgtttccacccttgccccttcagtcttttctgcactgaaccagcagagagatccttctaaaagaaaaatcagatcatatcaccctctgattagaacctcccagtgattctcatcttctaccccatcaaagcccatgccttatggcaattcagtgttctctgatccattcccactcctgagccctgcccccttggtccattaccctcttgctacattggttttctgtgtttttagactgtgccaagcatgattcccattaggacctttgcacttgctggaattcttttcctacagatatccacaaaacttgatctttcgtgtccttcaggactttgctcaagtgttaccttatcagagaggccttccttaaccatctagtatgaaatcatgcatcccacgtgtatacacactgacacatacacacacacacacacacacacaatctcacactctccttgtcctctatagattgttctgcacacacatgtaccataggagtttttaaccttctgatatttatatttgtttgtttcctccaccattagaatataagctctgtgaggacagagactttgttttatcactggtgaattctcaggatctagaagacagactagtaagtctttctaaaatacatattaagcatgcataaatattgtggatgaaatggatacacaagggagttggaactagatcttccaacattcttgcaggatggttaaatttcaccttgtttcaagcagaaatctcaaagcctttcaaagactgaacaagcagacatactgaccagaacttttgcatattttgaaaatatgctacctctatttttcagccttttacttagttttgaattctactgctataaccctcctctgattttctttagtatgggaaaaatgtcaaagaagcttatctccctgtagtgatgagctataaagggctttagtctatggtgggatctctcagggtctgccagaatgtcctaggcagcggtgttctcctgggcactggtgcagtttgcagtataagccatcagcagcaaacatgagccagagagtgtaggcgaatgtggggtggctctcagccagcccgaagctatgaaagcctgtaatccagttcctcttttaactttttccaggacataagggtatgttctgactcagggcttcttcctattgctgctttatctgatgtcataactagtccatcctgcaaggcctgggagacagtcaccttgacttggagcagaccttcctctacttcagtttcccctcacctccatcccaggttctggaagcagaagggatgtaaggtctgagtagagttttgcttgagctggtgggtggacttaaggccatggtggttgagtccactgctatgcctaccaagctttgtgtgctgctcactgactctgttgccatggccctccttgcctacagtccttcatcatgtgtatattttgtggtcactcttgtcatgccacatgagctaatttaaatggaattattggtcctgcattttttggtcacttgaaccctcgacagaactaatatgtattttagaatgaccatggaaaatatgaccgacaccgagaaggaacattttaaggttggtgacgctgattccacagcctgccaggcgcttacccacaactaggccttggcctgtttatctccctttccagcctgcagaaaaacaggctctgtacacagatgtgaagagctgtgcttgaagaaccagatgcccagctgctaatgtatcagcagacctgggctggctgaaaattagaaagaaatgtgctctcatcaaaacatgcttttaaaaactgtacttaatgtgtggaaatattgcattatagcagaatttttttctcctcaagaacaaatgccattgagctttgatttcaggcaagcttgaagttttgtttccaagtaagtgtggagcaataggacatgatttcatgaaatacagtgtaagatgctctctggcgtttaagataatcaccaggccttgtgttggtgggattttttcggagtctgattttcaaagcatcaattgtaataaggtgcttttggcattgaaaccgtttttggaagatgatgtactaacacaaatttagaagaaaatctgctttagtaaaaaggaggaaattgtttaatgcttcaaaagtcctgtgattttggctattagcatgcataaatgtgtgtttaataaggcaaggctatataaattgaacttttcctttccagtaagtcaattgtgtatcttgctcagtgaatgggtactacatgtagtaaattcacagaaagattgagttgtaaactttacaaaggattgcttagtcactgatggagtcttagaacaatcattcaccatagattttgtgatggtcaaatataaacaaatttcggttttgtgatggtcaaatataaacaaattttggtaagagtaataaaaataagtaattagtaatgctttggctgcagctctaatgacatgactttttttctgccctctcccccatcttatttttaccagtaggttgtgacagttggaagtgtcatgtacaacatgcggcgattaagtctttcacccaccttttcaatgggatttcatctgttagttactgtgagtctcttattttcccatgtggaccatgtaattgctgagacagaaatggaaggagaaggaaatgaaactggtgaatgtactggatcatattactgtaagaaaggggtgattttgcccatttgggaaccccaagacccttcttttggggacaaaattgctagagctactgtgtattttgtggccatggtctacatgtttcttggagtctctatcatagctgatcggttcatgtcctctatagaagtcatcacatctcaagaaaaagaaataaccataaagaaacccaatggagagaccaccaagacaactgtgaggatctggaatgaaacagtttctaacctgaccttgatggccctgggatcttctgctcctgagattctcctttcagtaattgaagtgtgtggccataacttcactgcaggagacctcggtcctagcaccatcgtgggaagtgctgcattcaatatgttcatcattattgcactctgtgtttatgtggtgcctgacggagagacaaggaagattaagcatttgcgtgtcttctttgtgacagcagcctggagcatctttgcctacacctggctttacattattttgtctgtcatatctcctggtgttgtggaggtctgggaaggtttgcttactttcttcttctttcccatctgtgttgtgttcgcttgggtagcggataggagacttctgttttacaagtatgtctacaagaggtatcgagctggcaagcagagggggatgattattgaacatgaaggagacaggccatcttctaagactgaaattgaaatggacgggaaagtggtcaattctcatgttgaaaatttcttagatggtgctctggttctggaggtggatgagagggaccaagatgatgaagaagctaggcgagaaatggctaggattctgaaggaac

SEQ ID NO: 8624 - DNA, 6000 bp, Homo sapiens
tttaatatatttcccctctgctgattttagtgtctacttttctatttaaaaagcttaatactgagctttaagggtttccaattaagcttaaggaaaatatgaaaagaatgaaagtgtctgcctgacaaccatcctgttttttgagacaaaaaggttgatttttgtaatatgaagaaataacttgaaatggcctgtcctttcccatttctccagaatctccctcttccactcactctcctcttccatctctttctatttcttttgtgttttcctctcaactttcaaatccatgtctcatttcttaactgttgttcaacgtaggctccctgtattcttgttcatgataaatcatcaggcgtgagtgggcttaggacagcttagcacatacagtccttaggttcttttaggtagatctcagtagccatggttgttggcggcaactgagtgtgaaccccgtttccaagagttcacacaagtacagctcataatgaattcaacaccaagaccaacttctgctacagatctagacatttattaatgagtaggcacaaaattttgtagcctattctagaagcttggtgaagttccagctcttcattcttttaagtacctgaaaaaaatgtcttccaaaaatggttttcctgaagcaaatatgacagtatttcaacgacagcacccacctcaccatctctcagaattaagtgactaagaactgttagggatcaacaatagtacctacctcatatcattttgtaatgattatatgaattaattcatttaaatcactcagagtagtgtgctagaaataagtgttagtttttattattactattattatggaaccattcctcataataaagggtgaaaagcctcttagagtcacatactctgtttatgtagaagtgaggcgtgttcaggtaaaatttagttaattcacgcatcttgcctattaataatttcacaaaggattaacttcctcctaactttcgttggaccaattaacaagcccttaatttcatcagtgataacttattttcaacagatattataactaatgagcacagccacatcataattagagatgatagtagcacaaggcttctagaagccacctctgtctgctgtaattctgactgaggtgttggggcataaattcctgataaaggcactgacactcttggggtacagacagcgttaagaaacacttacatcgcactgtctgtgctgaatttttttagaatacattacagttagccaaaaaccatgtttcctccaaccagttcttcaatcacctgagaacaatttgtgagattctgcctcagtttcccttagataacaaaattgcaagcccaaagactgagtagctgaagagacacaaattaatgggtacacacaagctttatttgcttcatccagattactcatgtttttgcccacaatactttttctacactatctagacagagaattgctccttgttccacaaaattacaatcatttataacaaatattgctgtatccgtatcacagcatacaccctagaacctcctaagtattgcaaaggtgccctagacatctgcctggaagactacagctacaatttcttcttttgaggcagccataaatattttctctttagctcttgagactcctgtaaaactaagatttctggcccatcctttctctaaccctgcctttatctcccaaggccccagacaatataagacaggcaggggagtgagggaggaggggaagcatcttcctaattgaatgctcttgggaaggttattcacaatcttctacgcttattctatttctatggcttttccttatacaaatcgctctccaaagtcccagccttatccattcctagcaatcaagagaataacaaatacagttgatccttgttatttatttgtagccctggcactttgatgatccttagcaaacacgcagagaatggcaaacgtttgtgttcccaatgcacatgttcctggctgaagttgaacaagactattggcttccttcttgtttcagctctcacactgtaaacaagtgcgctattttaggtctttttagcaccacgtttttgtgttttacgttggtgactttgctgtttaaaatggccctcaagcataatactaaagggctgtctaatgttcctaaatgcaagaaagatgtgatgtgccttatggagaaaatacatattagatatgtttcttttaggcatgagttagagtgctgctggtcatgagttcaatgttgatgaatcaacattatgtattaaggaaggtgtcattatcattcagaaacacataaaacaaggcaatggattgattcagtgatgaaaatgtgatcagaggtttgcaggaacatagccctgtatttccccatgggagcaatggttcagtatttgctaattcagtgttcacagggactttatttgccacagctactgtgaataatgagaactgactgtaagtactaagagactagatatgtttcacatatgctggacactagaggaagtaggaatgaagacttgactcttgtccccttcaggcatctaccatttatttggggaggaaaggatagattaacacaatatatgagggtattggaaaacaatgcaatgttctacgtatcttttagatggaaggcaactgaatgtattgtgcatggtgatcagcttgaatatgttagacctgtatgagagaagagacataacgccttcatgtcagggagcagttgacatattttaaagaacaccaacattaaatattgcatgatatcctttctaccctgtgggattgttaggaaagatagaaacatgagtattttataaaggaagccacagtgcctcagggaaagactcagtaactaatgtgatgtaaccagtaaatggtggcatcaaaaatgcagtacggatttcctaactcctaatccagtgctctttccatgctaacactatgaaatgtcaaattcagaatatggacctgcagtcctgaaaacatactgtgtggatgattttccttttctttttgaagctctacttgatatttttaaaacgaataatcacgactcttgttagtgaattaaaatacatatgttgcaaaataacaaaatgagtaagaaatgactgggggcaagggcagaaacagttcacagtggaaaatgatagattttgcgtctgctggccttcgagcagctgtggaaggttgggagacacggcatatttaaatagataaaagcatcatgtttagcaaggctgaactgtttcaatcaatatactactgaagaattatcttttagtatcataaaataaacttttgacaggaatgtgacatgtgtgattgctacaggtgtgatttgggggccactggacactatttatatagtgggcatcagagtcccatggttgaatctttggactaggaagcaatatacaagtctaaatggccacttgggttagtagctgatttgaatcaaatcttcccagaattacattttttaaaaaatactggactttatatttgttgataacaattatgtagatggtgagaagctagtgagaaatcattcctgttcaatgttgctttcttttggctttaaatagaaataaagacaaaaaaaaaaaagtccagccactggacatgtcatagttttttatcatcttttggaaatcagggaaatgtttaaatcatagtcccaagtcttaatcaccagcatccagtgcctgtggtcctcctagccaagttcacttgcattgctagatttctactcttaaatttatgctggctttgctggtctttcatctaggacacacagctttcagttaaagatgctgtatttcatcaaaagcatataaatgtcctatttcccttgggggcactagatttaggaattttcatttcctgatgctattttctttataagacaggatgagagaaaggaggagttccactgttagcaaagatcatcacagcggggcttctatagagatcttggaagatcttaaatattcctaaaatattgactgaaatacaagcaattttattcatgccatttctttcttttctgctttcttcctgtttctctcctgacccttctcttcctctcttcccattcttccactttctgcctcttctgcagctgccaaattaatgcatccttttccctccttgtgagttttggtcccctgaacttccactgccttatatgagatataatatggtaatgggaagaagaatccttgttatgagtaacatatgtgattaacagatcatcgcgactgatgcttgagtacaaggtatcaagccatatttagcagattgagtttaaacacctggtagaacaagtttggtccaataaaaagacccgaattctctcccttttaagatctctaaagacactggttacatctaaaccattgggtaggggaagggtgccatttgccattgtagttcagatggagggatcacctggtggagggagagttgctttttaggtgttcccgtttcgccttacacgtgtccctttgatgcgtggagaatgcaagggagaggcaaagcagggcgattttcgtgggaagctagaccagcctccctcgttacataggctcgtcctctgcattgcatccgagcttcagtgatttgctgtttggagactgcagatttgcatagagccccttgcttcaccagcgtgtgtggtttttcttttctttttttctttttctttttctttttctgtttctctcccttactccttcgtctgcatcttcttctcagctgcctttccgccgttcgattcccacttccttcagaagggcgcactcttccctctgaacccctcgccgggcgtaagtgtcaggaggcggcggacgcggagattgcctcgggagcaggcgatgcgcgccgctgctccgcgcgctgcccgggggaggctggcgctagcgggcgagccggccggggctgaatggagggaaggggcgcctggattccatggggtctgcttctgtcttgaaaggaggttgggccggcgaagtggcctccctagtccccgcacacaaagctaaatggatttacctagtggattcgcggtggatgtctgtcatgtagaagtgaggaccttccaggaggagctttaaacaatttctcggccccccacccgccggcacgcactctcgcccgaaactctttgggagtatctctcgagaacctggagccctggaaatctgggagcagccacccgctccgcgcttgctgttcccggggctgcctttccggacaagcccctctccagctgcattcgcctcggctatgtttcggattgtttggggtgctaggcacggcggactccaggaccccgagaagactgtccgaaggagggagaggatgggtgccctggcgcggtgaggcggccggcccctcagcccactccgcgccgcccgctcccctgcgccctctcctctccccgcgccccaaactttgcctcccgcggcggctgcccctcggcgggcgccccgccatgtaccagaggatgctccggtgcggcgccgagctgggctcgcccgggggcggcggcggcggcggcggcggcggcggcgcaggggggcgcctggccctgctttggatagtcccgctcaccctcagcggcctcctaggagtggcgtggggggcatccagtttgggagcgcaccacatccaccatttccatggcagcagcaagcatcattcagtgcctattgcaatctacaggtcaccggcatccttgcgaggcggacacggtgggtctgcgatgccaagttctcgcgggttatcccctcgctcccctctttctaccctgcactcgctcctgggctcctaaggctcagagaaatgggagctcgacaaaagggaggtgcatttgggtgtgcttggtgcgagccacttatctctttgaagacaatagaaaggggatgggggaaggcgtcgcgggtgttggtggtgaggggtgggaggg

SEQ ID NO: 8625 - DNA, 6000 bp, Homo sapiens; identical to SEQ ID NO: 869

SEQ ID NO: 8626 - DNA, 6000 bp, Homo sapiens
caaacaaagttgcaccccagtcgcctcgtgtttcctctcttcttttaggcaatttttttcctccctctctccgctcccctcgcagcctccactccctttcccttggccccttcctccttctctgtttcggctggaggtgccaggacccccggccgcagcctcccctcccccgccgctccggtcccctcccgtcgggccctcccctcccccgccgcggccggcacagccaatcccccgagcggccgccaacatgctctttgagggcttggatctggtgtcggcgctggccaccctcgccgcgtgcctggtgtccgtgacgctgctgctggccgtgtcgcagcagctgtggcagctgcgctgggccgccactcgcgacaagagctgcaagctgcccatccccaagggatccatgggcttcccgctcatcggagagaccggccactggctgctgcaggtaagggcgcgctcgctccgctgcactccggggtccgctagctgcgagcgcggggcagacggagcggcgggccggccagggggcgccgggagcctgaaggcactggtccccgccccgccccttccctcctctctgccgcagcagcccgggcttccccagcccgccggcagcgcggttccgggaccactggcgcccgcggcgcaggttcagggggctggtaagaggggttcccggacctgagggggctcccaagatggacttgcctgggtcgcggctggcctggcagggggcgtggagcgccccgggggcgcctagcgaggcgcggtcccgggggagggtccggtcctgagccgctttcgcctcccctcggtgctgcaagcccccagtcgccctcggctttctggggttggctgtgtcgctgggagccgaaaattgagtcgggagaggagggggctggtggcagcttgaattgccgatttaaaactgtgttcctgcggcgccgtcggcagcgccaggtacagtgtccctggtccgcggtccgcgcgagtgtgtctgttttgtggtggaagaggaagaaggtaacccaaggaaaaatgagaatccagggctctaggctttcggggaaaagggtctatttacttattgggtggggacagtttggcaggagagggaaacttgggagaggtgagtgtgggatccatagagagagagtgcgtgtgtgcttgttagatgccgcacaaccccactctgctggtgataacgggggtgaggcgcgtcagggaccagacccaggtaggtaatggggagattaacctggagttcacctcatcaagtgccagacaatcgcttttgcaatgtgatacacaccggttttcttcttggggtgggggagcggagcgcctctgcagtaactgcgggaggtgtatttgtgtgtacgcgcgtttgttctgttaggggaagcagggatgtcctgaaactgacaatccccgcactagagaggtgaagcgaaaggtgagcgctgcgacctgtgggtttacaggtgcgaaagcttggcttgaaattaacagacgcgtgcaatccgcgcgctcgcgcacacacgcactcaccctgccccgggacgagtgacagcggagcgggggcggggagggggttcgaagttcctctgccctgtggtctttccacgtcccggattaggcccatctctttttggggttgttcgtgcaatgaggtgggggtcctttcaaccaatggatgtatcacccccccaccccccgcaaagaaatccccagagcctttccctcgccaccacacttaaagtgtcaactgcagcggtgctctaggctttgggccgcgaatttaggaaataaaataacttgggcaacggctcccgccttttagagccagtctgctgaatccacggtctgtcaccacccacccccacttcgtttcctgacctctctgccccccctcaggtccccatgaccttttctccgaatcccacaagagcccctgggggtcagcgtccaacctgcacagaagttagggaggaggaaacctaagcctccccatccctccaacccggggccctagatctggaggtgaggagggaaatagggggtacgtgtacaggagcgcctaaggggttaatgagagccctctgaatcccagcgttattttttcggagtcatttatcagattttacggggggacctccaagggctctccgtttccaccgagcgccatctaaacagagcccagggctaaaaatacaacatttttgtataaattggactcgcggcccgagcggccgcccctatgaaagtactctttgtgaagaccgtggaaacggcggacaaataactctttattaatgccacaaaaaacgcactttaattatagttaggcagatcagaggcggggggtgggggcgaggcggcggcgacctcggaaaattcacaacccaacttttgtgttgaaagaaaagaaaaacagaggaaaagaaggagaggaaagacggagagtgagacggagcgagggagacgggtatagcagacggagggagggaaaccctcgcctcaccaccccttctgtcgcaccccacctccgcctagatttttcttaaaggggtagacgccgtctagaagggctgcacggcagggggaattatccccgccttccagcctgggagggggacagcgttcccgcggcccagcccccctcctggctgcgcgggcgctcccagctcgttccccgtcgcgcgccgggccggaggcgcatgtggaaaagtgattagggctccgggttctgcagagtcacttttcggctgtactggcgtgtgtgcacatttagctggaagtagttttctgtggaaaaaaggaaagtgaggagggggaccaacccgggctagggggactgagttgtcccctcgggggtgcaggagcgggtagatctggagcccgagtcggtacgctcgtgggctggcaggcggggcggctagacaggtggcgcccctcccctttgcgccgggtgctgccccggcaggagaagggttaacgtggggtggggtaactagtgccgacgtcaaaggtgagcgggacgcccttgcccccgcccctctgaggtctccacggtttccggtacccgcgcccggccggctccgccagccgtttcgagagtccggccggccccggccccgccatcctcggcttgcgccgccaccaccggggatctggttacctgcgcgggtcgccctgcccggtcccgccccgccccgcgctcgggttccaaactccagggcggcaaccaaagtccgtctccgttatttccagggcaaaatgcattaggaaaatcgcggctctgggcccgtgaccccgccctgcagagtcctccgagggccgccgggtccctgcgcgggccacaccggagagcggaggaaactccaacccccatctgtagttgctgcctccgggcaccgaccgcttaccgctataaataatctttggcctgcggccaccccgcggggtctcgccagcccgtggcccggagcctggaaatatttattccgagaggctcccgagcgcggggtgggggtgtgggggtgggggtgggggcggagactcccgcttcgggtccagctgtccgggatacctctttcctctcgaaagtcattaccaaaaaacagcctcctgggggtgcccctgggcctccgcctccttgcattatttattatcctctaggccctacttcgcagttcttgtgcacgctatgaaaaataaaacctgcgtgctcgtctgtgtgagtgtgtttggtggggagagggggcaggtgactgtaccccgggttggggtccgccgcccctccctcgcgggccctctgcagaagtgcaccctgagagagacccgggtgtggctcccgcagggttctggcttccagtcgtcgcggagggagaagtatggcaacgtgttcaagacgcatttgttggggcggccgctgatacgcgtgaccggcgcggagaacgtgcgcaagatcctcatgggcgagcaccacctcgtgagcaccgagtggcctcgcagcacccgcatgttgctgggccccaacacggtgtccaattccattggcgacatccaccgcaacaagcgcaaggtaagaactctgcccgttttcttccgcgcaatccctcccccacctcggggcaaggagttcctggagcccggggaatgtcccctaccgaatctgtgcccccctttgcacaccatgcttgaagactccgcagttccccgccgacaaggcctcgagtccggatccagggcctgctccggcctcctcttggtcccttttcttgctggccgactgcgtcatgggcacccccaacggtggcttggaagagcttgagcgtgcggggtctggggtgtccaaagcctgtccttgccttgctccacagagctggaaaaagaagggggcgggacagttggccggcgttcgccttttcgccacgtttcccagggaattccgaggactggagaccgatcattctaaaatcaaagctgtccttcccaccacaggctgcttgaagggagtcgcgggcaggcggctgcgcgtggaggttggggacagcttgtgggctgcggtggcggggcctggtcagagaggtgcggcgagcctgggcagcggagcgcacgggtctgggccgtgggggaagggcgggcggggggagagcaggcgaggcacgagcggggatcaaagcgcacccacccccccccgaaagaggaagggaaagtgggtgtttatcccttggatttcccgagcgactggaggaggcgcggaggaggcgcgcacgggacaggcccccgcccctcccggctgcgctaggctcccagcgctggcggcacgtgctgtttgaactgcagtaacccgaaagcggagccagcgggcgggccctaagccgccgggagggaggctgcgcgacctctcccactccatttttttccactgggtcagaggactcacccaggtttgaaacctaaggaaagggagaggcagccccccgtccctgagcggtggcagaccggggaggtggggaggcggactccctccgtcaggggccgcatgtgctgtggtcttggcgaaggtggggagcgctctactagccgacgcatcctgtagcacttgacgttctctgaacagcctgtgaagggtaattcttaacggcagacaaaagaaggagcggtcaaaccgaggagactgggttgcatccctgcccccacccccgttcccttatacagcatgtatttcaggaactggaaaggggctcccaaagtcctctcttccatctgccccactcctagctggaagcagttaccacagcctgggggcggcgggagaggagttctggggagtggctggaaggggctgtaggcttcagaatgaagcctcggcttttcaaagttgcgggcacttatttttccctcagcctttgcgactccaccagaggcccattccaaagagcgaggagagtggagactcggctccaaaagagatggctgcttcctgatctctgctttacagaggctttggccagaggggtattattgtccccttttcatggaaggggccactgaggcgtagagcggttgaatgagacttgaaccaggtcaggagacaaagaaaatttcggggagagcctgcaacactggactgcagcgtccgtgggaatagtctctgggccccggaggagagtcctcttctgtcctgcatgcctggggctgctggaagctggggtggacagtgagtgctaggaggaaggaggtgtggccaggaccagagtgtgagaccctggggtgcagagggctttggggtgagggcgttgtcttggggttccacccaccctgggcctgacttggcctcgggcctcccggtgttggctgggaagggcttgcctggaaaaccccaaggttttttggcctacattgtccatttagaggggagggagaaggaagggagggtgcagatgacccgcctcaggaatgcggtggggggaaggggggatg

SEQ ID NO: 8627 - DNA, 6000 bp, Homo sapiens
catctcttgtatgtctttgcagtccccaccccgtgaagcccctcagtgccgcccctgtggagggcagccccgacaggaagcagtcccgctccagtctgagcatagccctgagcagtgggctggagaagctcaaaacagtcacatctgggagcattcagcctgtgacccaggccccccaggctggccagatggtggacaccaaaaggctgaaggtaaggcccagcagggtgtgggggccatctgacagaatgtgtggtggagtctcagggcttggtcctggtgagggtggggcagggagcaggccaggtcccccatatcagagtcctgaagccagttaggctctgactttggagacaggcagcctggggccctgtggtggtgaaacttaggtgttggtgggcaggcgggcgggcgggcaagcgggcaggcaggcaggcaggcctagggctgccctgctcactgtcttcggtccggcctcaggactcagctgtgctggaccagtcggccaagtactaccacctgacccacgatgagctcatcagcctgctcctgcagcgggagcgggagctgagccagcgggacgagcatgtgcaggagctggagagctacatcgaccggctgctggtgcggatcatggagacctcacccacgctgctgcagatccccccgggcccccccaaatagccttcctcaccctacccccaggagggttggcatggacctattgctgcctgccctctctcctcctgaactctctcatctgcagtggggcatcgtctgtcttgccttgtcactccttgctcctctccctcctgcctcaactggggctgctggaagggggccctctggattccctttggaggcatcaggttctgtgcacaacttgtgtgtctttgggagccctgggtctttcccacctgcctgttttcatatccctcagctttgggggccccagggaattggaactcttcccccaagacagagcaggggtgaactgtagcttgatgcagtaatctgggacaagactggttgctagcacatactttattatcccccaaggatggtcagccatttcttcccacagccaaagccccatccccttcatttccctccagtccctggaggggcttctagtattactgggacaatgaccacgctgcctgtttgtctgtgagttacgggcaaccagcctcttcagcctcacacccattcccctgagagcaagaagcctgtgtggtctgggccagtctctgccatgtcctgagtctgcttcagtctggagctgtttgtggggcgagtgccatgtggacagtggtggatgatgtgtgtgcttcaggctgctccctgacccctctgacctttccacgagtgtcacatgggaatgtgtggggcgcaggggcgggtgcggagagagcacctttttgcttttcgagctcttgaccacctccaatgtgtaggtccctccaggctggggcttgggactgcttatgatttggggatcaagcctccatgtctattcttgttgcctgtccagatgccaaaactctgtgttgctgcagggtttgaacttttggaaaccaattaaaatgtgcctttggtgggcggggtcaagagcccctggatgtcgacctctcccgctgtgtggcgtccccctcccacctgttgaatacatagggatggctctctcagggccctgggaatgggaatggacagcactgctgtgggctgttcccctcccctaaagttaatctcttggtctggccaagttgctgctccctcaaccttcctgctgtcttcccctccctcaaccccaataggaggatcccaggataaacactgctgggcaggcgggcaggcaggcctggggctgccctgctcactctcattgtctggcctcaggacttagccatactagaccagtcagcttgcctggaagagggaggtcccactatgcctttgggagacacctatacttaggaaaaagcctttgttgtcctcccatccatccattaagctgctatctcagcctgtcccttctgccccaggggcttgcctggcttggctgcagtgcactttgaaatgaagtatctgtcctttggcccagcccctggtttgcttgtagaaaacatggtaggcttccccaaggcatctgcagggaactttggcagcttggggcaccctgaattagcaaaaatggggggtgatgaggtgctgaagaaggatacttaacagcttagtgaggaggcaagagctcctctgggaccaccacttcttcaggagagggcctgtgggcttgcttttggaaggcctcaggcagacacgtgccctctgggtgatgtctgtctgctgccaggatggagcagaggagcgccacacatggaggaaagcccctgtaacgttacctaccttaaactccactcatcaaatctgagaaaagtatccactggtccccagggtttcagtcatgcttttgggggtcattgggtattagagaagtaagtatcttttctgagagagggggagtcaccccccctactggggattcctctgggctttattcactcccagccctggccctgacctttgtgggcctccctaatgcccagggcatggatggcttcagaggagtttttgaatcgaagcccagggtccttgttgatgtttcttctcctagccacacttggaggaaagttgcaggtgggttgggcagggagcaggcatggttctgctttgctgtttgtcttcctagttaaggctctttataaagagcttgttcttcatgttttaagcactttatgaagaataaaacattcatgtactgcaggtggctctgttgtgttcctgttttggaatgaacagttacaggaggctgctgtgggagaaagcaccttaaatcaaggtgatgggattcttggatgacactgtccctgccccttataagggggcagcagcacagtgttgcccagcagcctgaacttagtcttttctgactcccagggtacccacatttattgcgcacctaagatgggcccatttattggtaatacagagggtaagaaatggattcctattctcaagttgcatggtctagcaggggaagataagatacaaatccaagatacaaatagttcttcatggctagatagaatctctaagataagatacaaatccaagatacaaattgttcttcgtggctagctagaatctccccctagctttatgaaaagtgtttcttgtggttcaactactagaggatgaaaaactttgactgctacagctcatgtagtgtccagaaacactggcagacatgagccaaccctgcactccaccacgagactaatgagacccaaagtggagttccctagaagaccaaatatttctactgtcatcttgggcaaaacaggcagctcccgaagtctggctcactgaccaggtaattcagctgggaatcttcagctaatccattctacaactgtatgtgtttattatccatactgatccttactccacaatctgtaatactcccccttacctaacaccctccccacccaccctagtcccaagttctcctcctgcccaggaattaggcccaggagggatcttccttggttggccagacaaggtgaaagctgccagggctcttaatcccccactgatgaactcacagccaacacttatttgagtctctactgtgagcccttttatgtctggctctgaaaactgaagtgaatcaaaaagtcatagcccctgccctgtgaactttacagtaagaaagactgtccagaacagtaagtagttgtgagtgcaaaagagaagtgctgggtgccacggagcctctgtgggattttgtgcaagcagagtgatggactgggaaatgcaatgtttaggctaaagccagaaagccagcatcaggcgaagatttagtcttccgggtacagaatgttcaggggtcgggaggcgggcaggcccagcatgctccaggaactgagtgtcagggcagccggagagcacaggacgagtgggcagggtggcgacggaggaaagtacgagaaggtccgcagtgcaactccttggagaaagccttccgaggttaaccctactccgcctggagtctttgcccatctggtcccaggttcccccttgaatgggacccttctgcgctgcctggccccaggagcgacgcccacggcagcaactctaacttctgggggcaactaagcagcgaggggtggcccgtggtcgtcgtacaggaacacctttcctggactgccgaccttgcaccttgcaacgcggacagcgggcaccgagacctctccggacggccgcaactctccgcagtctacggttgtaagcgccgcgacgcgaaaaactacactccccacaacgccttgcgcctcccgctcgctgcggttgattagggccaatcgggagaggcagctgtggcgggggccgaggagggacattttaaaagggccggagattgcgggcgtcagtggccatggcggatacagcgactacagcatcggcggcggcggctagtgccgctagcgcctcgagcgatgcacctcctttccaactgggcaaaccccgcttccagcaggtgaggaccgggctgtggtctgcgggccggcgggtggcaaagagaggacgagcaaactcccctccaaagtccccttccgcccaagggtctcccacccgcggccagcggagcctgcagctagcgccagggggggaacctcggtcacagtcacccttttcccattggtcaacggggcgggcgcggactcccatcttggcttcctattggcccttggcgccgtcactccccgactgcccgcgccctctagcctttcccgcccgcggcgccctgtgattggccaccggcggctgcggtcaaggtcccgagcgcccggcttcgagcggctgctcagggtcgctccgggttgtgcagctgcccgcccgggacgcaaagttctagtctggccctggatgggaagttggcgtggccgggatgccttctaactttttcccccggtggggactgacgttcctttcgagctgctggcggtgccgccgggcagcgtcgcgccccgcggtcactccccagccctggcccccaagccgggctcggcgcgcgcagcaggttgagggggcgagtgccgaggcgagcggcggtccggcgtcccccgtccctgctctccatctcgggctgaggattcgctgacgcagcaagccggccgatgccctgaggggacgcagccagggcgtgcgggggaaacgctgtgtcatcccctggggccgtcgtccctccgaggggctgccgcctgggaacccccccccagcctcttcctcgctgtgttctccgcggagggtctcccgcgcccgggcccccgcgccgccggggactggctctgggcacacccgctcaggctcttcggggcacggcgacaggggtcctttccctccgggacctcctctggggcgtcgccgactcggccctagactgcggaggcgggggtggaacgcggagcccgggcgcctggttgggcccggagaccggagccggggaggggccgctcccgcgccgcagaccctcgggctcccgcgcctcccgcaccaatgagacggaatttattaggaaacaggcagagagaccgctgaagtgaaccggggcttgccaggggtgggcggcagccgaggcggccagaaaagaactttgaaggaagaaaggaaattgtgctaaggtcggtgcggtggctttttttttctttttttgttgttgtggtggaaggggactggttccagcaagggggtgccccgagctttgctgataattagggaacttggctcctgagccgtctgaaaaaaatgtccccagtgtttcttaacaggactttaattccttttaaaagtaggccatctcagcatgtaggtatccgaggcgagactggcatcttccttccagtgtaggaggccatctagggcgagagtgtcggggtg

SEQ ID NO: 8628 - DNA, 6000 bp, Homo sapiens
gatgtaaagcgttagggaccatccttgtggttcccacatggggtctgggtgaattcactcacctgtggggccccacccccaaacccactgagaaatatagataaccaggccgggaccttctagttcagtaagtctgggtggcgtcttgggtggatttatatctgtatataaatcctgcaccgatgcatagcaggtttgggtgctacagctgtggagctgtgaaaatgagagctgtcttgtgagccattgtctagatgaatgttggggccttggtcacaccctgattgattttggccatgtctctgccctggatgaaagtgacaggtcaggcctcagcttgggctttggagttcctaagcccagtgccccagtcagctaggcctggtgaagggcacagagagggagaaaaaaccttgatcaggtagggaggaaggaacagtagcagaatctccaaaactggagaccagggcctatctcttgcacagccagacttgggaagttgaggttggatttttttttttttttttttttttttgagacaaagtctcactctgttgcccaggctggagtgcagtgatataatcttggctcactgcaacttccgcttcccaggttcaagtgattctcatgcctcagcttcccgagcagctcagattacaaacgtgtgccaccacacccagctaattattgtatttttagtagacacggggtttcgccatgttggccaggcaggtctcaaactcctggcctcaagtgatctgcccgccttggcctcccaaagtgctgggattgcaggcatgagccaccatgcgcgtccgaggttgaatatttattaaaggatctggcacgttcccttgaaggctaggcagagcgatcggcgtcagggattcaagagcaggagtcctaagagctcacggtcgtgggagagagtgagaggataagctggttttgccaaccaggcttggcgtgccttagcctcccaacagccaagaggatggttgtccccacctgagggccaaggaagcggaggctgagggaggtgacctggtcagtgggggacccagcactcaccaccatgccctgctgtcaggcgcatccagatgagagctgagagagggccctgcagggttgtaacagctccagactgtgcatgcatgatttctttactttggagctgtgtgccccaggggatactcagtcaatatccacaagaaacacagtccagcaagggagaccttgggtgcccaggacatgacaacaccagggggtcctggggcacggtgctgccagatctggctgtagagtgagtttggttcagagtgtgtatgcctggtcagaaagaggagggactgggccaggccagcaggatggtggcagctgagggagcttcccagaggagtgggacttgaactaggtcataggaccctgctgtcatattccccgtgggggcttcagtctctagggatgaggtgctcagagcccatttgctctgctgcgtgtggggctctgtgaaaagaaagcctccatttgttttcattgcggattcctcagcccccctcgacagtgttcatagttttccattctccagtggacctccatggtgcccgacaggtctgtggggctgtctggtccaggcacagggaagtagcacctctagggagggggaggatgtggccatctcagctcatgtaggccatacttctgggagaaggtctgctctggttgagtccctggggtgcccagggtggccaaggtgccaggcagtatcccattcagtcctgcccttgactgggttgcagagggaggtggggctggaagggaggtggacgagtgatggcagctggggtccagaggtaggtcctggccattctccatttcactgtgctctggatgggagagcctaaaaaatattcagggaagctttttctttttccttccgtgcttccttgaaaaacaagtccagggagaaacccaaattccctgtgggggagggctgggcagaacaggagaaggggaagtgaccttataggggagagaggcccaaaaggtccttgtggcaaaggacctgaaactcggcctcccgccttcctctgagggctgggaggcagaggagcacggcccattttgtggctcaggaagctgagatgagataggagcaagagctttcccttgtctctttttcctattaccacagtaatatatgctccttataaaacattcaaataggacaaaaatagacaatgtaggaagtgctagttccctgcaatctcaccacagggccccggtcccctcaggtaattgcattaccgctgtggtgtgtgcagtgtgagtagctggggctgagggcccctgacctgtctgccccagcaaaggctggctgtgcttgctgatcctagttactcagggcttgggcggtttggggctggagtccatacccttctcttttgccctacctcccaggactttcctgtgctagatagggcctagcccagatttagggaaagtgactagggcttggcctctaaataggtaaagggtcaggcccacggtggtcactgggctgagaacgtagaggtgtgaggctgttgatgctgctggctggtctttctgtcaaacttcctctcctgccccacagacaccctcacatacatcctccagtctgtctgtctcaattagcctctcctcccctcacttctgcccgtgccttatgagagaggcacccgctcgggcattttctctgtccgccctgcctgtggcaccatctgttcctacccggccttctcaggggattgtctctcaggtttgggagggaaaaccaaagtctaggctcaggccgctcaggctgcggagtaggtctccacggaggggacgggccatagcccaccaggatttcgtcatgatgggctcttctatagggatgtagaagagtcagaggtgccccaggaagcctttttaaaaaaacttcaacattaaaaaataatcaaaatactaccaccactaccaccaagcttttgctgtgacttaattctggatctttggatgtatagggacttttcatacaaaggctccccacaccccactctgtgtccaccagaagctcagggagctggcattgttgggggcagagctcaggcgggaggtggatcctgcatcactgactgcggcttgggtagctctgtgtgcgtgtgtgtgtgtgtgtatgtgtgtgtgtgctgtgcagtcaccaagggactttgagccctttagtgaccagcctgaccactaccaccgggctttattccaccttcatgctcgattggctgggtctggaattccaggctagtggaaggcttttccctcagaaatgtgaagacattccttcatgtggtgcccagtgttgctaaggaagactccagtgctgttcgaatcctttcatgcctggtgttctaagcctcatagtcatatctgttggcatgtgtctgtcttagttcattgcgctgcatacttgtaggactgttctagcattcatgttcttcagttcagaaaaacattcttgtatgatttccttcatagtttcttcctttttgtgttccctgctctcttttttttagttaataaagtctatttttcagagcagttttaagtttacagaaaaacgagtgaaaagtatagagagttcccatctactccacccacgcccccaccgccatttcttctgttaacatcttgcattagtgtggcatgtttgttgtatttgagagccaatatcaacacgtcattgttaactagagtctatacattatgttagggttcacttgctgttttgtgcattctgtgggtgtataacaatgcatgtccaccattacggtagcatgcaggatagtttttctctcctgagaagtccctgtgctctgcctattcatcgctctgtcctctcttcaatcccccagcaaccactgatcttttcactgtctccatagttttgccttttgcagaatgtcaaatagttttgtcgtgcaagcatgaagccttttcagattgtcttctttcacttatgtatgtaagatccatccgtgtctgttcatggcttgatagcctatttatttttatcattaagtagtattccattgtctggatgtaccacagtttgcttatcttttcacctactggaggacaccttggcagcttccaagttttggcaatcatgaacagagctgctataaacatttgtgtgcagggtgtttctttggacataagtctttacctcagtaggcaaagtaccaagaagtgtgattgctccttgtgtgatcggagtttgcttagttctctaagaaactgccaacccctgcataagaacatctctccccagtagggcgggccccagccaccctgtgtggtggccatgtgtgttgggggctgtctctgtgtctctctgggcacagtgggtgtgcaccgggaagaacttaagctttggagggctggacacctggctctgagtctccacggatgggttcctttaccactgagcctcaccctcctgatctgtacaatggggtagtacctcttacctcatatgctttttgggaggtatgtgcgggagtgaggtaagaaccctcatgctggtcgtaatgcaccatagatgctcaacagatatgagcgctcttcgtctttcctgggtctctttctgccattcttgtctgttcctgcatcttgtagaggtattcctgacagggcttggggtgagtcagtgtgtgagtgaggtgtgtgtgtgtgtgtgtgtgtgtgtgtgtgtgtatacatacatgagtgtatgcactagcattcctgtgttcctggccctgggcctctgggtgagctgttctttcctgggctcacggtggctgggagcagagctttggctgggactggccagaggagatgatgtcaacagggagaaatgtgggtaggtctgtctgtgctggggcctggagatgggagggctctcccaggcccagcctcacccctctgggcctcagagtttcagatgtaggggagatggggcagaggagaggtctctgagcaccaggagaaggtcctggggtgggaggaggcatggtgtggtaaccgccgccctacctggtggcacccgaggagcttccccactcaggatgtggttttctccatcatggaaatgttttggatagtttctcagctgcatctgaagcctggaagcccaggccgatgggtcagagcaggagcctttggggagaggctatcagtggctctcagagcaaggaggggtctgggcagtgcctggtaccgggcgggagccaggctccctgggcccgtgactgagttctgcctgctcccctcttctcacaggtggtacaagctgcactccaagccaggcaagaaggagaaggaacgcggcgagattgaagtcaccatccagttcacgcgcaacaacctgagcgccagtatgtttgacctgtccatgaaggacaagccaaggtctcccttcagcaagatcagggacaagatgaagggcaagaagaagtatgatctggaatctgcctctgccatcctcccaagcagcgccatagaggatcctgacctgggcagcctgggcaagatgggcaaagccaaaggcttcttcctccgcaacaagctgcgcaagtcgtccctgacccagtccaacacctcgctgggctcggacagcaccctgtcctcagccagcgggagcttggcctaccagggacctggcgccgaactcctcacccgctcaccaagccgtagcagctggctgtccactgaagggggtgagcaagcacagggccgccgccctggggaggggggcactggctctccccttgggtggtgatgaaggcctggggccaggaaatggggcctctcttcctgcgagctaactctgtgtgtttcccctgcaggcagggactctgcacagtcccccaagctgttcacccataagaggacctacagcgatgaggccaaccagatgcgagtggctcctcctcgggccct

SEQ ID NO: 8629 - DNA, 6000 bp, Homo sapiens
tttatgatttttgtttgtttgtttttgagacggagtcttgctgtgtcgtccaggctggagtgcagtggcacaatcttggctcactgcaacctccaccacccgggttcaagcagttctccctcttcagcctcccgagtaggtgggattacaggcgcccaccaccacgcccagctaatttttagatttttagtagagatggggtttcacccttttggccaggctggtcttgaactgctgacctcaaatgatccacccacctcagcctcccagagtgctgggattacaggcgtgagccaccacacatggcttatgatttttaaaaaaatacacatgtggctgggcatagtggttcacgcctgtaatcccaacagtttgggaggcagatcacctgaggtcaggagttctagatcagtctggccaacatggtgaaataccatctctactaaaaatacaaaaattagctgggcatggtaatcccagctactactgaggaagccgaggtgggagaatcgcttgaacttcggaggcagaggttgcagtgagccaagatcatgccactgcactccagcctgggcaacagagcaagactccgtctcaaaaaagaagaaaaccaccaccaacaaaaaacacatgtaaataattcacaacagtacagaacagtatgaagcagaagccaggattcctctctctccatcaagtgtatatctttctagtgttaggtttcatttcaaactttaaaaatcattttgtgtgctattttaattaattgctgtttctgtggtggtgggtcagtatgtcttaattctgaatgttttccctgcacctcctaaaagatcttttttcccctaagtcctaacagaatggtatattcctctggaaaaagatgaacgtcaccaatggattgtgctgctctcgtttcagctttgatttttttgtccttgagaaccttgtcctccctgctgatttgtttctaaatcaaaagaaatgaagaaaaaagtactgtgacctgagagacaccctcctctagaatttagtggcgggtctgggctggcagaggtagggggctgctttgggctttgcacctgcactttggtgacattgttcttctgtgttccctttatttatgctggtggcttccatccgttcctcctctgagggtgagtggaggggtatatggaaacacggctatgaccaaagggagatcccagcctgggcaggctgcgctgctgaccaccctccctggggcccgggctctgtaggaaagttggtccttgactgtggcattgcactctgcactgtttctctctgcagacctaggggaaaactgcaggtggaagtgcttttctactaaggcctcttactttgggggggatgtgccctacagaagacatagaagatggggaaatgccaatgggcaaagagctactttgaatacataattctcttcaaagacttcagcagcaaaccaaaacagcaggttaaaaaaaaagatgcttttttgggtgcaagtctaacctgtctagcatgagatcttcttgattttctgattattttatgtagcttgagacaaagtgaatcaacttccacttagttgtaccgagcataaaacagaacttgggcttcctggcagtgaggccactgtcccatcacagatttttaaaataaatatgatttgaagtagtgtgatctttcacacaatcatactcagtaggaactttttgaaatagggcaagtttatgtttcatgcgagaaaacatgaaggagggttttggttttggtctgcagtttttccaaagggcttttatgagatacatttcccacaaagtccattttgcctttgttgcctaaaacagacaaaatagacttagatttattaatagaaactatactctctgccaattttacctcagtgtatttaatggtcctttaatctgatataagatgccaagggtatttgataaaaattcttcttccatgccatgtcaggagttaatacaaatgaagaaattccgtgggttcccctgggataagtgagggtagtgtcttggacaacactattgtttgaaggtttatcttttctaatcatgctctaccgcattgtagagagcctaaagagagttgtttctgagctgatctcagggaaatacaaataacttgggagatgagggaaataagatgaattctgtgctgtcaaggcagtaagtctgaagaaaggaccatgcttcttatattatcttccaccttgcttaaaacagcccatagctttgagttgacattttcattcttggcggatagcctactttatgaaggtaaggaatgaactcctacccttcttgggtcattctctgtactgatgcgttagtcttataatactttgcaccaacctgaggaatcttctaggcttctctagcatcccctaagactgtggctatttcacgtctctctccctgcctgccttccttttcccttcctttcccctcctcatgttttctggttgtgcccatctgtaccagctcctttccatccaccttcgtatgcacccagatttttctgttcccatctgtcctatttgttattcatcccgctgctcaacttctccagtatgttgcttcccttaagttgccattcattctcttcatgacttttactaactcacttcggtctctgtctgtcaactaaacttttctaaaggttaccagttatccaatcaccaaatccatggctttttctcaaagcttagtcttgtccttggcagaactggacactattgaccatccaaatggaaattcccctttcttggtgtctctgacaaatggtcctttgccttatcttgtgctggtggtgaagaggccctcaaagccaggcctctctattcctttgactgtctcctcagccattaacccattcttcatcctcggagtgagtgattcccaagtctttgtcttggcttaatccctaaagaacccagttctgctggtatcgaatagttcagcttggttgtcattgaaaggaatttctctcttctgtccatcagcctgtccctcccaactgtctaggacagtcttcggtcacctaaattcctaactgcagacttttgccctttttctctctcatcaccaaagtcccatccatttttttttaataaaagatcctcagctacagtctttccattttccttgcttctcttattgcacacccccagcccattttgcttctctcttggattttgttttttcagatccacatttattgggtttcctgtccagcttcttggaaaggagctcactcttggaaagactgatctttccaaaatattttccctggtctgaagctttggtgtgaacttctcaaggcttagagaatccagttacagaccttttggggttcaggatgctatagattgacaccctcctgcctgtttttctctgcatcccaacctggccaaggcccctcctgtggggtgcccatctgtgcctttattccggctgtgccctcgactttccagcttcccatgtttctttggttaggtttctctcccttccttctttctccttccccaatccgcctgtttcgtcagggcccagtttgtttcctcatacaccttcctcactaccccaccccacatggttgactctttccctcagctccaccagctcttcatcatgccactcatttcagaacttgagcaaaacagggcagtcaggatctgatgtctttctggtctccctaagaaaactaagctcttgagggacagcccttggcaatgctttcctatctgctgatcatggtgaccttccttaggacttccagagttcagttccttctggcagagaggttttctttctccatgccatatggatgtgactcaaatgaggggtcccacagcttttcctggctaccacttgctgtgaccttatacatgttggggtttgctcttaaagaggagagcaggaagaaaggttggtttcagaaaccaagagggtcggcagtggacgcgtacattttgtcacggagtccacagagctgagcttttgagcagactctgagaagtatcattgcttgtgttgaaagaatacaacaggatttaagtttctctttagaaattgcactgaagaaaggccgggcgcggtggctccccctgtaatcccagcgctttgggaggccgaggcggggggatcacgaggtcaagagatcgagaccatcctggccaacatggtgaaaccccgtctctaataaaaatacaaaaattagccgggcatggtgacgtgcacctgtagtcccagctactagataggctgaggcaggagaattgcttgaatccgggaggcggaggttgcagtgagccgagatcgtgccactgaactccaacctgccaatagagcgagactccgtctcaaaaaaaaaaaaaaaaaagaaagaaatagcattgaagaaaataccgcacatcagaggaaagcttattttctgcatggtgtcttttcaaagatagaatatttgaagcatgttttctagcgattgtgtggatgagggtgagctggctgaggcatcgctcaagctggggggtggtgtgtaagaagcacgtggagccacaagaggcacctcctatagtcagctaagggcttccctttctgcgcccagcttttgggtgaagggtgatttctattagacacatctgtgcttcagtcatagatgttaatagaggaagcagttttcctgctgcagattcctgaatagagttgctgaaagagtctacttctggactcaggggaagttgaaggccagtctgtgtagaaaggctgaggcaacggggaaagacctgacagctagttacatacgctctgacatagtactcccatgatggcttccagtgacacatgtgctgatagaattctaaacctctggaatttccctgctggcgacttctatggccgttgactgtacagggtaacctgatgccagatgctatgggcgtgatgagaactagagcattgcagcatggaggaaactgtgaggcaccagatcctgtgcttctgcaggccattttctgaaaacccctgttaggaaggttggatttggcgtgacttgcttgagcaagagtcctggggagagattttgaggtttaatttaacggtatatccagagctaacagtgactcaactcgtctagttctgcaagtcagatgtacacttagagtctctctgtgaagggtttgggtctgagctgtatagtatgtcaaactgccagtaagccagcccctcaccctctgatagatattcctttaatgcaccagacttcatgtttgataaatgattaatggttgaaattgtttctcttcttttgtgttttcccagttaatagatggtcactgtttccacaatgttttatactttcagctttttgtaacttaactataattacttaattttatttttttaaagcttgttgtggtctaatgagaagtatttttcagtgcataatgtttttctgagcttctgtaaatgccatcccaatgtggtttggttttgttgaacagaaaccaaaataaatttcaaaatgttaaagcaatggatttaatacatttatttatttatttattttattttatttttgagacagagtcttgctctgtcaccaggctggagtgcagtggtatgatcttggctcactgcaacctccgcctcccaggttcaagcgattctcctgcctcagcctcccgagtagctgggactacaggtgcgtgccaccacgcccagctaatttttgcatttttagtggagacggggtttcaccatgttggccaggatggtctcaatctcttcttcgtgatccgcccactttggcctcccaaagtgctgggattacaggtgtaagccaccacgctcggccaataaatttattaatattatattaagatgaactccaataagacctttggcatgtcagtttaacataagtgaaaggtcctttttatgccttttgagccttccttcaccttccatc

SEQ ID NO: 8630 - DNA, 6000 bp, Homo sapiens
aacagtgttaggctgggggtgggaggcgggagtccttcttgctttgcctgtgcaatgaaatgaataccctgctgtgtttatctccttgtcatgtgattctcccaggttgtttcttcaagtttctgagccaaacttaactctaaaaagcaaatattctgtgttaaaagacagtaatcaacacgggagctacatcagacatcataggacaaattgtcatctagaagagtatatttttaatgcaggagagtttttaaaacccagattggtgtgatttcattccagagagctcagaaatatgctcagcaagtcttgcagaaggaatgtcgtcccaagtttgccaagacatcaatggcgctgttatttgagcacaggtatagcgtggacttactcccttttgtgcagaaggcccccaaagacagtgaagctgagtccaagtacgatcctccttttgggttccggaagttctccagtaaagtccagaccctcttggaactcttgccagagcacgacctccctgaacacttgaaagccaagacctgtcggcgctgtgtggttattggaagcggaggaatactgcacggattagaactgggccacaccctgaaccagttcgatgttgtgataaggtacattggttttttttgtttgtttgtttacttatttttattgtttttattttattttattttttgaggcagggtctcactcctgttgtccaggctggagtgcagtggtgtgatctcagctcactgcagcctcaacttcccaggctcaggagatcctcccaccacagcctccccagtagctgggaccccaggcacacaccacgcgtggctaattttttatatttttagtagagatggggtttctccgaattgcccagactggggtacatcgcttttaaaaccaacctttctcctctagaactcagtgcactgctcttggtcagtgtggctccaggaacagtgagggacacaggaagctcttcacagtccctgcccacaagggacttaacgtttgagaagttgaaacaaaaacacaaaatggttggatgctccaaactgtcatactgaccctaagttggaggagcatgctgctggctacagtaagtggcagaaccttgtcagaggaagtgagatttggaaggtgggtagattcaagtaaaacagcaaaggaccacaactcccagacaggggcaagaagaggacacagcaagagacttgagtcaatgaggggcctggcttctggagaaggggcttggggccagtgagtcctggaaggcagtgctggctgggacatggaaggcacacagagaagttcagactcaccatgatagccaataggcagtcatcctagattcttttttggtttcactgtttaaaaattgttttctggccaggcgcagtggctcatgcctataatcccagcactttgggaggccaaggcaggaggatcgcttgagctcaggagttcaagaccagcctgggcaacatagagacagcttgtctctacagaaaatcaaaaagtcagccaggcatggtggactagattttcccttctgattccttttttgaaattctggcaagaactaacatctgagcacaatggaaaatttctgaggatattttactggcacccagagaaagtcccaaatgtaatatgcttagattgagtaaaaatattagggctagatgaaattgcttgacattcagggattagatacaagtgttcgctcaagtactaaaggctgcattcctcgaaatcctagaaagacagagctgggaggggagatgaggctgcaaaccatgcactcattcttagtcataagaagacgtggaggacatgacatggatactgcctggtgtacagagatggttgatggcctgctttgtcagtgtgtctttgtcctttttatttaaataggttaaacagtgcaccagttgagggatattcagaacatgttggaaataaaactactataaggatgacttatccagagggcgcaccactgtctgaccttgaatattattccaatgacttatttgttgctgttttatttaagagtgttgatttcaactggcttcaagcaatggtaaaaaaggaaaccctggtaagcactaatacttctattaaatctgccttagtaaaaagtgaaggagtcttacttagttgtaattatagccttttatttttaaacacgcagagcggaatgcatacttatgtgttgtctttcaaatgatgatcactctctttgtagaaacccctcagcaattcttttttttggggatggagtctcattctgttgtccaggctagagggctggagtgcagtggtgcagtcttggctctctgcagcctccgcatcccaggttcaagcaattctcctgcctcagcctcccgagtagctaggattacaggcgcctgccaccacgcccagttaatttttgtatttttaatagagatggggtttcaccatgttggccaggctggtctcaaactcctgacctcaggagatccacccgcctcagcctccaaaagtgctgggattacaaacatgagccactgcacctggccctcttccagtggttcttgcacatgggcaggttggagaattcctggtagagacagtggtgagggtgtttataatttaaactgaacaaatactaggagctagtgggagatttgttgggtgcggtctcagcaccggcacttcctcagtgcttttgatttcatgggtgaaatttcacactcctgagagacaaatgagaccctgccccccagttgaaatcggaaagtaccatacagtgggagtatttttccttttggtggcgggaatggagtgagatggttataaagaggccctgctgcagttgtgtcaatccaggagtgggtgctttcctcctatgtctgtgtacagctgtacactctgcatggatgggccagacctaattaagagtcgcatgaaaatggtgatcattgcttaatgggaatatccagattgtgaccaaaattgctgttactgaggttgttcacccaccttgttctccagacatgaacttgcatagcttttggctagttccagaaattagacttacttagatggatataagcctttttgagggtattcaaaagcatataaaaatcaaggaatactctaaagagctccaaaaatgctttggtcagtggttcccttgttggaataaattcatggcattccagaagggcagctatggaggagatggccctcacttggtcatattccttttgtctttattggtcacattactttatagtctcacccattatattcaaatacatttcagaggtcagctgtcgaggagtgtatgcacatgtatagacatatgcacaaactagctgtctgtgaaactaatgggacgtattcaacttttcacgtaaactccatgtgatgacaaatttgtatttccaaagctgattctatatcagtcatcatggtcttctggattttctattgggcagaagttctagttggaagatgaagcatatatgaaacgacttcatgggactaggaaatagagtaagtgagagaggatgcgaggtgagggcagtttcagcacttaatagccttaaattggacctattcacttgggcttccctagacaaaatgatggtgttagcaccattgaggaatgtctacctcaaacaaatacaagctggttctgcaattcatctctttgtccagtgccgcctgtgtgaagtggctatttcagagttacttttttgagttggagtgccggatttgcgtagcttttgcaatctataggagtagattgcttcagaaggcagtgcacagggccacatggggtcacacccacagccttggtctgatgagtgggaatgctttctcccctcccctagaaggatgactaacaactgcttgcttgctttccttagccattctgggtacgactcttcttttggaagcaggtggcagaaaaaatcccactgcagccaaaacatttcaggattttgaatccagttatcatcaaagagactgcctttgacatccttcagtactcagagcctcagtcaaggttctggggccgagataaggtatttttgttgctactcaaagttaatcattccctgtttgaggggcgatgtgtacaaatttcactttggctcaactgtatacccagaagcatctccagtggagaaacccagcctgtgattagatgctccatgtgtgtttaccactctgcacttggctgcagggctcctcattgtttaattggccttctctccagtgactcttctctttagtgtaggcagcacattaacacttgaatcactgagatactattttaaggtattcttactccaggactccatataactgcaggacactgaaaggcactttcatgatctgaaaagttatttacattttattttttaattttttaaaaatttaaaaaattttgtaccccagagaaaagtcatatttacattttcactctgtgggccattcaggtgagtattgatttttatcatcactttgtaggtgatagttataaaagttaatcctcaagaacagtgtttttcagttaatgcctgggtctcatctcagacattctaattgttttgtgttttaagattttctaaattccgtggacgatttttattttgcagcctaatttgggaactttgtgctctaggctgtttattgcagtagagattctttacctgcaattagcaagtgctgccaccaggggcgtgggggtgtgcatgcctttattacttgcggcttcttgatctgaataacttgactggtgtctttaaaacttaagacctgtgtggaaattatcacatgtacaatgagaataaacactctcagaatacaaagagctcttactaaatcaaagagaaaaagatgaaccaatagaaaatgggcaaaaaataggaatagacatttcacaaaagaagaattaaaatagccaaagaatacatgtaaaaatgttcaactttaccaataatcaaataaaagcaaattagagccacaatagtatttttgcccattttcttagcaaagacttaaaagtttgataatgtccttgtttggcaggaatgtaggtagaatgatcagctggcactttttctggaggatattttggcaatattaaaccattttaaatacgaatcatctctgacccaccaattttacactaaaaacattattacaaggaaattagagaaatttataaagatggatattctaggatgtacactatagcattaacagcagaggactaaaaacagcctaaatgttcattattatgggattgtttaaacaaattatgataaagtcaatgcagtattgtctgttaaggatgaagaatataggaaaacacctccatagtatattaagtgagaaaataaacatacaaaacactaggctgggcgcggttgcagacgcctgtaatcccagcactttgggaggctgaggcgggcagatcacctgaggtcaggagttcgagaccagcctgaccaacatggagaaaccctgtctctactaaaaataaaattagccaggcgtggtggcgcgtgcctgtaatttcagctacttgggaggctgaggcaggagaatcgcttgacctgggaggcggaggttgcaatgagccgagatcgccccattgcactccagcctgggcaacaagagtgaaactccatcttaaaaaaaaaaaaaaaagatacagaacactttaacaataaaagtatgtgtttagtataaaagcttggaaatagacaccagcctgtgaagaatgcccttcttcagaggggaagtctatagaagacttctactttctgctttataatctgtctgttagttgaactgaatattttcctatttttataattgataaaatggcatttttcttttggataaaaacagtaacttaaaagaggacttctgatctaaagttgcagtatcagaaacttcctcatgtatatgtccttccagcag

SEQ ID NO: 8631 - DNA, 6000 bp, Homo sapiens
tggataccttccatagatatgctaggccctagggagactagtcaggtacgtgcacctccccccacccccggtacctgtattagtaatttttttattaattgaagacccagaaatcttttttttatatcagttgtactttcatttagaagtatgaatcatgagcaagtagtcatgcaggaaattgtatcctctgcccacccacccacagaaagggccagtgctggaatggacagaatacagcaggaagtgcatgaaggtggaaaaggggagggagctgggagcttatctccgagagcgtttgggaggataggcgcgtggagtctgttagctggaggcttctacattcctgggcctccagaacccaaacgcctgccgctgccctgccagtgaaaccaaaccggttgccttttgaaactttccactgaggccaccttggagtcagagccagcgagctcaggtctctcctggtaaccttcacacctagaggtggggggatgggggagcagtattgaaggtgaggaaaaacagcatgaaatggagcattgtcaggatagatggtgactctgtggaaaaacagaatcgggagtcccaagacctgatttaaaaatctgaactttccagtctgagcaatatagcgagaccctgtcccgtgtatgatggtgtgcacctgtagtcttgggaggctcacgtgggaggaccgcttgagcccaggagtctgaggttacattgagccatgactgtgccattgcactccagactgggcaacagagtaagaccccgtttctaaaaaagaaattctgacctttttatctccatgacttggggctagttgtttaatcttttttaattatctccatgacttggggctagttgtttaatcttttttaattatctccatgacttggggctagttgtttaatctttttgactcatctccaaaaggggagcaacaatacttatttttttaattttgtcgaggcagggtctcgctctacaggctggagtgcaatggcacaatcacagctcactgcagcctcaacctcctgggctcaagcgaccctcccactccagcctcctgagtagctgggacttacagatgcatgccaccacgcccccgctagtttggtttgtttgtttgtttgtttgtttgtttttgagacagagtctccttctgttgcccaggcttgagtgcagtggagtgatcttggctcactacaagctctgcctcctgggttcacgccattctcctgtctcagcctcccgagtagctgggactacaggcgcccgccaccacgcctggctaatttttctgtatttttagtaaagacagggtttcaccatgttagccaggatgatctggatctcctgatctcgtgatccgcctgcctcagcctcccaaagtgctgggattacaggcgtgagccacccctccccgccacgccccgctagtttttttttttttttaatttggggctgggcgtagtggctaatcccagcactttgggaggcctaagcaggtggaccacctgaggtcaggagttcgagcccagcctgaccaaaacggcgaagtcccatctctactaaaaatacaaaaattagctgggcatggtggcgcatgcctggtcaacatggtgaaaccccgtctctactaaaaatacaaaaattagccaggtctggtggcaggcacctgtaattccagctacttgggaggctgaagcaggagaatcacttgaacccaggaggtggaggttgcagtgagccgagatcgcgctattgcactcccgcctgggtgacagagtgagactctgtctcaaaaaaaaaataataataataatttcttttgtagagacagggtctcagtatgttgccctggctggtcttgaactcctggggtcaagtgatcctcccatctcagcctcccaaattacttactttttaaagggtggtcataagggtgaagtaagaaaatgtacatcaagacaagctgcaaaaatctaaagcacagaacacaagtgagggcacttgcatctcagtttaccctccgcttgaatagatacggggaataaactaaacacgagggtgacacaccttctcccaccttgtcagctgaagcaggaggccttccctgcccaccccatggtcattatctccagcatctccaaggccacagctttttttctttttcctagtggaaaagagctgggaaacgtggctttggccagcaagggagaaggggccattatgtgtaccagcaaagacccgattgttactgaaaccaaactgggctgcttttctcaattatctccaccacttttctggtctccacttttcagatgccaagttttaacccagaacaaaagctgctgtcggactgatttataatccagatctgctgacgcagcctgaagtgttcctcccctccaggactgcaccctggcttaaagttacctccaaacctcaggacgtcaagccccttcacctctgccttttgcccctagccaggaggtagcatctgtctccaggtgcccgtggggtgtcctccatgaggaccacctcttctaaccacctgcccagctcagaggaccagctggcaggaaagacgctgcaccgcccatgaggccagagctacaagttgcttctaggagtggctgtgggcggaggctggtggttctgaaggtggcggtggttctgcagcgtggctccccacagcccctttcatctgaacagtagggctcatgccacttgttaatcagccttccagtggcacgaggagtcattttctggggataggcgctttgcccaaagcgtgagaagcaggagcaggccctttctgttgattgaagggtcttcctggctggtgaagccctttccagacttgagggcagggaccagtggtcctcggggcctagaaagaggcagaattgggggccaaacggcagacccctctggtccgccccaaaagacgcctcggttcccccagcgtgcctcccctggatactcgcctcgacgtggctcgcccgcggtcgttcctgcaactgcacggtcgggagtccctctccccagcccagcccgcccggagtcttcgggggacacttcagaaagatcgggtgagtgtgattcccccgtggccatacccggagtccctcccccgccccacctccctccaggcgctgtggcgcagcccgcgactccgagccccggggctgctggacacccggaggggttgaggtccgggcacccagagaggcggaggtccgagcccccgggcggagagcgggcgggtccacaggtcgctgcgggtcgcagccccctcctgagcgagccttcgcggcccgcccccggcctccgctcgacccccccagcctgacgtcaaggggaagggggcggagagccgcggccgcgctggagaaagagccggcgcccgccgtggtggcgcggggagcccgagcctaggggcgcggagccgggcggggacggaggggcggtggcagagaggccgcggagggctggcgggcgagcgcgggcaggcggcgacgcgggggcaggggtggacggcggtcagagccgaacgcgagggcggcgcccggggactggagctgcgcgcaataggtgagcgaggccgggcttgcgtgaggctggagccgcggggccccggagccgccgctttgtccctttgcttgggcaggggctgccggacgcgggagggacaggggctggggcgcggggagccgcggcggcggagacggctgtacgcggggatccttcctgcgacccccgcggctgcttcgcagggtctcgggagtggggcgcacagcacctgcagccccgcagccccggggccggaggggcgcgccagcgagggttcctcgcgcggtccggtccgcggccgggatcctcgccaggctcctggactgccctcggcgctcccacccccgatggaaagtttggggcgggcttggagggaggccgatgttgtgggatcggatttccctgccgcggccccccgcccgcccgcccattccgctggggaggcgggttgtcccggaaagccaggcccccgggccgagccgggccgcgccgtccccggctggagcgctcgccctgcagggagggccgcggtccacggctggccgctcggggtgggcgagggtgtggggtgccccgcctggatcccgcacccctccccccaacccctcctcccggctgcccgtttcctcgccctggggggagctgcgggtgggagcaccgctgccgggcggatcctcggagcacgccacggggtgcggcccgatcctcgggtaaggagccgagatgaggccgcgggcgttttggggggctggtctggggcgcagcccccgctctcccgcgccggggctctgggccgacagggggcgtccgcaggccgggctcgccacgctccccgcgccgccgctttgtttgcgttcaaatccctggagctgggggaggggagaacccggggggacccgggacggggtcttggcggggaccctttgtttgggggtgagcaggtccccagcttctgcgtctccgcccctggcacgggaaggctggagcaggggaagccaatcccgctggcccgcccaggccagggtccctggggcgcagtccccgagttgggaaggttcgtcagagtcgcgggagcgcagcgggtgccggccgtgcgcggcgcgttgccagcggcccgggaggaaccccctcgcgtccccgcccctacctccccccgtcgcctgcgcgcgccgccggagtccccgactcgacccgagctcggtccccccaccgcccctccgccagagggctggtgtttcggaggaggcagtgcgaggaacaggatgaggccctggtcatttccacgcccatcccacccacttcctgcctccctcttgggcaacaaaggggcctcgggaagctgggccccttcgctcccggcccttctcacactcctgccctgctgatgtggaacggggtttggggttctgcagggctattgtctgcgctggggaaggggacaggccgggaccgggacctccgctcgcagccggccgcaccaggtttcccctttggggctttcccgaccgcctaccccaccgcatgccctcgtcgccctaaggagtcttcctcccagaattaggtgttggcagggtccggagccccagtggctgcaaggcctgctgcctgaggttctttcaagaaactcaaacctcttaggcctgagtgtgtatgttgggcgggggtcccctttttatttctcaaatgatttcctgttgcgcagaggtagtggtgggtctggaggccagggagggcttcccggagcctgtttagccttcagccaactcaactcctccccgcttcccagggagacctgtggtcttttaggcagaggccaagtgtggggacttaggtccacctccaaagagaaggggaaggagggcaccggggctcctggaaggcctgatgaggagtcctgtggcctctcctgctgcgggcccctctggtttgctttctctggctgtgatttctgaccatgtcttttccctcagcaggacagctggcctgaagctcagagccggggcgtgcgccatggccccacactgggctgtctggctgctggcagcaaggctgtggggcctgggcattggggctgaggtgtggtggaaccttgtgccgcgtaagacagtgtcttctgggggtgagtgcctggaggggtgaggaggaagtcagggacaggctgctgaggagttgcccccatagtgtgctggctttattctcacgtgtgtggcacagctttctaagaaactcgagttggaagaacgggcagtgtgggttgggacctgggattagcctcctctgggggagctctgtccaactccccaccccagactgcctgcccaggtgtgggagggggagagccttctgcctcgccctctccacgcctcgcttcttgaattgtcactggcgctgggagcctaaagagaaactgga

SEQ ID NO: 8632 - DNA, 6000 bp, Homo sapiens
ctcctcttgtactagggactatttccttgaggcccagttgggcctcaggtgggacctcagagggagtgctgctgagcaccttttgtcaccgtacctgaaggcagcatagcttacccggtgaccgtggtgcctgcagatgaaccttgtgtcggtgctggctgggtggggagctgcccctggcgagtcacgcagggaaatgcacccacagtcgtaactctccttccagtgcacttatgaatgagtcaacggtgggaaatacccagcagactgcaggttattttgggagccttttggacttcccaggctgcagccctttgggattaagtgatattcaagctgctgaatgtctccaccacaagtcccttgtttggttgagcaggtacctggcgtggttcttcacatcctgaccctggcagcctagttaacccatcccggtcggggggcttacccagcatgtattgccctggattgtgttcctccagggcttggggtcagcatgtttcggtggaatggaaagctgccactgtgctcttccatggctcctctctgagagacggtgtgtgagtggacaccgctgctctgatgagtgagcctgggctttagatcagactgaagactggcctcggctggcttgttgaaggccactgccgctctggacaaaggtgggctttctgtgaatgtggctggaatgcactagcagactggtgagcccaccatcacagtggccctgactgagtgtggtgggaaggtgcaaaacaagcagcagaggtgcatctgtgcgctcagctttgagagcagagccccggatgcagacagaggcaatgggcaggacagcagcacagccccaaacccacctgtggaggagcctgtgacgcgggagttgcctaaatccgatactcactacagtgaggttggagaatggcctggtgccagcctgagagccacagtttgaaaaaagaaaaaaaaatctacaggtagttctgaaattatgaacacaatagggcaggaaaaagaattctgaacttggagtcaagataaatttcactctgctgaatgcaggtcactccagcgctttgaccttccattacctcatctccaaaataaggttgtaaaaaacaaaaagagttacacctacggcactggtgtagaggggagtttccaggctgagggagctggcagtgggtggacctcctgtcctaccaactcaggcccactgcttcctaccttcctcacatgtatcagaagtatcagccaggccagagaatcaggttcaggcagaactgtcaaggaattcccctctgcttccaagaggcccatgcccatccttcctcaatgttcctttactgagatttgttgcagctgtagtttctgtgttgacaggaatccccattcctcagtatccccagccttttctcagtgtaaggccttccccccaagaacagaacctacatagatagaactgatacacctgtggaattggcatataaatgtttattaagaaaacagagatagcctttgaacctgctttttaaataaataaataaggctttcagggggtttgatgcatgtgctttttttttttttttttgagacggagtttcactcttgttgcccaggctggagtgcaatggcacgatctcggctcactgcaacctccgcctcccaggttcaagcaattctcctgcctcagcctccctagtagctgggattacaggcgcccaccaccacacccagctaattttgtaattttagcagagacagggtttctccatgttggtcaggctggtgtcgaactcccgacctccggtgatctgcccatctcggcctcccaaggtgctgggattacaggcttgagccaccgcgccaggccatgcgtgtgcttttcttctccacctgatccttccccttttccttctcagagctggagcggggagctctgggaaagccaggctgagtgtctggtgctgagggggctggtgctgttcacagagctgctggcaggggctcttttttgctgtcaggcgggaagagaccccagggttgttataatcaagcttgttcccaaaggcagtcccttcttcccagctgcctgctttccaccacagggaggtacacaagcaaacaaaacccccgagggcactcttgttcctgtgatgccgcgcttaggagatctccccaagcacctctgttgccgtctccgcctcagtgagtggcgtgatccgtggcgctccgcaggtcattcagcagatgctcatcccatgctggtatcgcacctcacatcgtgctgggctccagcagggcaaagggggttcggacaccagtccttctggggagttcacagttgggggcagttggcaaagggctttccctgggcaatgagccagagaagcttctccaggaggtggcatcagagcttgtccctaaaggatgagtagcactctgccaggtggaaagtagacaagacggtctcagctggcagagcaaagaacacaagccaagctatggaagtgtggagcaaatgtgcagtggaaacaaaggggaatgtgaccctcctcctgccacctccgcatcactttcagagtctcctgcatgcctctccaccttggccttatattagaatctcctggggagctagctgtaacaataccaggagatgccggcctcatcccaaacagtctgtgaaccagcctgggcggcatccccagctctgctgttgggcagtcagtgtgaggaaccccagttaaatgcatgtattaatgtttgtgtgtagatctgtcacctagctggactctgaggtcacagccccccagagcctcacatgatgcctgacacatcgtaagactccagcagaagcgaattccttcaggcactgtcttttgagggaaaactttacacagctataccaggtgcacactttaggtattgctgccaccatctcactgtcaaggcatggtctcgaagtagagtgcgggatgtggtgctagatgctttgagtcagcatcactgccccctgggatcagtttcaaggtcggactgtgtcccctggagtttcaaggacacctacgcaggacgggtgtggttttatcaggaggcctaactgttggtttccttccaggtatacggatccgggtctcagacaagggcgttccagtacgtcaggtaagactgtcctgccctgccccagccttagcagtgctttggagcaggggtcatgccaacttgacagacagttcagtgtcttgtatatgttaaccatttccacaacgctaacactatatattgattaaaaatttttaattttatgatgggaaaacttgctgttctctgtttaaaagttaaaatttgcattcatctccatgactatcgtgactcatgtgctaatcttttactgccacctagcggtgtgtgggtgaagttgcccagctctgagggtgacttgggtgatttcagcgcaggtggagttaagagatggccttttgcatccagcagacctgtgaatgccagaatctgacccattgcaaacatggctcgcggggtggaggagatagtccttgtggagggcacaaggtagatagtgttcttatgttgaatttcacgctgaaactaaatgcagataaaaatatattttttgaatagattcacgtggtgatttttattgctttcttggcagcccttataaacccactgttctgttgttccattccgttggtgattaattttagaaggcagtgtggattctcagagtagttaggatagaagcagttgtgtatgccaaagtgcatccaccagtatgtggctattgtaaattctgtgaaagtttctggtatcctgaattgttgtaaaacccagttctatattttgaacccacatattttcactcttcattgcaaataccccagtatgcctgtcaatcaggaagtgttattcctgctgtcttagggccatcccaggggcactagggtgagatggtggctgttgtgcaggtcggggcagcccccaagtcccacctcagccaaagcaaccacataaaattgtacctacccaggacccttaggtaggggtcctgggtaggagtcccgtggagaaatggaactggtagtaaaataaaattttaaaaagaaatcaaaataaccactgtagatttttgctgaaagtatttgtgaatttccatttactccaaaagaaagctgtgagtaaacatttacacagccagtagttttttcctccccacccattaatatcttgcctcaaggggcaaaagcccagaagtgtactataaccaactttgtggcccaaataggcatgcatattctaaaaagcgatttaacagggaaatggcagctgcccccgctttgggactgtgttcatttcaaagcacttaacgtaggcactatgtccctggaggaaactatcatggcacacttctgtatggggaccaaattgtgggcctcccttggattgagtaccgtctttccatagtgacgcgttcttatcccatcctcctccactcacccagctgtgcccttttctgagggagtcttgctgtcctcggttatgtgtgcctgcctcgggctgcctcaccagtggcgcccaggcttctccagcccccacaccacatggaatatcaatgagatgttgtgcggtaaaaggaaaccagtcaggacccattcttctttctgctctcattatctcaagggcattgtgtgcaaaattcatttaaaatagcctcagagacttttctttttgctaggactaaaatattttgagcattcagtgatgcctgtgctatgtgctgtcccagctcaggacaaaatgcaccctggcccgctctgatggcctggtcactgtcctgtgcctgctttgatggtcgtggctcatgctcctagctgccatcacatgcatcgtcctctcccacaccacttgactacttgaaaagagggcatgagcagtttccctagacacatggttgttaacccttttagaaaacccatttcataacacttcagtagtatttatttactccccactctggtgatcctctctggtttcacattagcagagtctgagatgatgaggcttcagggactttgccatacttgggcaagggtttcctgacttaaactttttagttattgaggactcagatgagttcattaactgaccaaagttttgatgtttttcacaagcaattttttaggaactgagcgtcttttagtaatgcacgatgtctgggtccatatagttactgtactaaattaaccattccccaaacccatgattgcctcgaaacaacagtgcagggagtctgaggtctaggtggccatccgcatcggcattttggcatgactctgtttaatattctcatggccggttttgtcctcatttacataacaaaggcatgctatattttttaaaagtcactttgtcaaaatgacacttgtaaagagcttcaggttaaagaatgtgatctatgcaattttgaccttaaaagttgccagtttgtcatgtaaaaggcccatggctctcccgtctgccccactgaggatgactgcctgagagtcacccttcttccaactcagataaaccccaccccccagtttcaatattaaatcatattgtggatgcaatggaatggcagcttttaatgtctttttataaacctgcacagatgtatgtcatgagtgcactattgtaatgtagcaatactgccatagtgatgaagtgactttttgctagtttctataaaggagaaatcatccaaggttagcagggatttgcatttgtgcttgatccttgagaatagaacattttaagcatgttcatatgaaatacgcatttgtcgtaaaggaaaacgcagaaatatctgatttacgaaataccccaataggttttttcaattgaaagcaaaacctatctgcggttttcttttggaagtttatcctgacccagagtgacctgctcctcactggtaacgatggaggaggagaaggagaagggtca

SEQ ID NO: 8633 - DNA, 6000 bp, Homo sapiens
gccaagggcaggtcaccctgcctggatcagctgtcacatctgcagaaaggggcaggaacacccacatttggctgctggcctcacaggcagcttctagagtctggctggccctttgtctataccacaggccgtgtctaggggacagaacaaggggacccagggcatggcaatgttctgagcagagaaggtgcacagggagccgtggggacagcgtaagccattgggccttagggcaggggcctcggtcagctcctaaggctcccccaggtgcagtgtccgttgcgccattttattacaagacgcagagccgctgggccagcactgctaatatctttgaacacacccgcctccctggtgtggttccccagcagctgtccctgcagcgggaggccttggtccagaagggttatgtgggacatgggcgcaggaaggacaggtgaggctgacaggcttggtcattccagggaccatgagggctttcgctggctcaggtgcccctttcccctgccgttgcccctgttggtgcctgctagacctcctgtgcacagaaggccttggcagaggagagagccaggcctggggcagtaaaggagaaagcttcccctccagtcctctgagggccccggacttagatggctttcaaatgagtgtctgtcttcagcagctcaccctcccagctttttcagaaaccaaagagtaaattgctcacggcttctctaagtggctcacacacaaaaaacccgagtcatttcaatggctggacccagaaaatcgagccctcttctctcctccctgtctctggcccccaactctgcctcagttgccctggggtctcactgtcccctcaagacactgcccctgcaggcgcaggcagagaggcctttgttcccctcagctgtgtcccctcagctgtgtagagaggatgctgccgtcggacacgtggtaactgagcctgctgccacccccacccgtgatggtcagtaggtcgcgtgccatctggggctactagagccggcccactgtgcatactacatgtgcctgctgggtgctctgggctcttctcgcactcctgcactggcaaccgcttatctttttgagctgggtcttaaaggtggagaggtctgaccaaggggcggtcactcacactggcattccagtgaagggcatggcccatgcagagaccaggggtgatatacccgtgtcctcctacctgcagaccgtgacggtgctggggaggggagggggcaccaggccacatcgggagggcagcaggtagacgctccagcccctccacggcagaggccctgagctttgcaggggtgaggaggctgtcattcagaaacgtcgctgccagggagaagggacttagagaagggagccttgtggctgtggcccatggctgccctcaccaccaggctcctgccttcaggtggccaggggccatctgaacgcccaggggacctgggtatggggttggtgtagaccatgtcttggcccttcccaaggtgccggcttcacctccatccctctgtgctctggtgctgacctggcatttgcagttatgtgccctagtggcagccgctcgagcttggctgccaagacccacggtgtggtcagaccactgtgtgcggctgaggaatgagttcctcccaggaggggaaagccctcgggtcaatcggggccctcgtgcccacccgtcactgcaggccaggatcgtggcaggtggcaaccccagctttgagtgctgcgtcttctggggctgcagccgcccactgtgagcaggagggtgagggcaggtagagtctgtcctgccatgaagctggaggctttgacagcaggggcggacagaactgagcagaaacacttcacagcctggccacgagctccccgctttgtgctccctccctcgcatttccccgtgttctgcacccccagagctgaggagccagggcccttgtccaggaacaggctggatcgaggcctggtgcctgcatgcattcccaggtgggagccaggcaggtgacccggaccctccaccagcccagaagcagcccttccaccgaggggcctcacaccacttctgcctgctccctcagtcattaggcccagcgctggctaggtggctccagacatgaccagcaggctctaaggctcatcagcgtcttctggagcctgcacgatacacacacaggcacaggctacaccatgggagaccccatctgcagggtgccaagcccttgcatgcttgggcctctgacgggatctgtccccgctgctaaccaggcacagggcagcttgctctgcaggtcttccagtcagctagcacagaccctggccagtgtcatgactctgtggccctgggcaagtcacacaccctctctgggccatgggcagaggagctcatgatggaggcatgccttgggcttcaggggatggtccctgaatgggtgtggggctggggctgaaggacccgcctgtgggctggggcgctgaaaatgggagaggaactgagccatttgtgtttcccagatggggcctgctgcactgtgcacagcgtgtccttgccctcagagtcacccttggggccagagtccttgtggctgtaactcacagggtcattggctggggctaggagggcaagcttctctgttggtggacacatcacactgtggttttttgtgttcagaagaaacctgccacactggcctgtctccatccatttggtcacggccccacaggagtggggagcggaggtccatgcggccctatgcctcccctggacacagggtcagctaggaaggatatggatagcctcttctgagcagtcagggcctcgtgagcctgaggcaggagacagaagcctgccccggccgcctcgggcccttactccctggcccttggtcattattgtttctaaaacgtttgtctcacctgctacctgaagaaggtcccgccctctggcccttgaggccccgagtgcccaggagctgctgccatcagcatggatgggtggtaccaggcaggctgtgggtgcagggtgcttggggagggccaggtgtgccttgggacgtgtgaagtgggagcctggagcagggaaactgaggcctgctctcgcccctgctgcccacagcttatctgccccctggagaccagccgtgcctgaccctggggtcgtcagctcagtcctgctgggtccttcctccaccccatctgctgagagctcctccagggcagggtctgagcctgccaggccacagaaaacactgggcggatgacagctgcctgtcccttcctcggcagtctgcatgcagtagtgctggccttgctgcctgcccctggagccatcactggctaccccgcctgcttcagagctgccacccctggggctttctgacatgtcctcataggcgggggtggcctgcagtggcaccgcaccacttgccaggcactgtgcctccctccctgcagggaggtgtgcggtcagatcaggcagttgccagcggacaccaagaagcgctttgtgctccccggggtccctccatgccccccacccccacccctgcccagggcagtgtgaggggaggaggggagcagtgtgggtacacttccatgttgccatctggggaatcctggcggggggtcagggcccttctggagctgctcccccgggcagtgaggggccctgtgggctcctaggctgcctgcctggccctggttctacttggcctgaagcccacccaccccagcgtggacaggagccaggaggaggagccctctaagaatgactgcagcctctcccggggctgagcccacacacacacaccgggcatatccacagccgccaccacgttttacccacctgtccagtgtcctgacgcctccagcccagcgtcatagcgagcctggcaaggacatgcttcatgctgggctcctgccgcgcaggggagggtgggaggtggagtcttccttgggtcgtttctcccttgtgcacgcaccgttacatactgtgcaatgcgttggtgtcttgggggacaacccagcaagtagagttggtgtatacgtcatggcttcctctggggtcctgggctggctggtccgctgggcaccccccccccaaccaccaccaggccttggcaggaccctgggactgggactggaggtgaccctcgctggcccctgcccaccttctgttcctgctgagtggctctttgggtggcaccatgcccaggctgtaaacagctggtgaagactgctggcctcaggcggctgtggctctgcgacttctctggatgcggtattggtggctccacccaccagcaggaaaaagtcaggttgtccctccagaggagccaggccaggcgctgcagggcactgtggtggtcatcctgggtagccatgtgaccgtggcatgctccttggcatctctgataccgggttttgaaacgactgagagctaagtgcaggagttggttggcattagaggcgaagcccaaactcctgtagtggggactttgactcagagcagccctggtagcccccctcatgctgcgtcacagccctcacctcctctccccgtctccttgcaggaagttctactacatcaccctgctacgagaccccgtgtcccgctacctgagcgagtggcggcatgtgcagaggggtgccacgtggaagacgtcgttgcatatgtgtgatgggcgcacgcccacgcctgaggagctgccgccctgctacgagggcacggactggtcgggctgcacgctacaggagttcatggactgcccgtacaacctggccaacaaccgccaggtgcgcatgctggccgacctgagcctggtgggctgctacaacctgtccttcatccccgagggcaagcgggcccagctgctgctcgagagcgccaagaagaacctgcggggcatggccttcttcggcctgaccgagttccagcgcaagacgcagtacctgttcgagcggacgttcaacctcaagttcatccggcccttcatgcagtacaatagcacgcgggcgggcggcgtggaggtggatgaagacaccatccggcgcatcgaggagctcaacgacctggacatgcagctgtacgactacgccaaggacctcttccagcagcgctaccagtacaagcggcagctggagcgcagggagcagcgcctgaggagccgcgaggagcgtctgctgcaccgggccaaggaggcactgccgcgggaggatgccgacgagccgggccgcgtgcccaccgaggactacatgagccacatcattgagaagtggtagtggcggtggtggccacggggaggcctcttggggggtgtgggggataaaacaggacagacgacaggtccacccaagactgtcaagggatgagcatcccaaacctgctccacagaggtagctgcgtcctgaaaaaaaacagagcagggatgtagtggggctgggcagggatgggggcttgagaaatcaacaggtgcagcccagtgggtcagaggaaagcgtgctcgaaggatgccatggtcagggcagggcctccagagcaggtgttgtgcctggagctgctctcctggcctccttggatttatcgcaaaaactgaaggtttgcgcaagagacgaggacagcggaaagtggacctgccaggccgggagtgtgtccctcaccaactatgcacacagcactcgctcttagctcctctgtccgggctactaggagtgagaccagcttctggcaactgccccagctccaggccatcccatagcccctcctcttctggctgcccccaatgccccgaggcctggggagcccccagctcacccatctgtagctccctcaaagtcagggcccaccccatctgaggcagagaagactcgagtccagcccccaggaagcctgctcccctctctggcccatggtcctgcttcatgctttgggtcaggaggccaaagctgatgttcaggccccacccactccctacagtcctcagacca

SEQ ID NO: 8634 - DNA, 6000 bp, Homo sapiens; identical to SEQ ID NO: 3699

SEQ ID NO: 8635 - DNA, 6000 bp, Homo sapiens; identical to SEQ ID NO: 904

SEQ ID NO: 8636 - DNA, 6000 bp, Homo sapiens
tacacagctttaaaatgtatgtaccttttaaaaaaaaggaccatgaaccttcagtaatgccttatttttattaaaacatcatttaaataaggtgcatgtccttttaggcacatagcaaaaaagacaatggggtcatggttgcacggtagacactcatatgatccacaatatacccaatattaaattctttaatatattgttgtaaaaacattgtgattgacgcaaaagcacaaatttcaagaattcatagagaacctggagatctccctaggagtatatataagtcattattctagtctaacaaaacagaaattggaaaattattttaccatataccacattcaaccctcaacctttgctgtttttctaggctgtatggatgcctactgtataaactcatctgcatgtattgtaaccattatacaactatgaaactaaagctaaataaaaacaaaactataaaacctatgcttcaaataaccttatttaatgagacggacgatattgtttgctcaacaaaagtgtctgttcacatcacaaacatggtactattgtcttctataagcagcgattttttttttttttggttctacatgcccattacttagtgaacagacttatctggatttgtttgttccttccttccactattaatctttatttttcttcaagaaacctttattagttgaacagcacatcaatccatcaggattttcatgaattatcaccagctgtcaaatatcccaccaatattctgaagaatttgcttctggaagttgataattaagctgatttttgctttacagattttaagaaaacatgcttttttttttttttggagacagagtctcgctctgtggcccaggttggagtgcagtggccccatcttggcttactgcaacctccgcctcctgggttcaagcgattctcctgtctcagcctcccgagtagctgggattacaggcacgtgccaccacgcctggctaatttttgtatttttagtagagacagggtttcaccatgttggccaggctggtcttgaactcttgacctcaagtgacccacctgcctcggcctcccaaagtgctgggattacaggcctgagccactatagccagctaagaaaacatgttcttttatcccattatgaaataaaacctctctctgaaaccaaaaagaaatggttccaagatgaaagaaaagtactcagtgtggttaaatatgttaaataatttttaaaaattatgacttacttatcgtatcacttacaatctcagtacaaagaggatgtggttattgtttgtaagtctaaaagcttaacacactgtaacagagaagctgtttttatttatttataaaatttataatttatttatttataaaataaattcccccaattttatagaaaaatatcatacaggactcttaggttgctcaagaccctgtttcctaatagtttttgaaagctgttgacttttagaaatgaacatgttgatctgggcgtaaaggaggaggatatgcagaaaacagaagagatgccaattcacaatgcagcaggcaattaattagcaagagtcgtgctccttgaaacatatgattgaggagatctgaaaatcttagaataacagaagatatatttcctccaagtaactttactggtgtgattttccaccagagttcaatcaatgaattagagtaaggttgtggttctcaacaggaggtagtttggcaccccctcccagaaaatatttggcactgtctggagacatttttggttgtcacaactgtggcgggagggtgttctggcagttagtaagtagaggtcaaggatgctgctaaacatcttacaatgcacaggacagcattcacaacaattacccagccaaaaatgtcaatagtgctaaggttgagaaaccccggattaaggtgtccaagccaaagggctgtatccttgtgtgcacagggcttgtgtggaaggctgtatcctgctggaggagtggaggagccttttgcctcttgctttacacacacacacacacacacacacacacacacacacactttatgtcgaaaggccacaagtactgttacaggaccccaacacttacccaaaggtagccgttgggtcagggtttctgcactaaagtcccttctgtggttgccaggaatatgttttagggcaggggtcccaatccagaccccaagagagggttcttggatctcacgcaagaaagaattcagggcgagtccgcagtgtaaagtaaaagccagtttattaagaaagcaaagtggtgaaaggacacctactccatagacaaagtaggatgttgccgaaagtaagaggaggaacgattccatgctaggtacatcgctcgtatatatagggagatgtgctctgctacaagagtttgtgataaataaataaattactatattttgcaagaatcaatattatctttaaagcaaaattaggaatgcctttgttctccagatatcgggatatctggacactcccaagtctgggtttgtttagtaaacactattaatttgttcccttagctgtaaacatctagaggctaagaaagcctaacttcccgagaatgcagcccagccagtctcagtctcattttcctagccctcattcaaaatggagtttctctggtttgaatgcctctgacagtaccatccagaattctcccagtctcctggcacactagtaagtcacaggaggttgagttagagtgtttttcactgagccagccatacaataagaccactattgaaggaactgcttaaggaacaaataataggaactgttcagagcataacaggattcattaattcatttatttacctactcagcaaaactttattgaacacccacatgaacccttctgctaaacattgtgatacatgatgaatacaatcagacctggtccctgccctcttgcagcttacagcctgggagggaactctaaaggttaccaagaagggccagtttgtacaatgaggactccatgaatgtacatcattgagcttcacaagctttcacgtttgtaatctcatttgaactgcacaaccacctcacgagacaacctgtattcccttcttaggttaaaaatgtgccccagttcaaaacagtttgtaagtggcagagctgacacttcagccaagtgacaatgagggccctgttacatcattctatagagcagggatacatataggtgctcttgccttgattggtactgaacttgcctctcctgctcctcaccaatcatacaggtacaaagctctctttatgaaaaaaatgctcccacctactccatccttttgcttacagctggggattctagttttttcacgtatatatgccttgtatttctaattagattgtaaactcccaacctgcagggaccagatcttccatttcctttgcaaccttttgcagtactgcagtcacccaataaatgccctctgcatgaatgaacctgtagagataaaaatactttatggcattcccatttataggtttcatgtttttattctgctttgtgataggactgtacattataagcttctagagggcagagaaaatggcttagtgctttcctttacactcagcaggaaccatgcaaaatttgatccttgcatgcctttttgatgctctgggtaatattagcacactggggtgtttttgtgtatctaaggaccgaggttatcagactctctgcagcggagaatgttcctgcatttccactgtaagctcccatggcgcctaggacagggctagatcactgcagaagcccctccatgcttatttctgttactaaggaagccaaaggcgaacatggcaagctctgtcataaccctagaccttgcaaggaaatgagcaaagtggaaggggatctgaaggcaggtcagagatggcctggatgagaatgctaaggcttctctctgagaatccagcccaagtctgacatgcagggctcgagtaggtggccgcccgcagtcgccgggcccgggatgcccgcccgtccgcccgcctgccccgcgcgccctcgggagctgtccagacggccccgcccgcgcctacctgggcactcacccgtgccgcgcggcctcttctcctcccaccccggccacaggagcccagctcgggcctgccccgccgcctccgaggagccccgctggcggcgcgctcatagcttccacccgggccaagcgaccggccagacagcgccaggcgcgccgggggcggcgcggtcaggctcggcggggctcggcgggctcgccctcggccgggcgcctgcagggggcgcggggacggccccgccccgccgcctcctctctcccctcccggctccctggatccgcgccgggaggaaatgatgtgttgctgcctggttaatcacagctccagacactcattggccgagcgctccgcagccacttcctcctcctcctcctcccgctcctcccgctccggctcctgctctttgcagccgccgccgccgccgcagcctccccctcggcgcagggggaacttttctactctctgtgacggtctcccccgccgcccccgggggcaagcccagctggtccgcccgccccgcccgcggtcgtgctcccagcccgagcctctgcgcctcgggaagtttattctgcccgccctcctccccttcctcctcctcttcaccccgcctccccgccctcccccggctctttcccccgggtggctgccgctgccgccgctgccgctgccagcctgctcctcggccagccgcgccggccccagggccgggaagctcccggccccacgcaccgctccgctgcagccaccgcagccgccgccgctctgggccggccctcggcccccggctcccggccccgcagagttccgggctccctcgccggctgcaccgccccgccccgccccgcgccgccccgcgccgcgccgacctgcagcgcccggctgcctcgcactccgcctcccccggctcagcccccggccgcggcgggacccgaggtgagcgcaggtcgccggccgcgcctgctggagccgggaggactgagggaggaggtagcctagcgggagaagaggcagggatcgggggtggcagggtgggcgtctgcggtgcctccccctcgctttcattcctttctcccccaagcttgatcccctctccgtgggggaagcagccgcggaacaaaactgtcttgctttgggcctgaactgctggtgggatatggggggtgggggggcagaggcgtggagcgggggtctcaggtttgtattggggtgtgtgtgagtgcgtgtgtgtgtgtgtgtgtgttgtgaactccttcagggtgtgcgactctgacttgtaaatcgatctggccgcggggccacggggcttaccttcctagctgagcttgtagagagtaaggagatagataggcgaatttcccccaccctcaaaatatccatctcttccaagaggaattttctgctggagagacagccaataaactctgctcaactccctccctccctcggttcttcctagctgcagtttcaaaaagcttcaaagccaggaatgtgggattcatcttccgatccccagaaggcaaatgtggttacagatgttgcacggtactttgccaagtttaaaacccttccttcaacactgtaaccaaaacagtgaggctagaacctcgggcgcactaagaagagatgtgggcctctggggccgctggattcagtaacttccgtcgggttctagactggctcggctctgtccagtttgtgccagatagtctcccaccccctccccacccctcctttcccctggagatttgaacgctgcttgcatgggagaaaagctacttagagaagaaaacgttccacttagtaacagaagaaaagtcttggttaaaaagttgtcatgaatttggcttttggagagaggcagcaaggtaatacaatggacttgtcaattttattgggcttttctttct

SEQ ID NO: 8637 - DNA, 6000 bp, Homo sapiens
tgaacctctccagggttggcctaagtgtcaaactgtcattcccccctgaggaaggaagtttcacctccttcttttcaagatagcaagatgtggaggctttgctggattttccttttttacgctgccagtcgggctctgatgtggaatctgcctgtctcttctcccttgcctacaggctggaggctctcaggtcatttttaccaacccattggagatagtgaagattcgtctgcaagtagctggagagatcaccacgggacccagagtcagcgccctgaatgtgctccgggacttgggaatttttggtctgtataaggtgggtaggtttaggttataatgtactcaataaaatatgaaagaatgtggaaaccagacttcttccctccaagttgaaaagcaatcttgtccagcagggtagtctgtggagcagaaaatcaaacaaaaagaaaagaatcaggacacttgtatgagaggcagtgggatacacatgcagcctctcctgttgtcatcaggcttttatgaaactgccagcaaggaggccagcaccgcagacctgctggcctcaggctcacagcctttcatttgctggggggcttgggaaaactttccctggtgctctctttgggttggtttagggcttcaaaatagtcttatgtttattttcggtctgattatctctattgttatcttcccagtgggagcttttgtcttaataatttgaccacagtaaaacagtagtagagtttggtaggattcaggtctttaagaagttaagtggtaggatttgtcaataatgaattccattaaaaaaaaaaaaaacaaaccaacaacagagtgtactgtactttaacaaaatgccagtcaaaagattccttccctgcgggtatacttactcccatcattacagatcagatgtaatggagcagaagctattatttttcttaaacaaggaagaatatttctttccattcctttgcctggtataaggggaatacgtaaatttagccaccatagccaagtgtgtttccacagcatctgatatagatccatcactgcagaaatgtgtaaatttgtttcggtaactgcaaattagaaattagaaattctctagattggaatcacacagctacagggttctctggagaccagcaaacaatgatgcctgtctcaagagagtttcgtacacatttttgcttcctcctccccactcccaatttccatcctttttgaattccctttgagagatgaatttattaatattgcttctctctgtattatcctttagcgagtccttggattttttttttttcaatgtttgagtttgtctttttttaaaaaagccagggctgggagcactggctcacacttgtactctcagcactttgggaggccaaggcagggggattgcttgagcccaggagttcaagaccagccagggcaaaatagcaagaccttgtgtctaccttaaaaaaaaaaaagaaagaaaaaattagccggcacagtggtgcacacctatcatcccagctactcaggaggctgaggtgggaggatcacttgagctcagacggtcaaggctacagcaagctgtgatcctgccactatgctccagcctgggcaacatagtgagaccctgtctcagaaaaaaaaaaaaattaaaaagaataaaacagagtcattaaaaaaacaagcgccaaggtggagtgtttgcctagctaggtagtggaatggtgtgggcttctgacaaagctgagggaggtgttctttgagacctcagtcattgggacaagctgcccctgggtaatgattttctactcctgtggaaacctgccactaaaatattttgtctgctatttaggacatggggaatgaggagagaagatttgggtttcttttccccctgctctagagtagttacttttccttcaccactgcctatagctttttacctggcactgcggggactctcagctgatgtaaaaacttaagagggtagatcttgtgtgtttttaccatagtaagagattaattaattttaaaaactctgaatctatataagaaatgccagaaagttcttagttttcagaatactatcattacccagttattaactctaggactgcaggattcaccatgctttcacaagctttgagatatgcagatttccctattccccacttatctcccgcctcccccatttcccttgcacatcagttctaatgctgtttaagggacacctcaggcttgtcactgagggacacctcaagcttgtcactgacaaatgtcacatggatcccatttgggcattcacactcagtttcacactgttttgcactatttcctcactgtgtgacagggtgccaaagcgtgtttcctccgagacattcccttctctgcaatctattttcctgtttatgctcattgcaaactacttctggctgatgaaaatggacacgtgggaggtttaaatcttcttgcagctggagccatggcaggtaactacaaatttttttttaactgaaagaattctcccattatttaaaaagtacagaatctctatgtactttccccctttatttctggaagtattattgtttgtacctgacttagtttaaatatcactttttctcctttgtgggatgtgctgtaattctgatgagagttaattacatttgcataatgtggataaacagcttaatgcagcttagcaactcagagccaaattagatctgcccatctaaattgggctttcatcattaacatgtttcttagtttcctgtgcccctgaaaccttgagtacagccaagctaagcattaaggtgggaaagtttttcctcaaatcagttgcttagctgtatctcatgctcatgcacagatctagcatgctcttactttctctcttctgtatattggaatctacatgatttggccgaaaattgagcttttgtcgtgaagctgtccctcttcttcctaccattgccctcattagaccaaagtaagcagtacccctcagcaaaccaccttgaactcaatttttgtattttttctaatcgttaacactttgtcattagccaggtgtagtggtgcgtgcctgtagtcccagccagctacccgggaggctgaggtgggaggatcacctgagcctgggaggtcaaggctgcggtgagccgagatgacaccactgtactccagcctgggtgacagagtgagagcttgtctcaaaaaaaaaaaaatttgtcttttattaatagttatttgcataattgttatcctctgtactaggctaatagcttcttgagggcaagagtttcattctcttcatccttgcctttcctacgtggccagtgtaatagtaataggtgctcaataaatgtcaataacatgaatgaaaaccttcatgtcgtctaagataccaaattaggcacagaagagatttcatttgaaagaggagccttgtaagagcagggaggtactaagatgcttccttctgacctcataggtacagcctgactcttgagttaggaaggagctgacttggaatagaaggagagaaccaggtgtccttggctgcaccaacactctgaaaagacaaaggaaggaaggggtgcatgtttgctctctatacaaccagtaatgaaccattacagagctcagtgtggctctgaccagccaggcttatgttcactgtgttgctcttccttgctgggctcattctcctctggaggctctggctaaacatcagggcaacctgagcagctcccggagtgtgctgtgcttgttgtgtggtaggagcccttgggcctgagagtgttgcgatggaccacgttgttcttgctcgtgaagacagggatgactttgatcattaagaaacggccccagggaacttaccgcccttatttggggcccagcaagtcctttctcctctagcaatggtaattttagtcagttttgtgtttaaaagccagtaaagttacctgctcagtcttggcagtgagctgtttgtagcagcccctttctggtacttaccagtctcccacttttttttttttggtgagacagaatcttgctctgtcacccaggctggagtgcagtggtacaatctctgctcactgcaacctctgcctcccgggttcaagcgattctcctgtgtcagcctcccaagtagttgggactacaggcgtgtaccaccatgcctggccaatttttgtatttttagtaaagacagggtttcaccatgttggccagcacagctggtcagagccacactgagctctgtaatggttcattactggttgtatagagagcaaacatgcaccccttccttcctttgtcttttcggagtgttggtgcagccaaggacacctggttctctcctccttttccaaatcagctccttcctaactcaagagtcaggctgaggccgagcttggtggctcattcctgtaatcccagcactttgggaggccaaggcgggcagatcacgaggtcaggagatcgagaccatcctggctaacacggtgaaaccccgtctctactaaaaatacaaaaaattagccgggcgtggtggcgggcttctgtagtcccagctactggggaggctgaggcaggagaatggcatgaacctgggaggcggagcttgcagtgagccgagattgtgccactgcactccagcctgggcgacagagtgagactgtctcaaaaaaaaaagagagtcaggctgtaaatgtgaggtctcaaactcctgacctcaggtgatcctcccatcttggccttccaaagtgctgggattacaagcgtgaaccaccacacttggcccagtctcctacttttaaatgggggcagcatttgccttccaggcttttccttgtgctttccaatcaacaatgaaaaacagccagagaagaagagtctaattgtggacaggtgtttgcaagtggttgaaccaagtaaatatttccatggaactgtcagcaccgacttcttccccatagacatttgatgtcagttttcagaatgagattattttttctaatttttaccagtcaagctttgctagcaggaactgagaacattcagaagtctgcctccaaaggcaggaagtttacctagtttcatctgaatagggtgcaaggccatgccaaggggaagtatttgcattattccctagcagaacctcgtacaaggctgccaactccatccgcctagtgaggatacagtgatattcaggccaaattgaatttcttcccccggggaagattattttgctcctttgctctctgttttgttttataagtaaaaggtgtggttgtgaaatccatcttttgtgtcctgctgctgatcaatctcaacatgaccccagggagctcgggcacaggggcctttccctgaccagctcccctgttgtttcttaactggctgcctggccacctcttgctccagttgtaatgacttttgtcatgtaagcatgtctgaaaggagtcacagtcaactctcaaggtagcccttcaaacaagcgagtgattataagtattgatattcacttcccacactacgacaagaatcagcaaaaacagtagtttggtgtcagatacatttagtgactcactaagatgacattatcatttttttatacataaaaatacttgtatcttatttaagaaaaaaaggaggtaaaataattgaaactgaaagggaacgcttgggaattgtcttattaatattgctactttttttttctctctcacagttatttgggatcatgcaatgtagagtgattttttttttaattcaggaaaaaataataataattttcccctgatcacactgcaacagctaataggcttctatgcccttttcccattaatggccagacatctatgtaaagagttttgagttccgctcaagtggttgaagttgcaggctctatagtagatgttagcagtattcctatcttttataaggtactctagataaattaaatgtggttttctcctgaaaggtgtc

SEQ ID NO: 8638 - DNA, 6000 bp, Homo sapiens; identical to SEQ ID NO: 913

SEQ ID NO: 8639 - DNA, 6000 bp, Homo sapiens
tatcattttgtcctataatcaatgtaagataactgtaaagattaaattaattaaattgtataattaaacctactacatctttgtcctgaactgtaaaactttttttttcctgctgtacaacttttgaatgtaggaaattatgtattatgtatctctggatgccaggcagaacaatcaaatgcttcacccatggcaagcccttcacttcatgaatattaatgaaggaccactaaatataatttatcagcatctttcttatgctaacgcaaacattagaaaaagtatcctccttccctttatatacataatttcaattggcttccacaccatcctccagctcacctgtatctcacactttttttctggactttagggccttacttccatctaccttctaaatatcatcatttagatgacctgaaggcaacctaaacataacatgtcccaaactgatcagagaatctttctctttcttttttttgagacagagtttcaggtttcgctcttgttgcccaggctgaaatgcaatggcacaatctccgctcactgcagcctccacctcccgggttcaagcgattctcctgcctcagcctcccgagtagctgggattacaggtgcccgccaccacacctggctaattttttgtatttttagtagagccaaggtttcaccatgttggccaggctggtctcaaactcctgacctcaggtgatccgcccgcctcggcctcccaaagtgctgggattacaggcgtgagccaccacgactggcctctaatcaactttcttcctatatttcttgtttgataataaaagtaatagccaacatgagaattttatatatattatcctatttaatcctcacaacaactctacgtattctatcatcctttatcaccaaataggatttaaaggcatggtaacttgctcaagatcacaaaactattaagtggcagatgcacaccttggcatgtttgactccaaaggccatgctctcaaacaccttccatccaagcacataaagcaaaattagaaaccttgaagtcatcctagaaattctactcgctctctacatcctgccacccagtcatctctctcctactatctaaatgtttcccaaactagtcctctcctctttgtactgcctccattcggcctttctctcctgaactactgcaataaccacctaattgatattttgactcgaatctcaaccacctatagggttctttctgtatttaaatttcatcatgttgctgccccacttaaaatttttataaaggtttccaattgccaaccaggttaagtacaaacttcttaacaactggatttttgcctcctctcccagtcatcccatcgttgcccaaatgtgctctagggcgatcatactgcacagctcgtctttttttattttttattttttgtgacagggtctcactttgttgcccaggccagagtgcagcgattttggctcactgcaacctctgcctcccaggttcaagcaattctcctgtcccagccctgcaagtagctgggattacaggagcgcactaccacgcccggctaattttcgtatttttagtagagacagggtttcaccatgttggccaggctggtctcgaactcctgacctcaggtgatccgcccgccttggcctcccaaagtgctgggattacaggtgtgagccaccgtgcccagccaacttgtctctcttaacatggtgacactcactccttcctcagctcacatggttctctctcagctgacttctaatcatccttccagatttagttcagtatcaactcttcaagcctttcttccctgctgcagcctcctttccttcacctgccaacagattaggtattccttcccctgcagtccccctttacctcatttctaattaacctcatcacaagttactctattaatatgtgtttctgtctgttgctcctgactcagagttctttgaggacaggggttttatatcaatcacacatcgctagcatagcccctggaatatagcactctataccatatgtgtaccaaatggaagggtttatatcgggcttacaaatcacagcaaagaatgtctgggaatatcaggatagtcagtcttccatatttgctgggagggaaaaggaacacttctgaagaagtgctgatgacccggaaagtcagttaaggacaacaggtgtgcctaaaaaagaagtaaagatcagagaactcacagacttccattagagagaacacaaagaaatcatttatttaaagatcagactaaatccaaaacaattaggttcacaaagccaacagaaatgcaagatacagacatacacagccaacattctcttaagtcaatttcaaaatgttgaaagctatttcggcaataaaaatcacaaactttctgcactgccaaggtgagggaaattacatttcaaaggcgattccaaaaaaacctaatcaagactttcctcaggatcaatttttggtattcacatttccttagcatgtaatacaggtgcctgtcttcggcgtacggataaacccagaaggccaagagcaaaaatcgtgattaactttaaagagtttaacttgcaccccttgtatgatgccacaggatacaatactataaaccgccactcacacaagatgagttacagttgccatgggttaaatctgctgcctggaaaacaaattttaagtcctccacccagaagggtctggggaatgggacgcaacaaagaccaagccagaacaccccggagcccagacctgctcagaaaacgcgttccacgtgtgcgcgcccgcaagcccggcttcgcttcccgccccgcggggagcgcccttagctgccctatagcgttcgcgcccggaccaggacgagtagaggggacggggccctcgagccatcgaggatataataaatacccgttagtcacaccacactaccttcctgctagcgcgaggcaggcaattaccatccactagccgcaagcagccagcgtctcacccgatgcgcaggcccaaccccgcacccgcacccgcacccagcacgcacgcgcgcggcagagcgggtgcagagagcgcggcactgagtcccgcctcgcccgggggcaacgtgagattggcgctgctcgcagccaatccgctggcagcgagtctgtccgggaaagcttccgcaagctgcgcagcgccgggcctgagggcgtgtatccgcggccgtagcagccgggctggtcctgctgcgagccggcggcccggagtggggcggcgggtaagtgggcacgaacgcggtggacgctgtacagtcgccttcgtcggtagggaactgctggcggcctaggggtcgtcctgagagggaaaagcgggctccggctgcatctgcggcgccctgcgtggccgtaagagccaagtggcctcagaggctcgccccctacgcaaatcctcgttgtcttgccagggtcctgacgtgacgtgcggccgcgagaaggaaggggcgggttgggggaggcgctgaggtggtagcagcggcggcttttgctgagttttctctggcccagagcgctcgggctgtcggtctagcaggggggactcccctgaggggccgctgcgggtcgccgtcttcggaggcaccggcgagggcagagccaacagcctcttcacggtctgtaaggtcattgtttgccagtcgtgggcagcgcggcaaacctgctgggaaaaggttttctggttggaataggatgagtaccgcaccagctttgccttccagctgagatgtaaatttcaggcctccatcctgtggaacgtgggaaaactatcttgagtgttggcatgttctaagtatgacataatagtttaatgtatgataaatcatgggtgtttagacgaaagatttacacatataaattggaggctttagcggtcttagtgtaactaacttttcgtccccttaacccttgatgcctgttctatgggtctctagagcggaaggagcattatactccggaaacatttgctggaaggggttatgagaaattcctctctgtatgctaactccgtaatacaagcgtttgtgtattttaaaatcacagctgttccaaatataatctagcctcgttttccccctccgtcggatgataggtgttcttcaggacagttttattttaagcaattcttagtctcaagtaaacaccatcattaaaagaactgagaactattatcaattcttcctttggagtccatcttcaatggaaaggagaagggaaaaccttttttaaaaagaagaaagaaaactgaagtttttgatttgactagagaaatattcagaagactccttattttcacctagtttaatcacaaaattgagaaacaaacattatcccttgaccatgtaaattttacaccacattatgtcaacagcatgtaccttccacattgagtattcagaaagaagtgatctgaactctgaccattctttatggatacattaagtcaaatataagagtctgactacttgacacactggctcggtgagttctgctttttctttttaatataaatttattatgttggtaaatttagcttttggcttttcactttgctctcatgatataagaaaatgtaggttttctctttcagtttgaattttcctattcagtaaaacaacatgctagaaaacaaacttttggaaaggcattgtaactattttttcaaatagaaccataataacaagtcttgtcttaccctaaagtcaaatgctgaagattctttactgctgtcatcagcatctacaagtagcatattttggatggtgtttgtgtgctacttcaaagtaactaggaaaaaataatcctcgcaacacaggtaccttgtcatgtcagaattgggggtgttaggttgccagttgtatcagtgttgattcatttcattacttcctacagagcaaacatgaacgttggagttgcccacagtgaagtgaatccaaatacccgtgtcatgaacagccggggtatgtggctgacatatgcattgggagttggcttgcttcatattgtcttactcagcattcccttcttcagtgttcctgttgcttggactttaacaaatattatacataatctggtaagaatttcacattatactaaacacttaaaagttttaagtttagtggttgccggaaattaaggggaggaaggaatggaaagttattgcttaatgggtacagagtttttggttttgcaagatgaagagagttctggatgtggatggtaatggtgatgattgcacaacaatatgaatgtttttaataccactcaactgtacatttaaagtcccagcactttgggaggccaaggcaggcagatcacaaggtcaggagttcaagaccagcctggccaacatggtgaaacctcatctctactaaaaatacaaaaattagccgggcatggtggcgcatgcctgtagtcccagctactcgggaggctgaggcaggagaatcgcttgaacctgggaggcagaggttgcaatgagccgagatcattccactgtactccagcctaggtgacagagtgagatttcgtctcaaaaaaaaaaaaaaagtgtctaagatggtaaactttatgacatgtgtgtttaaacatagtttttaaagaagcttaaggttttgtgttgtatacaacttagtttttttaacagcttttttgagatataattcacatgcaataaaatccacccatttaaagtgtatagtttagtagtttttagtatataagacttaattttgaagaattctaatctgggatagaattttcttttttctttcacgctttatttcaacattggtcctttttctaagtaagacttttttttttctcattgtatagaatctagaaaatagatcattttagtttcaatccttgttaacttatctatctaaatagtgtaagtatacttcactgtttcagtatttaagttttgaacttaatcatcttatgtgattcag

SEQ ID NO: 8640 - DNA, 6000 bp, Homo sapiens
aaaatctgaggtcaataaagttaaaccggtgtttagttttgcttgatgtgttttggcttgatttcactgcagggctcctcagagcctttaatgtgtaaatgcacactgtgaagcttcaagtgagcgatgtttatattaagttttcctaaatattgtatgaaagaagttcctcccctccatttttctattttttctttatttatttttttagaagaacgacaagtgggtagaagagcagcagcaaagcggctgggaacattagtgctccgggggtctgttctaccactaacaagtaacttggagaaaaaaaaaatcaatgtcacagataataaagggagaaatgattggggcttatggtatgaaataaatgagtaaaatgctcagaatatgcaatactggatggtgttaataatacaaattggaaagaactacctttactaagtctttttctaatttcccccaatagaagccatgagtagccaaagagagacatgaaaggtagtttcattccaagctgattctagttcctgtttctgactccagagaataaatttcaaaatgagtttgaaataaagcattaggctaagccctaagaaggctatgattaaattaatagcaatggaaacctacttgaatttataaataaaaagacaccagattgtatagagatgactactgcttattaaatctagctctcttccaataacagttcttcctttttttttttttaactactggcaagctagtggcaaacattaactagttcatattgctttggctagatgttttaatagtctttggtgagatatgtgttttacaagttttaatggagaaaaatgtaagtattttacctcctgaaacttggctatttgagtaatgagaaaatagtcactttccccaggacagtggttctcaatcatggctatgtgtttctccaggaaaactttaaaaatatatatataccaatgcttctgtgtcacttctagggattccaagtctttgaatacgaactctgcatcagtattctttaattatccaggtgattgtgatgtgaaatcatgactgagccccactgctctaagatgaaataaactttcctcagcactgaaatcacaaacttaaactaccaaaattaattaagggcatgggaatcaataaggcatagggaagcttttacattataaaattatttctttaaatcacagctcattgtttatatgttatttgccattgtagaaaagggtgaaaaaatagcaaatttaattactctcagtttgaaaaattatccagaaatgaagatgacgactctgaaacattgtcaatatcatttgacctataaataatgttctaatacatttactacacactgatagatactttttcatatgaatattatacattaaaactaaggcaataatgatttagaacattctatctatatctatgtatcttaagtaggctagaaattaagatatgagttattaagtatgagatgttaaggtgtggggttagaaattatactgtacttcattatcaataatcaacatatacttcaatatcacatacatttaactttaatttgtacatctttaactatttttaattatgtgtataaatataagtacacacatctttatgtatttatttattcatacctccattcacttatttatataggggatccccccaaatccactaccattaaaccatacatttttattttaatctttagaacaagcccaggaggcaggtattgttattactcacattttacaaatgaggaaattgtctacagtcacaaagttactgtgtcagacatattagaagcttaatacatatttggtgaacatatgcataaaaacagagagacagacatgtacaacagctcatctttacactgagtaaaagcttttaacctgtctcagaaacctctctgtgaaaactgagcaaaaatcgaggtatcctttcatttgtcatataggtataggtggtaccttacttctccaacaaggatgaatattgaaatgtggatcccaaggcccaactccagattttctgaatccctgatagtgggacttggaatttgtctattgtttcaaagtttctcaaggaattcatatgatcaaccaggttcagaaatcactggatcttattgccgaagtttgagaattaaagtttgggccttactgcggctccacagaaagggcaaatgaagtatcatggacagaactgatacgttcccagttagtttcccctctcagaagctaacaggcagcaatacagcagaaattagtgacttatgtcttgtgctctgaagtcaggcagaatttcacagagtcccagcagtgtcactgacgagatttgtttcttggggcaagttgcctgatgctttcaaagccatattccttttatataaaatgagataatattctttgtctcataggggtgttttaaagattaaataaaaataacatgttctatcctacatggcacaatgcctgacacctaagaagcaaaggatacatcttacctttattgaagcaatcagaaagtatgaaatcatgaaggagataagagttctgattggcagtgtatcttattttcccaggttcatttatttatcttaaactattcttgttggagaataactcccaagccccctacttaagctgtgagtaatctcacactttataatgatgttctttccatgagaaaaaaaaatgttcttaagttttctggagaaaatatatctgcactatttctactgaaaaatctaacaactggactctgctcctctgcatcaattctagagtgtatatgccacaaataaagtgttctagctcaagaagattgaaagtaaatatggtatagtattttaaaataagaattttgcaaatacatggtatgattgtgtcatattactagcaatcatatgatacgcaatgcaaagtacagttcatagacttaaatttaattctaataagtaaactgattttgccttgctggggaaaagttaaagcactaatccaattgctaatgcagtcttgtctacttctttggtacctagtgacaagtctaaataatgtatatatttttatttacatattcagtaatacaattctctgctcaatgagtgatgttcttctgccacttggtggtgcttgccagtttcagaatttgtttcttggtggcactataacactaagtacagagtaagtgcaacaaaattgcagcattcccattgaaaaggctttgcttcaaactgtttaataatttaaaggacctctgtggaagcaaccgcatttgttaaccagttacaaccagtaattaactcctttggagttttaacttacttttggcaaaacgtcttaggaagagcatatattattagaaagtatgccaaaaatttacttagcagaaaattcaaaaacagttttcctctgctaagaggttctctaaaattctacttacatagccaaactctgaaatcctagcaggtcctgtttcattatcataattactgcataaacacttttaaggactttgcctttagtttcaagcatgacttattttcataagcctgattagttaccacaccagccttgctatggaaaatgacatgttctcattctctgctgtagagttgttaaatcttgatctatatttatgttgccttctctgctgaaagcctgtagcgaaagaaatttctaattccttgttttgcaatattagttggcagctctatctaatgggtattctgtttccttaaagaatttagctgctctgtctagaagccgattttctgatgcctccaacgtctggtctaattgatctgttttaatggagtcttcgtcggtgaggagcgagatgccaccgactagaatgctgggatctgctgcttaattgccaggagtgagagacactgagattcagaaatctttggaggtgggaggggagagggacagtctcggacggaggcggagatgtaagataaagggatggatttcacacaggaaaaaaaaaaagatttcgttgaggcactgaggtgctgcacgatcacatctctcaaaggagaagttaaaaagcaaggaagtgggaggaggttggaggttaaagtacttaaaaggattactcgggtacaatttgtttttctgctggtgtctgcaaaggatagatagtcccgttttcaaagtatatgaatgcctcttttaagtgattgggaatggacactaattgcctgttaaatgttatcaaatgctctcctaaattcaggggacacagaaagaggggcacaaaaggagaatttaaatagaaaaagggaggatccggaggcttttgaaagcggggggagaagaaggaggagggataacagagaggaatagagaaggagagcggagagaagataaacaaaaacaaaaacaggaatcactgaataatcacacaccaaaaagaaagctcttccctatggggcatccaaaacactgagactgcaatagtgaccccggtcatggaagaaagatgttcctctccacccttgtccccgaaagctcttggtcccgttactggcgactaaaattccattaggctaaagagtgtgtctaactgcctgaagaatgcagcagacggaaggcgggtcccgctatgccgtttgcccttcccgctggagagaatgaaagaaacgcgcagagccagagactcctgccgagttagaccttctctcgtcgccccaggtcaccggccatccggcaaagacccgagtaaggaacgcagggtcactgcctgggccaacaaatggagcccgctctccccttcccggacgccgctgcccggccgatgctcccggcaacccacccgcggcgtatgcagaggagcctttctctttctctcagaccacttgtcccgaccaatctgaccttccaaacacatctgaccgcacctcccaggtggacacactaataggctacgggctggagaggagcgggtgatgaggagagggattcaaacctgcgaacgcttgggctgggtcggagctgcggggggcctgggaggagagaggggagaagagagaaggaaggagagcgcctgccgggatggctgagctgcctcggcgagcagccttggggttgcacgctcttgtgggagatgctgctgttgcttccaggtcggcaagagcggttctaacaccatcgcctctcaccctctttcctgtaaatccctagagaaacgtccctggcctctccgccgcgacattcccagcctgcatccccctacagcctaggcggcgcgctcccgcacgctggagcgccggtcgccagcaggacgccctctcccgcgccgactcgcccctctctgccctgctgctgctgctcctctgacacctccgcccccaccatctccagctcggagagacgccacccagccgcggcccgcactcgcggcccggggtcacgcgcggaagaggggcgctagtccggaccccgccttcggtagggggcgtcctggagcggagagtgaggcgaatggtatatgagtgtgcgggtagcccaccctgaagcccgagcttctcatttgagccatccccgcctagccccactcgggccagcgcctggcgagcgagcccatctgtggcttccgcggccgcctcctccttgcatccttgcacctcctcgtcgacccctccctcccgggacctgcatcctgctccaccaatcagagcccgactgcctcttcccacgtgaccccgggcgggctgaggacctgctgcttcccaaacgccagagggatgcgggcggcagagctcgagaggcggctgccgggctgcggggcgccttgactctccctccaccctgcctcctcgggctccactcgtctgcccctggactcccgtctcctcctgtcctccggcttcccagagctccctccttatggcagcagcttcccgcgtctccggcgcagcttctcagcggacgaccctctcgctccggggctgagcccagtccc

SEQ ID NO: 8641 - DNA, 6000 bp, Homo sapiens
catcttcaaatttttaaaatgttcatttgttttttagaattgaggagttgagggtacatgagactatactctaaaaataattgctaatttctggtcttagaaattttgagaagcttcatgttcactctagaaagctaggacttctgtttttaaatgtgcatttagatcaggtgcagtggctcatgcctataatcccttggaaagccgagatgggaggatttcttgaggccaggtgtttgagaccagtctgggcaacatagtgaaaccccatctctactaaaaatacaaaaattagctgggtgtggtggcacacgcctataatcccagctactagagaggctgaggcacaagaattgcttgaactgggaaggcggtagttgcagtgagcagagatcccacccctgcgctccagcctgggcaacagaatgagactcaaaaacaaaataaaacaaaacaaaatagctgggcatggtggcacatgcctgtggtcccagctacttgggaggctgagatgggtggatcgtttgagcctgggaagctgaggctacagtgaactgtgattgcaccacagcactccagcctgggtgacagagcaagaccatgtctcaaaacaaaacaaacaaaaaataaatgtgcatttaaattttctgtgtaggatattcaaggggttcgaacccatgaactgaagccctatgtcatatttataaagccatcgaatatgaggtgtatgaaacaatctcggaaaaatgccaaggttattactgactactatgtggacatgaagttcaaggtaagagcaagtcaaaaactactgtattgctttcagtggcttctgcgtgggagagatctgggttgggctgggccaaggatctctgatctcattgtcctcctcctcctttttgaccccctctccaaaaggccctcaataaaatggtttactatggttttatttaaaaaaaaaattaaaactgtattgtttctacaggatctgtgttagagaatgtaatttttgtttctaatggataatgcccttacgatttatccttttggatggacatcacttacagatataaagtttaataaatgttatgatgctacccttattttttactttcttatttttttgggtctagcttaaaaaaaaatccttgagccgtagtttgcaaagccaaacagaaattgggcatgtatgagcctggtgtttgtattttaaacagaatatcttttacttaaaagcttactttaaaaatgctcagtgagtatatctcatctgtaaaatgatgatggtaataatagagggggcaagccaagtgaaattaatcagtgatctcatcctagaacaggtgattttttttccggttgcgtacatatattttacattaaatatgctttaaatattgtgtcataacatacattcagtaaggtgtacagagtgtacagtttaatgaatttttatgtgtgtatgcacccagataaccatcacccacatcaagatattacagccacttgtgtgtgtgtgtatatgtgtggtaaaaatacataaaactcaccatattaaccgttttaagtgtacagttcagtgttagtatttagtgttaagtatattcacattgtgtgaaacagagctctagaatttatttacctggcaaaattgaaactaaaaatatgaatgattcactaaatatttgtatgtcatgcttgtacaagggccatgctaatctctgcattgtttcagttttagtctgtgtgctaccaaagcaagcacaggtatctttaaattatcctttctcttattatttttattttcatattttttgcaatgactatggaggtctgattttccagtttgccttgtgaacagtggagtccatgaatgtatttgctgagtcttatgggcatttaaaattgttctcatttttatggcagtctaaacaaattaacaaaattgtttctggatcatatgtatggtcactttgtaaagccacaagattttggtgcctgcatttgtgtttcagattgtattggtgacaagttgtactattttcatgaactaataagaaaataacagcaatgaatttaatgcattagtgccaagtgaatgccaaattaccttcattaaatgaacatttcacaatagtagaaacataatataactggcttataccatcctcatgttgaaagtggccattttgtatctttaatgttatccctatcagattaatgttcacttgaaatttatgtttaaattttatttaaactggtacattttctttggttttatgttgtatatggttaaaaagtttcaagtgtttaggtaagagtaagataagttcacacgggaagttgaggggagtaatctgtctgcaaactatgactaaattttgcaaaacatgacgagacattaagactaaagattaaaacataagttttgtagtttagaagacatttattggacctcattttttaaaataaaaacttcagtcttttattatttaaaaaaacttccaaattaaaatttctttatctcagtaatacatttctaagaaataaaggatgacatactgtggatagtgatatacttttcccagctttgcttatgcttcacattaatttagaaggatatgtttatacctgttataataattatattttctctacaaaaattagctgggcatgatggcatgtgcctatagtcccagctacttgggaggcctaggtgggaggatcacttgagcctgggaggcagaggctgcagtgagctgagatgatcctactgcatgccagcctgggacagagtgggaccctgtctaaaaaaaaaaaaaattattttatctatacttagccacattatttcaataacagagggcaaaaaaattactattttctagtttgctggttttgtagaattttgaaaaaatatttttgaaactttattgaaaatcatctgtgcaaaattttcggaccttactgtttttatacatagtttcacaactgaatgtgacagcataacaaactgtattttttccatttgtccaattaagtctgtactatccatatttttctatttctcctaaaggatgaagacctacaagagatggaaaatttagcccaaagaatggaaactcagtttggccaattttttgatcatgtgattgtgaatgacagcttgcacgatgcatgtgcccagttgttgtctgccatacagaaggctcaggaggagcctcagtgggtaccagcaacatggatttcctcagatactgagtctcaatgagacttcttgtttaatgctggagttttaacactgtacccttgatacagcgatccatagttgcaatctaaaacaacagtatttgacccattttaatgtgtacaactttaaaagtgcagcaatttattaattaatcttatttgaaaaaaatttttattgtatggttatgtggttacctattttaacttaattttttttcctttacctcatatgcagctgtggtagaaatatgaataatgttaagtcactgagtatgagaacctttcgcagatttcacatgatctttttaagatttaaataaagagctttcctaaataaaataagcaatagttaactttagaaactgtactctatgaaacgtgttttatgaaaacatcttttacaaaaagtgcttacttgactaactcagcaagaaaggtttaatgtacacatttcacatctaaaatcaaaacctacaagaaactgcactgccttcactatttacaaatcggcctacaaggaaaaaattattctcatgagaggtgtgacaaacactaattttccttaacagccaatatctacatgcaggcctaaattagaaaaaggcaatggattaatcccagagacctatatatagaaaatcacaagagtgaaaccgtgtctcagagttaaagaaaccagggactaacagaaattcttgagcatgcaggacggcagataaaaaacaacttgctaaataaaacgcctaaacttcttccattgtgagattaaaaaacaaaacaaaacaaaacaaagcaaactggctgaaagtggttagtactaacacggatggctacctggagtctgtacaaaatgagcttgctggcgtcacagcttgaatctttccccatgtttcacactgactccctccaaaatttgcacatgcgacccatgaagggacatgaagaggtaactgcgaacgccagaggattttccagatggcttctttccttccaccaatcacctactaatcccagaatccaccccctaaacgttttctaataaaaatactgtcttaaagccaacacagggagacagattagagctatactcctgtctccttgttagctgactcacaatgaaaacttttctcaaaaaatcagcgccataatattggcttctgtgcgtatagggcaacaagccccgtttgtttggtaacaagattaggatgccattacaaagtgctgtttctctttctttccccagatttgagatttccaggcgctttccctgtccctgtatctgttcatcttctgcatcattctcttctccatatccacaccattcttccatctttcccatttctttcttaactgtaaaacagaatgcatgattcaaaatatttgtagttctctgttacttaaagtgaaagttatctttaaaaaaaaacaaacccaaccaaaccaaacgatgcaaatcaggtagtttgtagtgatatttatgtgaggttggatttgattttaaggttgagaaaaagtttttccaaatttgatttacacagttgtgggatgaagggtaagcaatcggagaaaatgtgagaattgcctatattaatacacatccacacacccaggcctgcacagactcgttggtcctggagagtaaacgcattcctcccaaacccagcagcgcctggcaggacagaggcgggcggggacctggctcagggggcggctgcctcgccaggcgccacgaagccccggcgtcccacaggtcccggaggccgctgcgtcgcggggagctgggctcgggccgccggcggttgcgccggggcagccccgcggggagagcaccatgaggactgactcgggggctcggctggaggagggccacctggtgagcggcgaggggcgcgtcggcctcgagaggtggcgggtaaacagctacacttggcagtgggggtgggtgtgtgtgggggggcgccaacgagctgggaatcactaagggagggccttgctcgtggggtgcgcgcatccgcccctccagtgttcacaggaatgggacggagacgcaggcgaggccgggaccgaactcccggagtgggagagagaggcctggcatgaagtttgcggggacctgagcccgcgttgccacgacgacgcctcactcatctgaggcccggggcccggcgggtgccggggcttccagccaggcctctcctagactcctccgaggagaggtctgtagctgcccagaagagatctgttcgcctgcggagtcctttaattaaggtcttccgtcacgccccgcttcccgcaaacaaatcaccgccaccacttaggaaaccacgggaaagctgtgattgcagcgccacggtcgccagatttctgctcctgggcacattacccccaactccgaggccccctttttggcagggctagtctggactggccaatccaggtccctgcacgcctctcaccgcaacatccccgcagggcgctgcgcgcggggtactagccaggcggcgcggcccgatgacgcattgcgcctgcgcgcgcgaccgagccgggaggggtggggcgccaggtgcttgggggccggcggccgccgaggccggctaaacgcagaatggggaagaatcctgtggtaagcgagccttagctacttttaattgttaggatttttgtcttcagttgagccgtcctacttttgaggattagaggttgggtctctgggtgggtggaacgtcatttttgcgggacttttgaaatcag

SEQ ID NO: 8642 - DNA, 6000 bp, Homo sapiens
ccgccggcggggcgggggcgcgcagccggaatgttttgattgctggcgcgcgcagacgggggcgcgcgcgggcgccggggccgcgcgcgaggttgtccgctgttgggagctgccagcccttggcctggggccgggcgaccctggggcgaggtggactccggtccacggtcgccgcggctgggtgtggggaggcaagccaacccacccgggctatcagctgtaaggctgactcgatccctgcaacatccgcaggaacccctgagcccaggcccagccggccggggctccacgggccctggtccacactgaccctgtgagtggtgacttccctgaggggcagggctctcactagcccagggaatcccaccggggccaggctgggccaagatccacggcccccaggggctgcacggacaggtgagtaccacctcgaccatgcctggcttacaggacctagggaacccacaaattcacctaggatcgggggtctacactgacccagtcaaggtttcccatccagaaggtttgctcaccggctggatctttggtgctagggaagtaagagaaggggttgaccagaaaggtcctcttcaggaaagactcttgaggttttgtggaccctgagaagtatgtcatttctgaggctaaggtagggcaatggagaaatagtccagaggcgcccctggcctcaggtctgtacccactcattctccatggggtccctaagttacttcttgagaccctggagttggaagagtggcccggtttagcacagccagaggaagtgctcgtagtcctgggctggaagggtgcttcttccccactgcagccttcctgccccatgcttggcctcctcttggtggggtgtggatggctgggagggttgggttcctttttatccccactgcccactctctggggcctgacatcttctcctccagcagctgcagagcatcgagggctggagaggagcacatactgtccatggagctggtagggccatgtgcttttctcaaacatttgtttgtgaagtgcttccaaactgttagtctcttgggagaccagggttcccaggatgggcgggggagggactcttctgtccgttaaatagaagatgaaacagcccccaacaaagggacagattctggctttgggccaggaaagcagcagtagacacccagactggccagagttaaggctcccccagccctgagcttactgcctttcttgtgtcactactcctctgcctctgagccaaggaggctggtagtggacaaagcccaagggtactttctccttttggcagtaggcagggcagcccatgggcagcagctggaactgaatcagggtctcttcttcctccttattggcaggtggtcaaggtggacagggggcggtggtgatggcgcagtttgacactgaataccagcgcctagaggcctcctatagtgattcacccccaggggaggaggacctgttggtgcacgtcgccgaggggagcaagtgtgagttcttggatatgacagccatagggagagttgatggaagaacatggagagagcaaggggcttgtgttctcccagggctctgacatctctgttcctatcccacagcaccttggcaccatattgaaaaccttgacctcttcttctctcgaatatcctttgtgtttctgagttggagctctgggacctttaatgtctctctaagccggggctctggtgggaggtgggggtaggtttgactctaatacctggaaacgggaatggagctcatcctgaggctgaaagaggctggtgaaatcatcgttaagtaatgatagcccacatttaccaagatctgtgtgcctgtgtccactttgtggtgttaatttgtagaagcctttctaagggtgagcctccttttttttttgtttgagatggagtctgtctctgttgctgctagagtccaggggcgatctcaacacactgcaacctccacctcctgggttcaagagattctcctgcctcagtctcccacgtagctgggattacaggcacctgccacgatgcccagctattttttgtatttttcatagagacagggtttcaccatgtggcaaggctggtctcgaactcctgacctcaagtgatccacctgccttgccctcccaaagtgttaggattacaggcgtgagccaccacacccagccgagcctcctttttgatgggatgtaaataatcgtaataagtaacgtcttttgactcattctgtgtcagctctgtgttaaatgctttacatgcattatcttagacctaatactcctatgagacaagtgttatttattcctaatgtaccaccatggacagacaaaagtttagacaggttaagtaacttggtaaagtcacacagctagaaagtcacagagccaggacttaagcttgagtgtgttgacaccaaagtctgtgctcttacctgctttctttactgactactttttcttaacaattacacgtttataatctgcaccagaagaatggcttcacatgtatgctcatcggggagatctttgagctcatgtaagtataagaagggacagatgatgtggtgaaagaatacatcttagtctttcctctccttgcactcacacttggcccaacctgccagtacaactcagtcctaggctaaaactccgtaaacctttgtagttcagggactgggtgtggcaccaaaacttacagcttcacctttctttttttttgagatggagtgagtctcactctgtcgcccaggcaggagtgcagtggtcttggctcggtgcaacctctgcctcccaggttcaagtgattctcctgcctcagcctccttagtagctgggactacaggcatgtgccaccatgcccggctaattttttttgtatttttagtagagatgggatttcaccaagttggccaggctggtctcgaactcctgacctcgggttatctgcccgcctcaacctcccgaagtgccgggattataggcatgagccaccacgcccggccaagctttcttacaagaaaagctttccaagccttatctcttccatgaaaagaacccaagccttggttgggcacggcagctcacacctgtaatcccagcactttaggaggctctaaaaatacaaaaattagctgggtgtggtggcacacgcctgtaatcccagctacttgggaggctgaggcacaagaatcgcttcaacctgggaggtggaggttgcagtgagccgagattgtgccgctgcactccagcctggctgacagagtgagactctctcaaaaaaaaaaagaatgcaggccttgaccttgatcatctcaacgctccaatggaacgtacattgttcagtcaggaggtctcagagatgccagccacagagaaaagcctctgttctgccttgcctgttccatggcctgctcctaggcagagagcctcctgggagagagaagccatatagcattgccgaaggggaaggggttaggaagccctccctcaatcagaaaactcccccaagggcttttaactacaacctcaaaaggaaatcagagactggagatcagagacccacaggatgaaaccttcgagagtccagtagtggtggctgaggttaccatgaggtgaggaaagtaggctgcagctgtggcagctgaggctaagagcaaagagtgggcctgagacagtcctgtggggctgaggagcagagagggcccactgggagttctccaggcccttccagttcccagtcttgttctgccacctccagactctcctcttcccactgggtttcactggagcctctctggctctcagactgcaccccttcttcccaactccccaggcagttcctctttgtggttgccttcactaccttcctggtcagctgcgtggactatgacatcctatttgccaacaagatggtgaaccacagtcttcaccctactgaacccgtcaaggtcactctgccagacgcctttttgcctgctcaagtctgtagtgccaggtaagggctgcaagtcaagaggacaccatagccttgagttctgctagcaggtgggtaatagagtggagtctgaggcagcaactcatactccagaactgactcaggcttggtctagcaaaaatacttcaggatagcagcgtctctgccaagactccttcctcgagggccacctctcctccccttctttttccccaccaggattcaggaaaatggctcccttatcaccatcctggtcattgctggtgtcttctggatccaccggcttatcaagttcatctataacatttgctgctactgggagatccactccttctacctgcacgctctgcgcatccctatggtaagactgggaagttgggcagttagcccatagtctaagacgtattgggaggtgtgggtgtattcctgggcatcagttatccttatctgtcattgacaaatcaggaactgtctcttaagctcacaacccctgaatctcacttctaatatagggcaaaggggtcgaggcaacaaccccaccttccgtaccttgtctcttccccaccccaccccgcagtctgcccttccgtattgcacgtggcaagaagtgcaggcccggatcgtgcagacgcagaaggagcaccagatctgcatccacaaacgtgagctgacagaactggacatctaccaccgcatcctccgtttccagaactacatggtggcactggttaacaaatccctcctgcctctgcgcttccgcctgcctggcctcggggaagctgtcttcttcacccgtggtctcaagtacaactttgagctgatcctcttctggggacctggctctctgtttctcaatgaatggagcctcaaggccgagtacaaacgtggggggcaacggctagagctggcccagcgcctcagcaaccgcatcctgtggattggcatcgctaacttcctgctgtgccccctcatcctcatatggcaaatcctctatgccttcttcagctatgctgaggtgctgaagcgggagccgggggccctgggagcacgctgctggtcactctatggccgctgctacctccgccacttcaacgagctggagcacgagctgcagtcccgcctcaaccgtggctacaagcccgcctccaagtacatgaattgcttcttgtcacctcttttgacactgctggccaagaatggagccttcttcgctggctccatcctggctgtgcttattgccctcaccatttatgacgaagatgtgttggctgtggaacatgtgctgaccaccgtcacactcctgggggtcaccgtgaccgtgtgcaggtgggccagggccacaggcgggagcaagccggctagcattcctgggaaaggcatacatctcaccatgatcctgatcccactaggtcctttatcccggaccagcacatggtgttctgccctgagcagctgctccgcgtgatcctcgctcacatccactacatgcctgaccactggcagggtaatgcccaccgctcgcagacccgggacgagtttgcccagctcttccagtacaaggcagtgagtggagttggagttagggcctgctagagactggctggtagctcggtggtgagggctgggctccctcctgctcgcttgtgaccttggtcccgcccttttaggtgttcattttggaagagttgctgagccccattgtcacacccctcatcctcatcttctgcctgcgcccacgggccctggagattatagacttcttccgaaacttcaccgtggaggtcgttggtgtgggagatacctgctcctttgctcagatggatgttcgccagcatggtcatccccaggtactgggagaggagggagccaggtggcctgggatgatgctggaacatacagtgtctttgggaaaaccgcaaaaagacacctctcctgagtcacacaaaggcagtcctataccaggggcacactgcttgggagcctgggctggatttcagccctaatt

SEQ ID NO: 8643 - DNA, 6000 bp, Homo sapiens
ggaagaagatttctcttcaaggaatattcctatcacccccactgctggagcctcaccttcccatatcttgctagagtaagaggtggaaccctagagatgggctattcacatttggactctctggagaagcccagaggagccttctaagaagaagtcactggaaaaggccagcttccatcttcttaggaccagttcctctcactggcattgtctgagtgctacagagccaagaactctggaatcctcagccaggataatattccactcacccaattcctcattcaacaagtatttattgagtacttactatgtagcaggcatagttttaggtatttggaatgtatcgggaataaaacaaagatctctgcttactggagtttctgtttgggggataaggggaggaaacacgctataaaagttagaaaatacatagtgtcttagaagatgataaatagcatataatattatagcaggataaagtgatcaaaatggtgaggtagaaagctacagtattaaatgaggaaatcaggtggttaaggtggacattattgagactatgaaatctgaacagactttttaaggaggtgggggagtttgtcagaagattatctaggggaagagtatttcaggcagaccaaacagttaggacaaaagcacaattctgaagagcaccatggaggccaggggactgtagaagactgatggagaggaagagtagaaggtgaggtcaggtaggtaatgggggaagggatgtggatcactttagggcctcataggggaatgtatggacattagctttactctgagtaaagaaggaaactattacaagatttggagcttgggggcacatgatctgacttacacttgacaagcatcacttttgctgctgtagtgagactagaatagatggagtcaagagttggtgagggggaccactaaaaaccaccacaataggttgctctgtctatggagtgccattcttttgtttcttcacttctctaataaactgctttcactttactaaaacaaacaaacaaaaactaccacaataactcagataagagatgaatgtggatggggccaaggtgattgcagggaaggaatgaaggatgagagaattctgcatttatttttaaggtagtcagcattatttcgtgaaatattggatatggttataaagagaggagtcaaagtttttttgggtttattttgtttgttgattgttgttgttgttgtttgagacagagtcttgctgtgtcacccaggctggagtgcagtgatgcaatctcttgctcactggaacctccacctcccaggttcaagtgattctcctgcctcagcctcccgagtagctgacattacatgtgcgcgccaccatgcctggctaatttttgtatttttaatagagacagggtttcaccatgttgtccaggctggtcttgagctcctaacctcaagtgatccatctgcctgggcctcccaaagtactgggattacaggtgtgagcaaccgcgctcagccaggagtcaaaggttttatttactgaataactgaatcagtggagatgtcactaattataatgtggaaacttgcaaatggttcaacttggtgggggtgttcagctttgaatatgttgagtttaagatgtctactcaagtgaagcaggaagttgagtacatgagactggattctgagagacagagttctcacctggagatataaatttggaattctttggcatatagatggtaattacacccatgaggtggatgagataaccaaaagattgagtgtctattaagaagaccaaggatcaagtcctagataattcttctattaaaaggaccaggccaggtatagtggctcacacctataatcccaatactttaggaggctggggcaggcaggtcacgagctcaggagttcgagaccagcctgaccaacatggtgaaaccttgtctctacaaaaaatacaaaaattagccaggcatggtggcgagcacctgtaatcccagctactcaggaggctgaggcaggagaatcacttgaacctgagaggcagaggttgtggtgagccgagatcgcaccactgcactccagcctgggtgatagagcgagactccatctcaaaaaaaaaaaaaaatgaggaccaggataaagagaggaaccatcaacttcctctcagggagactgagaaggggaagccagtggagtaggattaaaaacaacagtgttcagtgtcccagaagccaggagaaagtgtatcaaggaggaggagtgaccaacagtgtcaaatgatgattacgggataagtaaaataagatatgaaaattgaccactagatttggacatgcagacaaagctgctcttgatgagagcagctttggtagaatagttgggaataaaatcctgaataaagtggattaagagggaatagaaagaaaggaattggatacagtcagtatagacaactttttctagaagtcttgctgcaaagatatggagtgatccctagagaagaaagtgggatcaagcagtatttttcttaagatggaagaaattgcatattgtttgcatgggaataatgtgaataattcagtagagaacaaaggaaattatgtaggaaagaagagagaattgcaaggagaatgttcctgaataggtgagaggggatgaaatctagtgctcagaggaactggctttaaataggaacacagacagctcatctaatgtgaataagcaaggaggcaggtgtggatgttggtagataccagaatacaagttaagagcagcacagattttaaatccagaactagagaagaaaaaatgagggtgaaaagtgggaaattattcctttagaataagtgactgaactttcctgagagcagagtttttttgggggaaagagtcaaacaggagagctgtctatgaataagatgatgatgataatggtgatgatgatgatgatgacgacaatgaagatgatgatacatgtttaaaacatgtggattatgctttagagttttctaagcactttgatttccctgatcacacttgatcttcacaacagccccctgaaatatgtatcgtttccactttacaaacagagaaagttgaggttcagggtcaacacaaagaataataacaatagtaataataattatggtaatagcatttgttaaaagttcactacatgacaggcactattctaaccgtttgatatgtatatgtgttattttaatgataataacaatcctaggaggtataaatccccattttattgatgagggaattgaggcttggagaggttcagcaacttgcccaaggttacataattcatcagtagcaaaggcaggattcaaacccaggtggtctggctccaatagctgtacctgagggtgggaagaagacagctcagatcacccactgagtttgtccctctactctgacaaaccccatgagctgcagggcagagggtacagttctgatccccagtggtccccgttactggatccccagactcctgaaccaacttacgctgtcctctttcctgacaggattgtcctggcacgatgacctcacccagtatgtgatctctcaggagatggagcgcatccccaggcttcgccccccagagccccgtccaagggacaggtaggcagcctttctctacaactctagcaatggtgaggctgatgaatctgtggttgtcctaattgatggagagaaggggaaggaagtgggcaccaaggccagcatgctggggcacaggtaaagaggtgcaggaatggtcactctctgacatgctcacatgaccaagaggagctgagctcatctctagggatccagaaaaacgggcattttttgaatgttttgaaaaacattgacattggctactttaaaagaagcatcaatgtagtcatcatgggagaaattagaatgctgttggactgaagttgttcaatattccatttcattactatgtgaatttctatatgacaggagccaccatcatctttttgtggttagggcctctaaaggcatcattcagactgcaaagcagaggaaagtaaatgaggtttagggagctcagatgatgataccaggatgaagatggcatagtggtggggggtggaggagcagtcctgaatatttggacatatacttggagagccaggtgtggggacatggcacacaggggcaacggggacagctgcagccacagttcatctagagaaattcctggttgccttcccctgctcctgtttgccccttctccatccccagcctcatgattacccagcctttgcagttgtttcagagactcagccatgctcaccagggaggcagatacctctgccctcagcttggccctctggtccctccccattcccacccagcccatctctcttcccctgaggtcactcagtttctaaagaggtcaggcctgctcttaaccgctgagcctgcctggccccgaatagttctgccttgcaggctctctatgccctttcccccgctccaacacacacactttgctttcctctacaggtctggcttggcacccaagagacctggtcctgctggagagctgcttttacaggacatccccactggctccgcccctgctgcccagcatcggcttccacaaccaccagtgggcaaaggtggagctggggccagctcctctctgtcccctctgcaggctgagctgctcccgcctctcttggagcacctgctgctgcccccacagcctccccacccttcactgagttacgaacctgccttgctgcagccctacctgttccaccaggtaagtccttgactctggtcccaccccaaccgcagtccctcagcccggacttctgctcttacccagatctctggttttccacagtttggctcccgtgatggctccagggtctcagagggctccccagggatggtcagtgtcggccccctgcccaaggctgaagcccctgccctcttcagcagaactgcctccaagggcatatttggggaccaccctggccactcctacggggaccttccagggccttcacctgcccagctttttcaagactctgggctgctctatctggcccaggagttgccagcacccagcagggccagggtgccaaggctgccagagcaagggagcagcagccgggcagaggactccccagagggctatgagaaggaaggactaggggatcgtggagagaagcctgcttccccagctgtgcagccaggtaacaaggtcctcagcatccacctccctgtgagggctgctttgggggaaccatggtggggcccttccctgacaatctatgcgtttgttaacttgtccttaaagtcattcatacatttaaggaatgtctactgacaagctgttctatgccaggcactagggaagtggtggggagtggagttgacgtgactctccttccagtggagagtcaagatgtcctgaagtttgatctgggtcccaggaagaactttcccccaaagtgtggacaagggctgggaaagggagggcatctcttggtgtcctggtgtctgggaagactctcttaacatgctagtcccttcccaccctcactcactcatctgcatccctcaagttcactgcgcaatcagccctaagctctgtgtctggctcccagcagatgcggctctgcagaggctggccgctgtgctggcgggctatggggtagagctgcgtcagctgacccctgagcagctctccacactcctgaccctgctgcagctactgcccaagggtgcaggaagaaatccgggtaagtgtccaggcagagggagggaccaatatctcccggctccatggaggcctcttgccctgcctcgagaccacttggagtagcctggagaggaagagtcaggcttcaggggaaagagttcctttgagacatagggtcattgccagcaaggcagggagcaagggggtagggtggcaagcttaggagttagatcaggaaa

SEQ ID NO: 8644 - DNA, 6000 bp, Homo sapiens
gggtgggtttctgtttcatttactattctactgaagttacctcattctcttctccctcttgctccttagaggtcagcagatcattagttagcccagctgcgggtccctcaccctaattaggaagacctttccctgagtaaaagaaggcagcccacctaactcaaaaatgcattgcagggaagtttctagaatggttcctgcccaattctccctttctggatatgtgaattagaaaacgagtctgaggcaccgtggtgagggatggatgcttagccctctaggagtccacaatagtgtgggattgtctcatttggcacaagagatgcatcctgtcattcactggaaaaccttaaaaaaaaaaaaaaacactgggttttccaaatatgttaaaactttcaaaggacggcagcacgtcgtttcattcacacatttagttttgcctctactgctcacttcctcccaatctggatggctatttatataacacagaggtgggagtaaaaaaaaaaaaaaaattagggaaggaagttcctctggcctagacaaaaacctgtttctcagctgcaccaactaacctctgcagagcccgcagagccagctagagggagcaggtactgttcttatggttatctacttagttattcttccaagctcacagagccatttctgggttttggcctaaaagaaaaaaaaatcatagtttaccatttacttttgggaggggaacactcaagagaggagatgcacatgtagagaaactagttgtttgttctctcgggaacgttttgcaccgggaggcaatgtgcagttcttaagaaacttggaacacgtgaatccaagtaaatgacagaataggtaaatgaaggcagtcatattttaagtatcttgggagttgccaaagcctcatgttgtgacagaagttttaaagtgattctgttttttcccttatttcaagagaagaaagccagaaacgaagatggtgctaattgctctgttctggggtctgagacaagacacatgttagcctgcctcggactgttgtcatgtctggcggtttgtttttcccatttctagctcagcgacccttccctctatgatgaagtgcattgaagagaacaatggtgtggacaagaggatcagcaggtttattctccccatcggggccaccgtgaacatggacggagcagccatcttccagtgtgtggccgcggtgttcattgcgcaactcaacaacgtagagctcaacgcaggacagattttcaccattctgtaagttcctcattctttccctggctcaaaactgaaggcttttcttgtgatttcctttgaaaaaccaatctcaccacaacttggtgtctcgctcataaaatgaggacagtggggattcattacttgaagagcgtgtgttgactctcaagggcgtagccagcagagcctatggtggggcggtttttagtttccagccacattgcagctgcatggtctgcatttctctgtgtccactccacgctctatgttaatggctggccctgctctgccatcccttagagtgactgccacagcgtccagtgttggagcagcaggcgtgccagctggaggggtcctcaccattgccattatcctggaggccattgggctgcctactcatgacctgcctctgatcctggctgtggactggattgtgtaagtaacaagtcctgagaacaccaaaaagagtctgcactgagttccctaggagcttagcactgctgggcctgggccatgcagagaaacttcagacacactccagccttgtgaaggaggctacagtggagctaaaagggcaagatttagagctaggaaaaattaaacaatatgagagtcacatgcccccaaacatccaggaatgaccatgagatgtcattaccaagaacttgcttatagcatccagtaaagcaggggtccacagctgaggccctcagcgcaggcccaagggacacgagggtctatggagttgctgactgcataggagtaataagtcgatggagcagtgatcctttgggaatgattgtccctggcctggaagattctaaggagtgatttctgtgaggggagggaggatgaaccatgctgatgtgagtgacttgggcttgggctcagcagaggaggaggtagggaagaaggtgtgatccagaccacatctctggggctgctgtgaagacacaaaacagtttctgtgcatggattccttgagtcacatgataccttttgcaggcatgaataatatctattttatagggaaggctgcctgaggtactaaagttgagacagtagagcctgtgggtaagaaaatgagccctggagcccaggtgcctggattgaaatcccagatttgccatctagtagttgtgtaatgtgcactgtgtgtgctttggtctgctcatctgtaaaatgggaatgatcatagcacccacaccagggttgtggggaagattgagcgagttagcacgggaacagcacacagaataatgagcacgtggtaaaacattcaattcatgtcagcaaagaaagacactccagaccaggttcgtcacaggcagggcctggcactgggctcacggactggcctgctgcaggtgggaatggtggtttttccaacttgaaggggcttctcagagcaatgagggtaaaatctgcaaaagagacctgcattgcgcagacacctcatcagagggaactccgtccctgagctggccagctggacaggaccagagctgacagaggccccctctccttcctcacccagccacctcctgtgcgtggagaagaggcatcaaagaggtgcttggccaggaacagggaaacagggcaccaagccggctgcccagtggagacctgaagtcacacaggcctgccagccaccccatcccctctgattctgcagacagcaggacggcactctgcagggagtcagctccccagtgccctcagggaagatcacatttttccctctcttcaaaatgtgcacaatacttcctctgagctccagggacaggggaatggtattggctaatctataacacaacaagctagcttctggaaaggatagtgatattttctttgagatggtatttatatttgccgatggcaatggaacacatatgaagattaacatccgcagtaaagtagcgttgaaatgagaaaaagaagggaaactcccacagtgtattattcagtggaagaaaagctagacacaaaaccgtatccacactattatcccaatatgtttgtttatttgtttacttattagagtcagggtcttactctgtggtccaggctagagtgcaatggcatcatcatagctcactgaagctttgaactcctggactcaagcaatccccccacctcagcctcctgagtagctaggattacaggcacactctaccatgcccagctaatttgtttattttttgtagagataggatctcactatgttgcccaggctggtctcaaactcctggccttaaacagtcctcccacctcagcctcccaaattgctgggattacagacatgagccactgtgcctggcttatgtgtgatttttaattatggtgtctaatacatataaaatacgtgtatagaaaggtgactggaaggaaatagattaaaatgggcatacagattcactcagttggggactaggggtgagtggcttgtttgcttctttatgctcttttttattctttctataaaaataaaaagtgtttaaagaaaatcaatttagaataaggtaaagccaatgccttagaagcatgctctccaggaagcaacagggcccctcacaatcatgactttccttcggcatccaggctgcctgtgacaggacccgatcgcccagcagtagatataatagctgcctcttcttttcccaccagggaccggaccaccacggtggtgaatgtggaaggggatgccctgggtgcaggcattctccaccacctgaatcagaaggcaacaaagaaaggcgagcaggaacttgctgaggtgaaagtggaagccatccccaactgcaagtctgaggaggagacatcgcccctggtgacacaccagaaccccgctggccccgtggccagtgccccagaactggaatccaaggagtcggttctgtgatggggctgggctttgggcttgcctgccagcagtgatgtcccaccctgttcacccagccgccagtcatggacacagggcactgcccttgccaacttttaccctcccaagcaatgctttggcccagtcgctggcctgaggcttacctctcggcactggcattgggctccccagccggaactggttaccaaggacaaggacactctgacattcggcttgatccatgtccaggtgcaactgtgtgtacaccagggatctgtttggaaacaaccccttgagctgccaggctcaagaaatcatggactcacagggtcctgtgtggttacatcttggaaaaaatgcagatgtatttcactctccccggtcagctctgcatcaggtgttttctgagcaaaccaagggggtttatagtcatctgtcgcattgcctcgagttgcagtaattgaaaaaatgctcaaattcttagccatggctggcctttgctgagctgggactcaggtgtttaaagagtttgtgctatagctaggtgtggatagcttctgatccctgggttctgggagactgcaggtgccgcacattgtcaagttagaaatactccaggtgggtgttagcactgtggtggtctctggtccacagccttaggtaaacaacttagattctgaggtcaaagaaaaaaggagagggaatgcagccttgtgggggagaagcggggcagagggttctctaatctaatcaggacaggacaggtttcacatacaattgtcccagttcgcatcccagccctggggcacttttctgcttccttccagaggcctgggcctctgataacactttggctttttctccattcacgctgatttggcaaaaggccagagatgggcctccttccctggggaggtgtgatgtagttatcacattcaggacccttgttgatttatcatctattatttgaattcaactggacactctgtaaaatgctgcactgcagcaaaaacaaaaccaccaccaccccagagaaaaccatgtactaattggagtggggtacccccattcacaggttcccaggtcccctggctttggctgatttcaaaatatagagccctttcttgccagtacatccaagtttaaaattatcagcgaaatggtccatgtttttccaattacctgctgacacggttctaagctaagtgaaggggaagatctgagagcgtgctgtttgtggctgttgatgcatattcgtgatgtaacaggtcctggggcctcactttaccccatttgtaaaatggggctaatgtcacctgcctcttacctacctcagagggatttggtgaagcaaactgttaatcttcgaaaacgaccatttcacttcttggatatcaagtgctaacccagtatgttcttcttttttatgtaagggacagctttctccacagagtcctttctgctggtgaggacagcatttctgagcagggctttgttctctatgtgcattaggacttttatcatgcccttgttctgtgtgtagttacttgacagcatcaaatgccgcctcttcctaatgtccttcaagttttcatgaactagcaaccccaccttccaccatggttctgggcgcctgattttgctgtgactcccagacccagccactgtttctgccaccctgtaacaggccattaaagctccccagtgttcagcctccttcactcccttgttttccctgttgctatgtgtcacctgggccctacagacaggggcacacgcttatggatgtgtgtaccattgagatgagaatgggtagatggaacggagaccatcaagccacacccccttcttaaaactggggacatgagcct

SEQ ID NO: 8645 - DNA, 6000 bp, Homo sapiens
aaggttggagaaactgccctcaggtctgccctcttataatggtggagtggggaatttgaactcagctctggttccaaagattctgctcttttcatgacatttggccataaatgtctgaggaaatggaaaatcaccactggattaccagaagccagttgcccagggcttggattcatcaaatccccagatgctctgcttcctcaatctgatgctcatgttttgatctttccactgttcttcaatcctctctccttcaagaggaagtacttatgtgtcagattttttcaaaatgttcccacttgttttccattttagtttcttaactgagagggataggaaaagggcagaaggaaattaacagctgtagagaacttactttggaaccagacattatccctttttcccatataatattatttcatttaaaaatcataacaatgctgcaaaataaatattcctattccaatgttacagatgaagaaactgaagctcagataacctgcccaagaccacacagccctaagggggaaagcagggttagaacccactttttccttgactctagagcccatgatttttcctacctctattttcttaggaagctaaaaataatcaaaaccaccattcagtgagttcgtactatgtgccaggtactgtgcaaatcatttcacataatcatctccttgaatcctcacaggtgccatttgatgtagaaatcattaccccttttatagaagtagatactaaaagttcagagagattcaccaacttgtccaaggccacacagcacagtgagtagtgatcccgaatagactcaagtctttctaatgcccacgatgtgaatgcccactgtgttctactaaacaatgcaggcaggccaggaagtagctccatttcagagaggaagacactgaggactgaaaacgtgaactggcttgacagaggcaagaccagaatccatgtggcctgatctgaatacaccgtggatgggcaggggagcactttgcctcttactaccaggtagagaccacctccagaaatcattactgcccaacggatgaagtaccatcgtcctgagaagctggagaattgacacaggctgcaaggaacatctccccttccacacttgcacaggactctacctctgagcaccacgacagttttcccactcgcttctgcagaatatggtgataaaattacaagaagaagtctggatggctggaagattgtagcccttgaagccagtaacactgtaaaggaagaaactattcctgtgccttctcatattgtggcttcttcagggaatttccaccgaccacaactggtgaatttagcaccagccctcgagcaaaagtatgaagcaaaggtccagcaaggctcctgggtctttgcttgccttttcaaaagtgtttcaggcagtgaaacaggaacccgcataaaagctgggttcagataacaccgagatgggtcagcagctttgaatcccaacactcggcctggttaccgtgatgccagctcctcctcccagctatccccacttggtgtgcaactgagggtggtgcctgaaaccaaggacactgtctgaaaaggagagcccacagctgctggcaccaagccatctccatctaggagaatttccctcgaataaatatttaagccgacatcaggcttcctgttaaggagagtgagtcagcacatagagctttctgcatgtttgatcaacaataaacaacaagcattgagcaaacacaactatgtttgcaaggatttctcgcaagctgtggcatgaccatccttgttatcagggaaactgtgagatcaacggaaccgaggaatcaatctattccatggtatatataaatttattttatttatgaaaaccagatcctgtgctgatttgtcccttccactcatgggaagcaatgtaatcccctaatctggcccaggccctaacaaagctgtgataaaaggtgaaatctgtcttccaggcttgcctcccagctactcttccaagaccccaacaggaactgcaaagggttttcctgtgatcagaattcatgtcacattcccaaagtcctggaaagtgtctgccttattgaactaatcccttttccagggctagcagatggggaggcacatttcagcagcagcagctcttctcataaatcaggcttgttggtcactggaggcaacctccttcccttccttcgccccatctgaatcctgtccaaaggcacccttcagtcttcccatctctacaaagcctgccctgctctctcctcttccatgagctctccctgccttggactccagtggcaccaattttttgaagctcttgcttggcatgtggatctgttccatgcctctgccattcctcctggtcacatgctaagttgtgcaatcccaaagactgccctatgtgtcatatttcccatgatatgcagccctgtgctttgcatatttattaattataaagcaacccagagtaccatagagcttttgtgacccagggaagacctacactgcacaacaagagggcagtctgtggctccgtttcttgtaaaatcccctcagcctctcccctcccctctcttccaagattgcatctgtaaaacatggcattctgggcaccattcacattagcaggcttggatacgaaacataaatagaatcaattgtaatttctgtagtgggcagagaatcttttttcaaaaaaatcttttgcctcagcagtcattaattagactcagattttgcagacactcagaccaggcatttctcctacactattatttctattcagcttattaaaaagtccaaattgaacaagaattcccagagcttgaacaggctacaaagattgcagaggggcatgttcagttaatcctcagatcattcctattcttcctgcagcccctcctcctatattgaggaatctgctgagacccactataaaagcaacagcagaattttagaacgaaatcagctcccaagaaaggccactcacttttccagtctgctcatcttactaaataaaccacattttgaagttcccagctctctgagcttttctcctgcagacatgagaagaaagtggtttagtggggaaacaaatgaatttcctacttttagaaccttgtttatcctacactcctttggatcggattctcattgagtgtgaaactaacagagtagcatctatttaagtgagtggggtgccctccctcagacaaaaactttggcatgttttaagaataagctttattgtttaagatacacaaactgcttcaaaatgtgttttgttgcatgtaagcgtggtataatgtatttggtatagtgtattagtgtacataaaatcatatatgaatcccagaaatacgtgtgtataatattccatatttgtatttgtaaagttttttttttttttttttttttagagatggggtcttgctatgttgcccaggctggtctcaaactcctggccccaagcaattctctcaccttcacctcccaaaatgctggacttacaggcatgagccactgcacgtggccatattccatttttatttaaagtcagattctatagaactgacatggatctggggtaatgtccatggttaacaatatgtgtgcctattaaagtgtggagaatttagttagaaaaggcaacttttttttttttttttttttttgaggcagagtctcgctctgttgcccaggctggagtgcagtggcgctatctcggctcactgcaagctctgcctcccaggttcacaccattctcctgccccagcctcccgagtagctgggactacaggcgcctgccaccacacctggctaattttttgtatttttagtagagacggggcaactttttaaacattttattaattagagattaaatcatttcaaaattcatggggacaacattgacagtcctgaagatgtgtttgagccagttgtgtgtcccaagctgcctggctatccccaggcttatccaatgtgctttctgccatcagctgtaataatgtttgtggcgcttctgtgggaggctgggccccacctgccaactacagttctctatgtttttcccaagaaaaggggttgaggcctttacaaagcggccgacctaatacaggggattatgatatgcctacaacatttttttttaaggtaagcaattttttaaaaatgaggtgttgaaattggcctcttgggaaggcagcaagtccccaaagatggtggtacttaatcagacgaggggagtattacaagatgcagcatatggacttgtattcagaagaccctgaggttacacttatagggggaaagggagattaatacataatatgctacaatgccagtttattaagacgtgcaggaagtgtgtcatttattcatttatttatccaatatttatttaatgcctactatgtgccaggctagtcattgtgaatataataagtaaaaacaaacccagtccttctccttgtagagtttataatctaagaagacagtgaccaaacaataaaaaaaaaacactgtaaattataaactaggataagttatctaaaggatggcagtttacattaaaatgtgcatggatatagagatatttcattggtcaaatcaccagcacttaggtggcagaactcatattggatttggagagtgacagagagagcaaggctaacttaaacgttcaggtttttgtcttagacaactgaacagatgtaaatggtcggtagatacttaaccatccttgacaccagcatacttcaaaccccatacatctttaaaccagaatttgccctttacaacaaataagacaccaaggaacatgctctgaaagactttctgaaatatgtgtgaaagcaaaagacacctataccatcaagggataaaagagattggtccattataaacacacaaaaaagttctccaacaggaaatggccaagtaaataaagattggttgtttattaaagcaagaagcagagcaagtagaaaaaagaaatgccgtgcctatgataagggagggattccttataactctgtgcagatattcacagttctgtaaagattcttgagaaatctctgcataaactgagaacttcatgacaaaggacattagatttttagaatttgaaaaaataaactcttctatacaacccggactggtccacagtggatttcactttaaatatatcaaacagctcctgtaacttggcaaagttcttgtacatccgctgcctctcttactcgtcctcccaccaataatccaatgagatgtacaaaagtcaacttaccagaaacaacacatgacaattatttagctctttatggatttcaaacatacttttccatctattttctctttgaaatctgtccaaaagttggcaggaaaatagcattaaccttggttcagcttttgtcagcaaatatgattaagcagaaggccaggggtgggcgatggggcgtaagcacatgtgaaccacggtccacgcccaaaagtagcagcagtagcaatagtaatgacaaaggaagagctaacagccactgttgtttgaatacatgccagacattctcttaagtgctttactgccaaggtcattttgaccactcttcttggtgccttattttcataaggtgctcatgctggctggtgacccaagggttattaactttctgtggatcgatcacatctgtctagttctgtctataagacaaaaaccttgtcagttttccttgatctcatgctctccctcaccgtccaatccaatatgaattttattacctaaatctgattgattttccaaacaaaatatctctgcgttcatgactgttattttatttaaccatcatacagccccttgaagttggtgtttttcttatcccattttacagcagaggaaactgagatttggaggtttaataacttgtccgagtccacatggccagtaagtgatgggacttggatttgaatataaacccattcaga

SEQ ID NO: 8646 - DNA, 6000 bp, Homo sapiens; identical to SEQ ID NO: 888

SEQ ID NO: 8647 - DNA, 6000 bp, Homo sapiens
ttttgttttaaattgttcccctttagagtctaaaaagtcttcttccacctaattctctttcctgtctttaaatttcagtaccacagttatcttttatatttgctgatatactgtggccctttggagtaccacaaaccatgtaatatctaaggttttcttgcctcttccccaagaaccagtttttgccctgctggccacagcccctgttgaaaatgcctgccctagaagtgtgtaattgagagctctgatgcctaggctgcattgatctctcaatctacaaaaaaaagcttcaaattaggaaataattattttaatgtattatattgacagtggatcagaagcatatagtaccctgtcataggattatcctgaagggtgttaaacaggcaataagatccaataccattactcctaaaatgacttagaaaaatagggattgagagatatttccttaacttaataaataacatcagtgcaagccaatagtcactaatattcttcatggtgaaatactatagaccttctcactaaagccaagagcaagacaaagatgcccatgtaaccactattactgagcacagtctagaagtgcctactaatgcaattgaaggaaaaaaacaaggtatgcttaccacaagggaaaaaagacatttttattattgtttcctgatcataccaatcccaagaaaattcccgggaaaaactagaattaattctgtataaattagtcagataataaattaacatttagaattaatgttctaaaatataagacttgtttagcaataaccagctagaaaacataataggaaacaaatgccatttgcaccagtaaatgtcttagaagtgtccataaaatatgttagaaaaactttgaaaatatgtggaatttataagagaggaaaaaactaaaaaaaccaaaaccctgaatattaatctcagaaaaactgaaatttaaagcatgcatccagccaggcgtggtggctcaagcctgtaattccagcactttggtaggccaaggtggacagatcacttgaggccaggtgtttgagaccagcctggccaagatgttgaaacaccatctctactaaaaatacaaaaattagctgggtgtggtggtgcacacctgtagttccagctgctcaagaggctgaggcatgagagtcacttgaacccaggaggagaaggttacagtgagccgagattgtgccactgcacttccagcctgagtgacagagcgagactgtgtctcatttttaaaaatggaattaaataatggatagagggataacagtttttaaaaaggaaggccgatgagcaccaagctaatgaaaagcatgttgattcaccgtgaattcaagaaatgtagatgaaaacttaagtgacattttcttctctcaaaaggcaatgtctaaccaaaaacacttgttatctggtggttttggggaaaatcgtgctcacatacactattggagagagggtagactgacacagcctcactaaagagagggggttagcttttaaaatatgtttctttaattcaatcttgcttctagattttaatacttcaggatgtgtacaaataaggctattcattaaaatattaatcataatagtgaaaaattaggaaattgtgttcatcaataggaaatagttaatcatagtgtatatgtattatggaatgctaagcagccatgacagagtctattttggaagacaaatcatgtgggcccaaattcccaatccacagtaattacaaaatagtaggcaaaaagaccccatttcaaaaactgcacatgttcacagagaagataaggaatgagacgcataaggttactaatggtggttttctctgggtggtgggtttagggtaattttcctttttctttgtgcatttctatatctaaaattttaattcaatagccatttattaatctagatagatcagaaaaaatcaattaatgttaagattaaaaatacattctttgcaggatcccagatacaattgatctgtaatgtcaccggccagttgagtgacattgcttactggaagtggaatgggtcagtaattgatgaagatgacccagtgctaggggaagactattacaggtatgtatgctaagagttattcacattttggtgttaaatcccacgtgatattttatataaccttgtcggttcagtttaaaagcaagtgttagttgctcctaacctttgctgcctttttttttttttttttttttttttgctaagctaagtagaatttataagatcttgtacatttaaggtaaaaaatacttgtcattgtggtgcaaattacagaccacttagaagcctttctcttacgttatacatgttgcaacatttcaacgaagcaattatctttcattattcttcatattcctcaagtagcttagaagagactcattaatgagctcaagaatcaggcaatccactgctctcgaaagcctctactggtttcctactgctcatctatgggacaaggatctcctggcttcccatgacctctccttcacaacacctgcaaagcactttgtcatctgccccaatctcctcttgtttagtgtctcctctgtgccccatggagaacacaatgcatttgtctacatttttcttcttggaagtggtaatttttttgctttctctgctactgagcctgttactgacagtggtcttggggttataaaatctcagattagtgttgccagcagtctgaatgttgtgactgtgattgggcagggtgattatttcagtggcaattttgtcacaaataaggaaatacacagggtatacaggtcttatttgtagttgatgcaattaacttacacaagtttatttactctctctctcgaatagtgtggaaaatcctgcaaacaaaagaaggagtaccctcatcacagtgcttaatatatcggaaattgaaagtagattttataaacatccatttacctgttttgccaagaatacacatggtatagatgcagcatatatccagttaatatatccaggtaaacaacaaactaattgaaatgcagttttgttttactgtagtaagattccatgactttgaagtttgaaatgccatttcctctgcttagaacacgcttcacttcctcattacttgggtaacttctatttctcttttactcttctgctgaactctctcttcttggaagcttttctgtcctgctgcctgcccttaacccagctctcggcccaaagagaggaggttagggcctctgtatgtacttctgtagcaccatatgtcacaggatctatggtacttcgttttctgtacttaactataaattctgtgatggtggcaaccatttatcttagtaatcattctatttccacagctaatggcaagttaggtctggtacattgtgggtacccaatgaactacattgatgatgcatagggtaagactaaatatccactttcaaagaggacatcagaagtcactgggtttcatgaattggtataataaaacataatattgaaagtatttgtgaaacattttaaggtaatttgtggtttaattaaacataggctattataattgcgtgcatggaagaatatctgaaagactctataaattaacttctatgtatgtttaaatactggcagcatacaaatagaaattacatttaaaagataacatttatggtagcatcaaaaatcatcaaatacttaagaataaatctagcaaaagctgttcaaaacctctgtaatacaaactaaaaaatattgagataaattagagaagaactaaatggaaggatatacaatgttcatagattgaaagactcgatattatgaagatatcagttcttccccaaatgaatctatggattccaaaaaatttcaatcaaaatctcagcagtatttgtacaagtgagagtcagtgtttgtatgggtgtgtttttgtggacacctgtaaaagtcatagggaactgtaaaggaccaagtatagtcatggtggtcttaaataagaaaaataaatctggaggattattactacagacatcatgatcttgtatgaagcgacagtacttaagaccgtaagtgtgaactatcatttgggccagctggatatttgtctggaaaatggtataacttgatttctgttttatatccaaatcatttaaattggaaaagtaaataaagcttttagattcccttttctggatgcttttacatggttcctgatatttagagggtactttctttttcttccctctttcttcttctctagccccctccccatcacctactccatctgctccccagcttcctctttaattattggataactaagtagagaaggaggccaggagaatgtggaaatgtgaaacttccctaagcctccaccttattcgctttccaccagtctttaactttacccaatggactctctgacctcagggaacttttgtaggcttttgagtgattttaacttttccctgttttactgtggaatgctctatcctgtggtcttcggtattatttcccatgttattgtatattatgctatttaggtagaaacttcatagaatgcaccttagttttatcattgctttgtacattagtatccattacaaagtgataataatgaatgagttaatattgtctgaatgcaggccattcccagatatgggctctctgagacgaagatatttaatttgctgtgctcaaagttttaattctttttggttctaatattttttctcctttttttttctttttgctatagtcactaatttccagaagcacatgattggtatatgtgtcacgttgacagtcataattgtgtgttctgttttcatctataaaatcttcaagattgacattgtgctttggtacagggattcctgctatgattttctcccaataaaaggtataattttgtattccatgcagtatttcttgttggagataagggatagttaggagatgtagaagatgactaagagggtttttactaagagggtttctaaaatgaaaagtggcatatacaagaatactagttattcttacacagaattatagttttagaactcattaggctgaatatcattgttttctaagttcctgcctcaacattcatattggtagaataaacaggtatttagagcatctgtttataaattcagttatgcacaagccattggtaggccttgctctgtgatgaataggacagacagagatcataccttaatgaaagaaatgaaatgactagatcttcatgcatcagggaggttctctctctcctttgtttaaactttgcgaaaaaaaaaaaaggaataccacaatatctaaaaaaaaatgaatggatagaattcagggctgagacctctggggaagaagatgaggacagggagactttaaggatggctctatactaagagtatacgaggcagcctccaaatagaagaacaaatttgcagtaaaacacaagaaatagaaaccttgtaagagatgaacactttttaaagggattatatttttggtattgctgcttcagtcatgccattgtataaaaaaagatgaatagttcattatgtaatgaatgtttgtgatactgactttatcaaatctcttatttttgccttgtggttctaaatacattatgtttttcctttagcttcagatggaaagacctatgacgcatatatactgtatccaaagactgttggggaagggtctacctctgactgtgatatttttgtgtttaaagtcttgcctgaggtcttggaaaaacagtgtggatataagctgttcatttatggaagggatgactacgttggggaaggtatgtgtgtaatggaacagagtaaaggcttattgttgtaaaactacttagtaaaatgtggattccatctttctagaagatcgtggcataggggtatatgtttcacaattttaagaacctcttcagaagtgtatgatgatttttacatttattaaatgcattta

SEQ ID NO: 8648 - DNA, 6000 bp, Homo sapiens; identical to SEQ ID NO: 898

SEQ ID NO: 8649 - DNA, 6000 bp, Homo sapiens
gacagtaatttcatgtatattttagtttgtgtgaccacatgatcaaaattgaaagcagaatttaaaatgaaaagatacatagtcaccatagaattgtagtttggggccgggcgcggtggctcatgcttgtaatcccagcactttgggaggccgaggtgggtggatcatgaggtcaggagttcaagaccagcctggccaagttggtgaaacctcatctctactaaaaactagaaaaactaaccaggtgcagtggcaggcgcctgtaatcccagctacttcggaggctgaggcaggagaatcacttgagcctggtaggcggaggttgcagtgagccaagatcgtgccactgtactccagcctgggcgacagagtgcgatgctgtctcaaaaaaaaaaaaaaaaagttcaaaaacaaaaaaagttttagttttgaagggacctcaatttgtttctaattttttttttttttttttttttgagacagagtctcgccctgtcactcaggttggagtgcagtggtgcgaacttgggtgactgcaaccactacctcccgggtttgagcgattctcctgcttcagcctcccgagtagctgggattacacatgtgcatcaccacgcccagctaatttttgtatttttagtagatacgtggtttcaccgtgttggtcagtctggtcttgaactcccaacctcaggtgatccacggacctcagcctcccaaagtgctgggattacaggcgtgagctgccgcgtctggccttgtgtctgatttttaaagattaatcattttggggtatgatagaatttccagtttataagtacaaacagtccctgacttcatggttcaaccttcagttatttgactttttgatgggtttataggtacataacctcattgtaagttgaggagcatctgtgatttcgtacataacaagcaaaataaagcaaaacaagcagaagtaactaagctattcctagatatcaactacagatcattataatatcttttatgggttttttttttttttttttaccttttttgtttttcagggatggggtcttgctgtgttgcccaggctggccttgtattcctgggctcagggtgttctcacacttcagtctcctgagtagctagagatcattataacatctgttagatttaaataggattgtatagtgctttacttcttttcgtttgtttttgtgacggagtttcgctcttgtcacccaggctggctggagtgcagtggcacgatcttggctcactgcaacctcgacctcctgggttcaagtgattctcctgcctcagcctcccaagtagctgggattatagaagcccaccaccacatccagctgatttttttaattttcagtggagacggggtttcaccatgttggccaggctggtcttgaactcgtgacctcaggtgctccacctgtctcagcctcccaaagtgctgggattacaggtgtgagccactgtgcctggccagtgctttacttctgtctttagtacaggctaatggtttggagcctactggcgtgcatatgacagtcagataatgactaatattactcattcttaaaccatgtgaacagtgttgctaggcaagtctttttttaaggtaagacttgtaagtgaaattaccactaaactttgtgtgtgagaaagacaaaactttttttttttttttttttttttttgagacaaagtctgactttgtcacccaggctggagtgcagtggcgcaatctcagctcactgcaacctccgccctgccaggttcaagtgattctcccacctcagcctcccgagtagctgggactacaggcgcccaccaccatgcccggctaatttttttttgtatttttagtagagatggggttttgccatgttgggcaggctggtctcgaactcctgacctcaagtgatctgcctgccacggcctcccaaagtgctgggattacaggcatgagccaccgtgcctggctgaaagacaaagcttttacaactattcttaaattatcaacttttgatagataatatccttgttttctgtatcttgctttgatactgctttcaaggagataatctcattaaagcattttactaaaggccagtatagtgaatgtaatcacttttacacagaattgtgtcagcatgacaaatgtgactactgagacatcattctgttaacattaaaataagtttgtaggtggtaatggaatatgtggcagttacgatcatgagctaggagagtggaacacttgctgtctttttcatagctagtcataggtccttagcgtgtagtgatctttattatcttccaaggtgaagaaaggaaaaggctcgtatgttgagaagcataggaacttgagtcccgcaggtgttcaagtgggctaggctggtgtgggttttcagatgatcattgagtttttctcccaaatttgtataggcactagcacagtaatcctgtgcacttaaatctggcagcagctgtcaggggtgatgggctggtatggggaacccctcagtccccagaggagggtttacacaatattgcagggggctgttgccctggggttttcaagatgcaccattttatctcctagtgctgggctttgacaaacttcctctgtggggtaccatcctcatctcggtgggatgtgcagttttctgtgcccttatcgtctggttctttgtatgtcccaggatgaagagaaaaattgaacgtaagtaataactaaacagcagaaaagtttaactactaatgttgtgtttattttttatttggccacctgtaaaaatctattagaagagattggcaaaataagagattttaaagggaaatttgaggatatgggtttgttgtccaaactgtttttagaaatggacttacatgacctaagacctgttcttaaaaatggacttacatgacctaagacctagtgataaagagtattcaacctatgctgtagagacaatctggggcattgaatttttttatgttccttgatcagttgccagtgacatgatagataaatagagaaatcatagcctacatttactgagaagtagaaggataccttaatgaaaaataaggggtagatacaagatattttcgtagaggaaatatttaccccaactgcttctgtgtataacttcagattcagacaagcaaagctaagtctaatgtgtacatgttgtatataggctagaatacatgtagacattgtattgcagtatacaatgcaaatacatatacaaacacacattgtgtgtctgctagaattgtagcacagattctagaagtaaacattttcaagtgtcaaggaatcatttaggccattaccacacactcatgtaattaaatactgagtaaattttggttagtatcggacttttttttccttaaaataatcattttctgcccttttcatcgatgtgaaggctgggttagcaagttgaagtttatcgtttcgaagctgagggatgcatagactgcagtggtgttaggaagaacgctgcgtcaccgcagctgaaccgaagagcctccgagaggttctgtgctagtctggctgtgccgagtgcacggtgggaaccaggctttcaggactctctggcctcattttccctctctgggaggagttgagacaagtcttgctttatgttagtcagtctgtagtttgactgaggtgcctggatggataggtcagcatactgagcactggcatgagagaggcagaagatactctggtctgcctgtgggatttacagccatgatgcacatctctttgttttatagaggtggaaattaaagttgtcgtctttagttccctgcattgagctgtgccactttgcttgaattggtggactgaaatttgagagaatcctcttttgaaaagaatagaattgggtacagttcagatttttagtttcagcttatcagccccatggttgagctactttcccctacagaatgagtcagcagggagctaagaagggttcttatatctgtaaagggttgtaaaaataaaaacaaaacaacaatgtgctacagaagcccgtaaaacctaaaatatttacagaaaaattttgggacccctgacatagggtgttctgcattgctggttgttcccaagtgagagttgctggcaaatgataaagcaggcaggaaaaatgttcctgaatgttaattgaagttcacatacattcttgttttgagatgagttttttgggggtggaggaaaggagacgtggaacaaagtagtatggccacaaccaaaccaaaaaagaccccccttttttttcctaggagaaataaagtgtagtccttctgaaagccccttaatggaaaaaaagaatagcttgaaagaagaccatgaagaaacaaagttgtctgttggtgatattgaaaacaagcatcctgtttctgaggtagggcctgccactgtgcccctccaggctgtggtggaggagagaacagtctcattcaaacttggagatttggaggaagctccagagagagagaggcttcccagcgtggacttgaaagaggaaaccagcatagatagcaccgtgaatggtgagttggaattcctggtttcacttttgttacctgcagtggtgaggaggcttattgttttggatttgatgctttttgtattgaatgtcaccttggtgatcttgactaggtgcagtgcagttgcctaatgggaaccttgtccagttcagtcaagccgtcagcaaccaaataaactccagtggccactaccagtatcacaccgtgcataaggattccggcctgtacaaagagctactccataaattacatcttgccaaggtgggagattgcatgggagactccggtgacaaacccttaaggcgcaataatagctatacttcctataccatggcaatatgtggcatgcctctggattcattccgtgccaaagaaggtgaacagaagggcgaagaaatggagaagctgacatggcctaatgcagactccaagaagcgaattcgaatggacagttacaccagttactgcaatgctgtgtctgaccttcactcagcatctgagatagacatgagtgtcaaggcagagatgggtctaggtgacagaaaaggaagtaatggctctctagaagaatggtatgaccaggataagcctgaagtctctctcctcttccagttcctgcagatccttacagcctgctttgggtcattcgcccatggtggcaatgacgtaaggtcagttgacattgatcttagtgttgctaaccctatttttaaaccatttatccttgtcacaggcctgtgcttgtggtagtggtactcctagcatttacaggaccccaaataatacaaataggatgaggtaatagcagttattgacataataagacagtacagttttattcttcagaggaattacaaagaatgtttatttttgtagatgataaatataaacagatactcttcacagagaaggcttttgtccatcaagatgagattcagttctttggtagtgaattgtgggatgtaagatgtaagatgaaaaacttaaaagtttttcatatagaatgattttgtagtttggtttgtaaactgtttattggaacctgagagttgctttaagctgcctataggaggaaagaggccaccatttgcctggcattccctccatcagagctgtgttcatttttctgttgtgtatgttggggttccatttatgtctttagaaagaaaggcccttttgccagatgagcttgaaagctgtactttagacaacctggtagatcattcagcagattgggtcttgccaagatctagttctgcctgaaaagtcacttctgccctctttgtttcttccagcaatgccattgggcctctggttgctttatatttggtttatgacacaggagatgtttcttcaaaagtggcaacaccaatatggcttctactctatggtggtgttggtatctgtgttggtctgtgg

SEQ ID NO: 8650 - DNA, 6000 bp, Homo sapiens
tacttcattaattaatttggacgataaattgaaaatgtagagcgagcacttcccactttctatgtgtttgtgtgtttggttggaatattatgggacataagtctggagaggtggctttcagacagtgaatcacacagtagttgatcatctaatgtaaaagcgagtttagaaatttgtgttctttttctcattaaacttacattttattgctacttgagaattcataatactatatttgcttttttttcagaaagtccttcaagtgattactactgaaagaataagaaaatgtgagttttactttttgttgtattagtacagttacaacggttagtaggataaaataactttttttattcgtatagcagaatagttaaaagtatgcactcttatgtagtcaggcctgcctgctctgcctcctaccaatggctctggcctttgcagagctatatgtgcccagcaggggaaatcctcatagctcacattcaactctggtatttccccatatgcaagtgttattatgggtctgtatcctactcctgaataactcaggaaaagatattaggaaagccctgttgataacaagacacataggataaagaagttctgtcttatatttacctgaagtagctttgaaattaacttgtcacagtctatggaccattaaatataagcatgttggcatcttaaggttggatggcagagataggcatatatctctgcatatgaaaaataagcagcagtagggttatggctatcattagggttactcagaatgctattctgattttactgctacttgggtgcatgctgcacgtcactttcttgttacctaaacttgaatgtagccatgagagtggctttagccaatggaatgtaagtagaagtgttttgtgtctttgctgggcataagcctttaaataagagcatgatttttcatgtttctttccttctgccttgttgattgtgaaagcttgtattaagatggggcctttatcagcctggatccctaagattgaaagagcctcacgtgctcttcctcccgtgccaaccaggtattggcatgctgtataatgagaaagaaaccttcattattttaaaccactgggatttagagattacttataaatgtatttatttatttatttttattttttgagatagagtctccctctgtcattcaggctgtagtgcagtggcacaatctcagctcactgcaacctccgcctctggggttcaagcaactctcatgcctcagcctcccgaatagctgggattacaggtgtgcaccaccatgccaggctaatttttgtatttttttgtagagatggggtttgccatgttgcccaggctgttctcagactcctggcctcaagtgacccacttgtctcagcctctcaaaatgctgggattatcagtgtaggccactgcacccgaccttggaggttatttgttattgaaccataactttgcctatcctgactctgcaagtggtttccagaaaagatcaattcttgaagaccatgaagccacaattagaccagagacttccacttgagtgaatcccgggaacaatctgaagcatagaaggtgttacaagcaggggtcaatcatgaagaaagatgtggcaggcaggagttaggtgagggtcaagtcaaaaaagccaaccattagaaaccatattccagttctagtaggaaatgcaaatgactcagtggatgggtcatgagaagaccagaacacagatgataggtgttaagatgaggagatgatccctcaatggtcatggagggatttgaattttctacagtagatttcaaaaaaatcagggaaacagcccaatatcctttcagataccattcttattgactagaggcctgggcttgcctaactttgcaatctgtaggtcatcactgtgaccagctagttagggcttgggcagatgggacttgaaacaaagagacggaaattggtagtagaatccatctgacactttgacttttttttttttctaatgggatattttcattaaccccatcctaaatttctatttcccggatcaaatgatagctggtcaaggaacatcgtgggttatattttctgaaagcgttagccatcttaattttttttgtgggaaaggtggaagggactcactcctaacttttcccaaactgtttgacaacaacatatttttatacggttatcataagtgttgattacatttgaaattggtcctttggactaaattgtctaaattttctagttcagtatgatttactgtatagtgtttcttcagcagatctaaaccttaaaaaaaactacttccatgtgacaaaccgtgatgcaattttgcagctgttttcattctaaacatattgagcccaatatatcccaattagaagaaatgtatatgaattatccttattaagcggtatttgtaattctctagcacttgtctaaatttctttggtctctattttcttctagttgtacattccaattggctacattaagatacagcagattttacaaaataatgaacaatttatacatgttttaaatagaaatgtttaaaaattactatggttttcatttccttgattcatgaaatgataatataacagaaagggaaaacaaaatccaaaatgagatttgggtcatatgttttgctctgaacacttgatttttctttggaacttggagtttgatataatgtggagcctggaaagggagcatatggtgtatacgaggcactcttttctcttactgtgatttttctctattttcaaaatgcaactttgggaaaagattttaggtggattctggccacctacctataaatggtagtgtcaatatctttcttggatcctgctgccatccaggtgggggtagaacctttttgaaaaattgtagaaaaggggtgaagtctcatgtgattatagttgtagaaatccagcaactcataccctctttgtggtaggcatataaatgctgtctctatcaatgtgcctggagagggttccttgaagtactagtggctccttccatcctgtacagttctttgatggggatgggatactctgaactcttggactgctctccctccctgggctccccagataatttagtttggaagtttcttagatacctagtacaaagtgctatctaagaaaggaattaagccaattctactggtatagaacattcatttattcagagattatcaaactgtaaaccacctgatgaaatgttcataggttttttcattgagtattttgtatgttttttacttcattactttcttctcttctctttattgtttcccccctataatttatttgagtttattttgccattctttttccaactctttgatatgaataattagcttattaattattaattttatgcttttctgcatttctggtataggtacttaattatatacattttcctttaaatattgatttagctgcatactgcaaattttctgtgttgttttcattattgttgaatacaaaatgtttaaacatttttaatatactctttttgtgatttatgaattattcaaagcaatgctattcaagcaaaatacaagataagccacaaattccagtcacatttgtgatttagaattgtaaacttcaaatcatgagatttgttggccctatggctgcctctggttgtgctcaatatgatgcctggatattgctacaccagattcttgcacacagccttttgcctggttcttattggctccatctcttttcccatgattctcctgatttctccaatactcttgccattaacttttgtggctgcaaacagtctgatcttacttctgtcacatccttacctccactttgctactcagaactataaccttctgaaacttagccatcctcaaacatgtgcagactactttgtcagaatgtttagatcccttttctgttttacaagagaaaatatgtgtttataattatgtataaattaatttcaccaaacattaatttatttcatttcacattaaagtttatctgtaatattttaggctgttcataaaagcctcctgaatgtagttcgttagttcaatcttataaacctagcatttcattagtaggatacatttctgatgaataaatactgttggttttcaacatcaaacactttgcaacaaaagttggaaaagagtgtcctgcatttactcaagactactggatcttatttccaaccaggatatatttattctagttagtgttgatgtgacaatggggactggtgactcggaaaacttaatttacaaatatttataatttattttgcctaaaatgacattagggacagagaggtgaccatttggggagttagactggcatgagctaactaccagtttgtcccaggcattcaaaaaatacggcttcaaggaaagcaatggtcaaaaataaaggttgaaaataaaaacattgtctagctttggtgcgatatccaaaaactacaataactattgtatttgaaaactttttaaatataccttaagctttctgccaccttacagaaaggacagtctcttggctggctgttatggctaaattttaaaaatatccatagggaatatcagtccttcaacctatagatataaaacccccaaattctgaaactgccaacagtctttttttttttttttccacagcatttacttgtgttttgattgcaagaagtacccaggaaggaataaaatttagtaacagaatgaggatgttatgatttttttttaaactgggttaggggtggggagagggagagagagagagagaaatattttgcactggaaaaactataatctggagagacagaggagttgagagtgcccctttaaactgcaggactgcaattgatctctgtatgttttctggttttcgtccctttgaaaggggaatgagagccaggatcattggctgtactgtggagctgtcacatctccatactgaaaaggtacactgcaagtgaatttaaaccgtttttggctttctattgcatattgccaagagctttgagactgatgaaccaagtaaatgctctatttagggctaagtgagatacagattcctccaatctgatagcgtttcagcctccggagtgaggaagcagcagaaacagaagcagcagaagcaacagcagtagcagcggcagcagcaacagcagcagcccctactgaagtccaatagaggagacttgatctctagttcattctggaactccgcctgggattgtgcactgtccagggtcctgaaacatgaaccaaactgccagcgtgtcccatcacatcaagtgtcaaccctcaaaaacaatcaaggtaggatctggtttttccctctgcttctgcacatgtgtcttcattcatctacctaacacatgggcattgatatatcggggtactgacagtggacatacctacttgatttgagtttgaattgaaggttgagtcacaataaagcatttggctctgcatgtgtgtgtagactggaaagaatagtttccactgaacacttctttcatcttcatgactttttttttttttactgagaatctatcagaggtatatttccagaagaaagttttgtgagtgtctagaagagtttccagtccatgccaattttcttgatagaactggggaagaatttgcaaactgctagaaataaatagcatcaaattgactacaaatctgataacaggatttcattgtcatatgaattttggatctcttatccttttttaaaaaaagctcatccttcattgtgagcattgaactggtggttatactaaagtgattatagtgagagaggatgaaagactagagagagagtataaaatcacatgtctttatttatatcaccatgtaactcaaaaccagtgagatgattggagacactcttcaatgcaggtgttgtttaaaatttgaggcttttctgacagcacatggttaaaggtaaagaacaaact

SEQ ID NO: 8651 - DNA, 6000 bp, Homo sapiens
agatacgccgattcacctaaggggcacatctttgggatgggaaggaactgaactatcccaagaaaaccatgcaaacatggaaaaaaccttcacactccacacaggcggtgccccagaggggaatccattcttttcttcttatcaatgttataatgaaactacattaaatgaaacagtgttatttgaggacctcctgtacttcctccatataaaatattttctccttataatcatgcattgtatttctagtcttgtttttaaattatatgtattgaatcccaagtgctatgtaatactcctaagtatttttagtaattgcctattatcatattgggtgatgtattattaaaccttccagtattggctgtttttttcctctctttttttttgctattgtagatacttctttgaacatctttaatcattttcctttttgttcttattgaatatgcattagaatatgtttctttttttttcttttttttttttgagatggagtttcactcttgttgcccaggctgttgtgcaatgtcatgatcttggctcactgcaacctctgcctcctgggttcaagagattctcctgcttcagcctcccaagtagcatgtgccaccacacctggctaactttgtatttttagtagagatggtttcaccctgttggccaggctggtctcaaactcatgacctcaggtgatccatctgccttgacctcccaaagtgctgggattacaggtgtgagccaccgtgcctggcctagaatctagttctttttttctcccccccaactagactctatctctatatgcaggcaggccccaactcaggatggtttgacttaatgattttttgactttccgatggtgcgaaaacaatgtacatttagtagaaaccgtacttcaggtactcctacccccattctgtttttcactttcagtatagtactcattcagttacatgagatcttcaacacttgattataataggctttgtgttagttgattttcccagctgcagactaatgttagtgctctgagcagttgaaggtaggctatgctaagctatgatgttcggtaggttaggcgtattaaatgcattttgactatgatgttttcaacttatgatgggtttattgggaggtaaccccattgtaagttgaggagcatctctgttaacatgtcagaaggcatagacatttttgacggttttttgggatatgatttaaaaatgtaaacgttttcaaacataaaaaatagggatgatggtataatgaactatcatatgtccatcactggcttcagcagttaaccatatcatgtctaatcttttatctctacctcagcctcctttctctacctctggattagtttaagggacatcccagatttttaatcatttcatctgttaatattacattaaatctggatagcattttgccaagttgatcccagaatggtttaccaacttataatgccactagcagttactgatgcagtggtttatctgtgatcccataaagatggcctgttgtgctctaaaagttttgatagcttcagtaggtctcaagtggaatcatcgagttgctttagtttatatcaccttttatgaataattttcctttgcacatttttctgttgggatcccatgggatggagagttttaagccctagccttgccacatgagagccagcctctttctcagcttccagcccacagaatagggctgttgccgctgtttcttactgtatagagagcacagatattgcagacgtggttgtttagggcacttctggaaatgagtccatccttgcccttggctctcgtcagtagagtagaagtagcactctcacaggcagtactcggaatgcttgccgcccacataaggggctgagtcagtaggcattatggccagcctgcctcagagtggtgaccaggcagcccccagacttgcttgctgtggaagggtcaaatgggtttgtggtcgatacacagcagcttgtgttgacaaccagatgggtgctttgccacctccatgccatcctgtctgccagggtctcactgcctagagctagtccacaagaaccctcctagtcatgcacagagctggttaaggctctctcttcagtgtgattgggaccagtggttggtcagccaattgagaaagtacagagtactgtagacgtattgtaaacattgtgctgtgatttaacccgctagtgggtgttcgttcggctctcctataatgtggggttgaggtgtttgctttgagttggctcctttggttggagtcttctatttctgtcttgtagagaccatcctcatgacacgtcattgcactgcagtttccaggggtaagtccaagagcagacttctagatttggggactatagtcctcccatcctcccatcttttatagttttcttaattccctgatttgatggtaatttgtaaaagtaaccttcctttatttagtttttcctgtagtatcttagttgccatagaaactgtgtctgcctttttctcattcacattttgaccatttatgtaatattagttaaattaggcaattataataagtgtgacctggaagcatccacagctgactctggcaaggactgagctcaatgcaggagcagagctcagcaggagccacaagagagtggcctggtcctgcagccaggggacctcagcatgacttgcaggggcatcagaatgtagattttccatgggaccttttcattaggtcagctcacaagttctattgtgttacatttggctagttggagttaacattactgagcattttaaaatgtcagggctgtgaaagtaaatgccgtaattccctagttttgaaatttaaacattgcaaaaataatcacttgcttccagtactgttacctgtaccagatcagcccttagatttacgatggtttcattgtactactctgtgccttttgagttttgtcattcatcatcctctgttgtatttgaggcattagtgggtataaatgcatactgtagccagagtgcctgggtttgtgtgcccttactgtccttaactgctgtgtgcctcagtttgcccatctgcaaaatagggataaaagtgcactcagttgagtaagagcattccaatgtatgtagtgctgtaagtggctggaaatgttcacctttgttaccactgcgggtttcacttctgctcttcatccacatgtgcacatcactagtgactagttttttttcttttctttttttgtgtgtttgagacagagttgcactctgttgcccagactggattgcagtgacaggatctcaactcactgcagcccccgcctcccaggttcaagcaattttcatgcctcagtatgggattacaggcatgcgccactacccctggctaatttttttttggtaattttttaagagacagggtttcactgtgttggccaggctggtctaaaacttccggcctcaagtgatccacctgcctcagcctcccaaagtgctggcattacaggtgtgagccatcaagcctggccagccagcctttgaaccattaaaggaatagaggatcaaggaggaaagttaacgctattaatacctgagcagtttgaaagctacttagctactaggcattatagctgtgaagcatggaagagagcaaacagtatatttccagttgtaaattttaatcttgcaaattaaatactaaatttgtctgtggtttgtttttttgaagttttcacctctaacataaatatttattttttctctataaagacatgcagtaaaaaagagtaggccgggccgggcgtggtggctcatgcctgtaatctcagcactttgggaggccgacgcgggtggattacgaggtcaggagatcgagaccatcctggctaacacggtgaaaccccgtctctactaaaaatacaaaaaattagccaggcgtggtggtgggcgcctatagtcccagttactcaggaaactgaggtgggagaatagcttgaacctgggcggtggaagttgcagtgagctgagatcatgccactgcactccagcctggggacagagcaagactccttctcaaaaaaaaaaaaaagttatatgtgcagatttaaggcttaatttaaaaattggtttgcgtgcatactaagaagctcatttgctttaagtgagcatttcctttttgggcttttgttgggcactgtgtgtctcccatgttccccatttgtctgccacccaataagcatggtgtcgagggctgaagtagaaatcagaggctagaatctgaaagcttcattagggttctgctttttgcagattagggactttggcccttagtgagctgaggatcttggtttcctcccagtgtgcggtttcagggatgtcggccacatgatgtgcctgttgtggaggagggctgggtcgccagtgtgacaggagacagcagatcccttttgtgaaaggagaactggtactttgcgtgatgttaaacttcacaaaccgctgctcagaaatctgctattttccttctcttttaggactttatggacagcagcctgctaaccaagtcatcattcgagagcgctatcgagacaacgacagcgacctggcactgggcatgctggcaggagcagccacgggcatggccttagggtctctattttgggtcttctaggggcctcaaggtcttgatgtgcatagcttctgataaccctgtgtgcaataatatgatttgcagggcatttctgtttgtgacaaaagtttttaataatagttttaatcattcctttgaaagtagtgatgtcataattgtactaatccacataagtaccacagagaagggtttgaactgtgctattttgttcaaatgttgactctccgggggcactggctcattccaagactgttcttgtgcaactctcagaataccttatttgagcatacctgttttgaaaggcattttctttttagagttaggtgtagtgcttaagggttaatttattttcatgttatgccagtaatatagtgttgtatgcctattgagtgattgtggcaagaaaagctacagcttctttgcgtttaactttttcaaaccacagaccagaactggttgcatgttactttaggagttgtgggttggtaagctcccaggtacttcccgaggctatggtgtgagagcccccgtcctgccctctggggctccacaggcccctggcaaggccgatggctcaggatgatggggcacagcccgcctttgaacaatcatgcttcagaaatctgcctgaccctagctgctgctgctgctcactttattcttgtatggctttggtaggcatacttggagaacatatcccacattaggaattgatttaagcctgagagtttgagggctttaatcctttaaaacttggagaagctggctgggcgcggtggctcacgcctgtaatcccagcactttgagagaccgaggcgggcggatcacgaggtcaggagatcgagaccatcctggctaacacggtgaaaccccatctctactaaaaatacaaaaaattagctgggcgtggtggcaggcgcctgtggtcccagctactcgggaggctgaggcaggagaatagtgtgaacccaggaggcggagcttgcagtgagccaagatagtgccactgcacttcagcctgggtgacagagtgagactctgtctcaaaaaaaaaaaaaaaatcctggagaagccagaacaatatacaaacaagtatgtggaggcagatttgctttattccaagaggctgtttgagtgtgtgtctgcctaagcctccttatagcctatttttctacttgctgagagagtaatattaaaggaacagtgagggagtggaaggagagccttagttagagcgttcccatttctggcctttgggggtttgcactgtgcgggagatgctctctcatcactctgaaggcccatcctgtgcagaagtgggactctgtggctgttcactgagcacca

SEQ ID NO: 8652 - DNA, 6000 bp, Homo sapiens
ccctgacaaaaaaaatcaatggggagagaattccctattcaataaatagtgttgggataaatggctagccatatgcagaagattgaaaccccttgcttaccctatatgcaaaaattaactcatgatgaattaaagacttaaatgtaaaacccaaaactataaaaaccctggaagacaacctagacactaccattcaggacataggcatgggcaaagatttcattacaaagacaccaggagcaattacaacaaaagcaaaaattgacaaatgggatctaattaaacgaaagagcttctgcacaacaaaagaaactatcaacagagtaaacagacaacctacagaatgggagaaatttttttttaaattttattattattatactttaagttttagggtacatgtgcacaacatgccggtttgttacatatgtatacatgtgctatgttggtgtgctgcacccattaactcgtcatctacattaggtatatctcctaatgctatccctcccccctccccccaccccacaacaggccccagtgtgtgttgtcccccttcctgtgtccatgtgttctcattgttcagttcccacctatgagtgagaacatgcggtgtttggttttttgtccttgcgatagtttgctgagaatgatggtttccagcttcatccatgtccctacaaaggacatgaactcatcattttttatggctgcatagtattccatggtgtatatgtgccgcattttcttaatccagtctatcattgttggacatttgagttggttccaagtttttgctattgtgaatagtgctgcaataaacatatgcgtgcatgtgtctttatagcagcatgatttataatcctttgggtatatacccagtaatggaatggctgggtcaaatggtatttctagttctagatccctaaggaatcaccacactgacttccacaatggttgaactagtttacagtcccaccaacagtgtaaaactgttcctatttctccacatcctctccagcacctgttgtttcctgactttttaatgatcaccattctaactggtgtgagatggtatctcattgtggttttgatttgcatttctctgatggccagtgatgatgagcattttttcatgtgtcttttggctgcataaatgtcttcttttgagaagtgtctgttcatatccttcacccactgtttgatggggttgtttgtttttttcttgtaaatttgtttgagttcattgtagattctggatattagccctttgtcagatgagcaggttgcaaaaattttctcagaatgggagaaattttttgcaaactacacatctgacaaaggtctaatatctagcatctataaggaacctagataagtttacaaggagaaaacaaccccattaaacagtgggcaaaggacatgaacagacacttctcaaaagaagacatacatgcgaccaacaaacatttgaaaaaaagctcaacatcactgaccatgaaagaaatgcaaatcaaaaccacaatgagatgccatctcacatcagtcagaatgtctattattaaaaagtcaaaaatattaataacagatggtggtgaggttgtggagaaaaaggaatgcttatacattgttggtgggagtgtaaaatagttcaaccatgtggaatacagtgtggcaattcctcaaaaacctaaagacagaaataccatttgacccagcaatcccattactggttttattcccaaaggaatataagtcattctgttataaagatacatgcacgtatatgttcattgcagcaccgttcacaatagtaaagacatggaatcaacctaaatgcccatcactgatagactggataaagaaaatatggtacatatccatcacagagtactatgcagccataaaaagaacgagatcatgccctttgcaagaacatggatagagctggaggccattatccttagcaaactaatgcagaaacagaaaaacaaataccacatgttctcacttataagtgggagctaaatgatgagaacacatgaacacatagaggggaacaacacacactggggcctatcatagggtggaggatgggaggagggagagaatcaggaaaaataactaatggatactaggcttaataccgggatgataaaataatctgtaaacaaattcccatgacacaagtttatctacataacaaacctgcacacgtacccctgaacttaaaataaatgtatataaaaaaaaggaaggtcacagttcccttatgaaagaaaaattatacatgtatatatatgtagagagagagagaaagaaatatcacagagaataaaagattaaatggatgtattctaaattgtaatcgtgattaattgtaacaatatggattctgaagtaagacagatctaagtctgaataagttaatttgatcagttatttaacccttctgagtctgttttctctgctataaattggagccgaaacaacagcatggggttgtcgtgctaattaaatgagataatacttgcagagtagtacttggcaaacaaaattaaagattgttagtattactctgatttgataaataaggagtactttttcttctttttgtttatttcccatttttgttagatgagactgaatcatttcacttggtaaaaaaaaaaactaactaaaaagaatagtacagaacatttcctgggattattgaccctggagattttgtttaaataagcctccatacagatggacagagccaaaaccacagtgctacagctctaattcagcaaggaaaggctctccttcctttgagaggagttggaaaaacaggtccccctgcacagggaaaactcagaaggaagttccaggaggaagttctcctggtacattgtgaagatacaagaacagagttcatgtgggacatttacttaacaaatgcttggtatcacacagagtgccactgatagctggaaaattaacctgtgttaggccagatctacttcactacaggccattttctacagccaatcgacttcaacagggtagttataatgatatgtcctttatttttggaagtttcattaacattaccattcccaggatgtgatgtgtaagggaagaaaaacttctttcctcattcgttgccaggttcatggctaaggccccatgacaaaaatcaaattaacaagagaaaagcatacaagtttatttaataaatgttttacgtgacacaggagacttcataaataaagatctggagatccaggtaaacctgtgtgtttttatgctaggaagagtggatagttgtgcagaagtatgattagctagagcggctatgagctaatggtaataaacagggagatttagcaaggcttgtttgttcagattcttctgtttttgtgtcttcagagataggctcatttctttcctccaggtacagggagggcaccactggaatgagtgtcttatgacctacttcaggggaaggtcagctacattttatgacctgcttcaagaaagaaggggcaagggtgaacgtgacatactgcttctgccatttccttaaatgctaagattccatattttggggtaatgtgtcccaaaccccatcaattttgcactccaattagtttataggcagtttgccttcaaactaataatttacatttaaaaataaacaactaccataaagtcaagtttacgttcttgtagtcgagtaggacagtaacatgatattcagaaaagcacaaagggggatggtctttcacaaatttcagtaaacataacagtgtcaataaagcttgcaaactaaatgaatccagtgtatctagagaataaagatatttaggtgtaaaaccatcaactgttccagatattgcaagcttgttgagggccaagttagtgtcctatattatttatatttccaaaaacacctggcaaagtattttgcacaagacatacctgggacctgattggttttgttgattactatccaaaatacttgtgttgacatttgcgaggtagtattgccttgcaaatacaggctcaactccataaccacaaggagagcatttgaagcattttaaaaaatagcaatgaggtatctacttttttaacaccgtatggcaaaggaacagtgaacatttgaatgggtattcagcagtgtaaaacgctgacagcaaaactataccttccattgagttggcagctcattcttaagaagatattcatcccggcacaggtatcggacctgaagttaatctcagtgtatccccctcttcctctacaatgcagtttttaactctaactcaggagaatgtttaagtcaggagaattttaaaaaatatcaaaatcagtcttttaaatttcttttaaaaatatgtgcatatttataaaatattctgtataaataataaagtgtggtcatgttttttttttttttggagacggagtctctctttgtcacccaggctggaatgcagtggcgctatctcggctcactgcaagctccgcctccagggttcacgccattctcctgcctcagcctcccaggtagctgggactacaggcgcccgccaccacgcctggctaattttatattttcagtagagacggggtttcatcgtgttagccaggatggtctccatctcctgacctcgtgatccccccgcctcggcctcccaaagtgctgcgattacaggcatgagccaccgcgcctggcccggtcatgttatattttaagtttttataattgaatacttaaaacatacataaaagtagacagaatagtatcatgaatgcccatgtacatatcgccagccccaccaacaacccataggtcatcctgccctgtccacacctttacccattccttacagtcctgtattattttgaaataaatcccagatattatatatttcattcattaatacttaggttaattaggtaattgacctaaaatataaaaactcttttataaataaccatattatcatcatatctgaaaaattaataattccttaattatcaaatatccattatttaaatttataattgtgtcataaatattgtcataaatagatttgctgttttaaagcttgttccttcattttctctgttttgttttagataaacattgtcataaatagatttgttgttttaaagcttgttccttcattttctctgattgttttgttttagattcagaggttacttatgcttgtttgttacatggatgttacatgtgtaatgggggatattggacttctagtgtactcatcacccatatactgaacactgtactcaaaaggtaatttttcaaccctcatccccctccaacctccccccttttggagtctgcagcgtctattatgtccacctgtgtccatgtgtacccatggcttagctgccacttataggtgagaacgtgccgtattccctctccattttgtgtgtgtaatttatttctattgaataaatcaatttgtttgtatttcagattcccctgctggtttgatgattagagaatagttgcacttgtttcctttattctctgttttccctgtgaattggtcattggatataaaggccccattcaattcaggattttttgttttggggttttttggtgggggaaaggcaggatattttcttgctttcattgtgtcagatcctatcattttcagtgcagtttttaaaagctaacttttctattttctcttacctcatccttgcctttgttttgcccacaccttctatctgcaagtaacccatattaaaaacagagtgcataccctttcatatttttctccatattcacataggtatctttacatatgtacacagagtttgctttacaaaaatgaggtcatggaaagccttccaagtcaaatagtagagctcgagtttgttctatttagtggctgcaaaataatattccactgtgcatatgtaccacaatttattcagttatctcactactagtgggcacttgctttg

SEQ ID NO: 8653 - DNA, 6000 bp, Homo sapiens
tttcacaatatatgaataatgttattagaaccagacagagagatgtgctccaaagtaccaaattaaaaccactttttataccttgtttagagtttacccataataaagttctaagataaagaaattatataatctcagcaaattcttaggacagtagccacttggttggtttaatttttcgtaacagtcttaagttttcgttcattacttacaacatctctgacatataaataaaggccaacatctggcctttatttgtttatgaaatgaaatatttaatatgctgtttctactttcttttctatccagctcttaataaagcatgtatttagaaatagagtccaaaattaaacgttaaccccagtaaatgttttagatttttataatcaaagtcatcacaacttcgttagtaatgtgacttcttatggcatattttgtttttacacattgaagccctagatcattctaaataatgttgggttgcaaattccataatccataatgagctattagaaaaaagtcagtttcaagttgttgctaacgtaagagttcttaatttcttgacattcttttacatagaagaaaatttaaatgttggtgaaacctttgttgaatgttttatttatgttgattattaatattactcttatagggccataggatgcttaagctaacattaaatttttatttactaaggaatgtgatttctatgtgttcacagaataaagacaatgacactcttaaggatctgctgaaagcaaacgttgaaaagcctgtaaagatgcttatctatagcagcaaaacattggaactgcgagagacctcagtcacaccaagtaacctgtggggcggccagggcttattgggagtgagcattcgtttctgcagctttgatggggcaaatgaaaatgtttggcatgtgctggtacgtatcaactgtgaactgttactggaggttcatgaagcagtgtggaaagatgttttaacaatggttgtttctggcttaataagattgtaaggatattattaataggcaatttttgccaaaaatcagcgttcattgctttttaagtatggatcaatttttttttaagttgaggaagagaagcaaatgtacaagtttaagaactttttctaatgatttattcattataagatgtgttagagtagatagctacaaaaatattttaaatatttgttaaatattatgtaatttttatgctcagaagtttaaaatatattctgtagtttctgacatctgacacatctctagcaagacagaagtatacagatttaaaaaatcaacataattaaaaattggactataaaccttggaagattattttatatatattaattttagggtgtgtgtttatgtcattctaggaggtggaatcaaattctcctgcagcactggcaggtcttagaccacacagtgattatataattggagcagatacagtcatgaatgaggtaattcgtgtgtttattcatagtgagaactatataaaattttctcattgaggtttgagttgagaaagatatttgcatgctttgcatttagagttaaaatttcagtctttgctgatcaaaaataacttaagcctcagggtgttaaatggaacatctggtaggtgtcttattaggtatagctgtgaggaaaaacacatactgtgcggcaattgcacagattttatgtgtaatatacagaaatctttgcatacctgaagtctaaatcaaattctcattttcaattgttcattgatttcattttctcttcccctttttgttcagtgacagcattagctcagctatattacatccttttccttgtctcttagctagcggaagtatacattgctaaatcaaaaatgagagaaaaggctgggcacagtggctcatgcccataatctcagcactttgggaggccgagatgggagaattacttgagctcaggagttcgagaccagtctgggcagcatagtgagaccttgtctctacaacaaatacaaaaattagccaggcatggtggtgcatgcctatagtcccagctacctgggaggctgaggtggaaggatcacttgagcctgagaggttgaggctgcagtgaggcaaaatcatgccactgcactctagcccaggcaacagttagagagaccctgtctcaaaaaaagaagaaaaaaaaaagagtgagaaatgaggtgcccagacaaccaggtcttaataatgggaagtaaaagcagaatatgtagaactcgggtgtaaaagaattgtactaagagtgccaactagatcttaaggaactggccataaagccttgtatgtagtaagtaggctttgcttgaattaatatattgaattaaacctgcttgtgatttttatgtctggggcagggcccagaatctgtatttttttcttagatttctcaggtgattctgatagccaggtttgagacacactgttccaaagtatggtaacgtgaaacattttctcctgtgacacttttgcagtctgaagatctattcagccttatcgaaacacatgaagcaaaaccattgaaactgtatgtgtacaacacagacactgataactgtcgagaagtgattattacaccaaattctgcatggggtggagaaggcaggtaaggtcattttttagactaagttatgactgcttaaacataccagtcagatatgttgcagacattgattgtttttattttgaaagaaattactggtttattttaagactcctcttaaaaaaaagggaagagctagtctagaatattgaaaccaatttttttaaagtacatatctagggaacatagtatatatactatagtccttttctttactaacctaagagctaacagcatttctttttaattgagaaattattgcgcataagccataattatagaaaagcctagaatttggaaacattccacatgttttcaaaagttctaatcccatgctgggaaaaggataacttagttgctgcaggcaggaaaagcttccgtttgctcacagtatctttacccacactacctgagattctccagctgaatgtttcgccacaagtattctaacttgttgcagtttgagaaaagtaagatagatgtgtcatccaagagtctggcctatatggggcaatacttgatcaaattatcattgtccattgcccaggtttgtaaatgcccagaaataggatctattcgaggcattcaaaatttattcattacaagaggcacttcctcatataaactacatttgcagagaagctgctatatttgaatgacaaattttcagtttgcaatagaaaaataccccctctctagttagaagaatactcaggtcagattagtaccacaagagtgcctgctgagcatggaatcaaactggaggaagagattctgtggacagtgaagaccaacagcaaagaacatcacatattctttcatttttaattatgttaactaaatttggctacattctttggaagacattttttcttttgatgtgtttaatactgtcagttggccattgcattagctaggcccatacagaacattttcgtcagtctgcctctgaccatgcatttggtctttttgtgcttctgtttttattccttcctcagaggctgaccacatttcatttattaaatcttatttctcttaatttcattcttaggctgtctttaagtttgcccagggtcttgctgttgcctcaagtgcattgtctattaccacttaattactttgaccaataagcaccttgttttcaaatgtagctacctctgaaaggccataattgatcactataaattatttaatctttatttctctaaatcccagtccagtgagaattgcagggttttgtttgtttgtttggagacagcgtcttgctctctgggctggagcacaatcatagttcactgcagcctttaactcctgggctcaagctgtcctcccgcctcagcttcctgagtacctgggactacaggtgtacacactgtacttggctaatttagaaactcttttttagagatggggccttgctttgtttcccaggctagtcttgaactcttcgcttcaagcaatcttcccaccttggcctcccaaagtcctgagattataggtgtgatcttccatgcctggccgaattgcagttttgattgtgagggaagaagggaagaaggaacaaataattgtgagatgaagcatcattgtgcatatcagactggtaaaggaggagctaggcctggcatggtggctcacgcctgtagtactaccgctttgggaggctgaggcgggtggatcacttgaactcaggagttcagtaccagcctgggcaacctgaagaaccgttgtctctacaaaaaatacaaaaattagccagatgtggtggcatgcacctatagtcccagctactcaggaggctcaggcgggaggattgcttgagcccaggaggcagaggtcgcagtgagccaagatcatgccactgtgctacagcctgggcaacagaataataaattgtcttaataaataaataaataaataaataaataaaattaaaaaggctgaagttggctactgcctgctcacccagcttttggtggcagtggagataatagatgatgtggcaggagaagggcacagaggtattcatgcatggcctactctgaaattgtcaagttgtttgggaaataaaagacatcatgatggaaacataagttggaacctgattatggagagccttaaataccacggtcaggacttccgatatattttgagcagttgaggctgtgataattgtatcagtaaggggttttgggttcaaatggtaaaaactagctgtcaccatcataagcagataacatacttaatgatatggattagctcatataatcaaggaaacagctgaagaaccagatgtagaaaggacaggactcagaaaacctagggatttagataggaagaagtatttggcaatgtcatcagcattcattctactaaacccatttttgttttttctctgactcccaaggtttgcagccatgggcaagagaaattggcctggctttgaccatgagccattcccttggtttgggcagggcagacactctgattgacaatcctaccagcactgcacacaacagcagagaagtaattccccaaagggaggaaagagaaaggaatgttgagaagacatcagactagaaagaagcaatgtgatcacatcttactagaaaaatgcctctggtggcagtgggaggatgaaatagaagagatctgggttgaacatacatgactgatttgtgtcaggttctgaaagagaactatggaatgtgtaaatgatgtcatcatacagacgtgcttagagctcttcagtggaaaggctgtatcgatgtcatttgtttagcgagtaatcatcaaatgtctgccatgtgccggcagctatgaaggcagtaaacagacaaggtctctgcccttcaggaccttaacattttgttgggggagatagatagtaaataaatatgcagtgtgttggatggtgatgaattcttgaaaaataaaggagtaagggtgatatccacagtggagggcagggtgttgttttctgtggggtggtctgggagacctctgcttagatgacattatctaaaagaatagaaatttgtttgtttttatcttttaaaatctcaaagaagggagtgcatgttcagggcaacttgaatctatgctcttgggttacccgccccccccaaaaaaaacacctcaaagaaatacaagctgtgatagataacaacgttaagaaaaaaatgtttttatagcctaggatgtggcattggatatggttatttgcatcgaatacctacacgcccatttgaggaaggaaagaaaatttctcttccaggacaaatggctggtacacctattacacctcttaaagatgggtttacagaggtaagatcacgttcctacctgagtatatcataaag

SEQ ID NO: 8654 - DNA, 6000 bp, Homo sapiens
aggaatcaaatgatacctgtatattttcatacatatatatacatacacatacatatatgtattttcctaaatatatagatatatatccaagagaataaaaagaaacatgtttttgtaccacttttcatacttctaatgtttctttccataacatttgaacttcaacagttgtattatttttgcaaatatctttgaagttgtagaatatgttgctttgaaatgctgaaatagtgaattattctttgttaccttaacaatgtatttgattttgttaaaaagaaatggatgaatatacacacatacaattatgtgtgtatatactataaatgaagtagaataaacaatggtgtataaacacatatatgtatagcatagactaaggatgttctgtattgctaatgaatgtacttttcaacatggttttgatttatcattctgagaagtgtatgttggtgacgggagaactagaacatcctttttgcatattgtatcagttttaactcacaataatgcattttatgggatctgtgacacttgagagtaacctttgtgacataaagggatgcttccaggcactaattagccaattaattttattataaaagtcttgtgatttgaaaaaatatatatgtacattataattatatatgcatgtatgtatatatacacacacatatacatatatatattgttcttaccttttcagggaatgtgtggcagtagaagcgctgataacttgtcatgcccttctccattgaatgtaatggaaccagtaagcttctttcctcttaaatcactggggaagggaatgatacaacatttcagacacatagtttccctagtttagatgaaatatatgtttattttaaatacataatttgataaattattgttgattggaagtgactttcacctttgaaagtccattgctgtctgaagccactagaaagccacctgaattgcaatagtgatttatctttctgactaaaggaggtaatgcaccataaaaacatgtacagtggctcatgcctgtaatcccagcactttatttaaatggttgaggtggaaggattgcttcaagccaggagtttgagaccagcctagtcaacaaaatgagaccctttctctacagaaaatttaaaaatcagccaggcatggtgatatgtgcctgtagtcccagttactcaggaggctgaggcgggaggattgcttgaggccaggagctcaaggctacagtgagctatgattgtgccactgcactccagcctgggtgacagagcaagaccctgtctttaaaaaataataagccaggtgtggtggctcatgcctgtaatcccagcattttgggaggctgaggcaagtggatcacctgaggtcaggagttgaagaccagcctgaccaacatggtgaaaccgcatctctactaaaaatacaaaaattagctgggcatggtggcaggcatctgtaatcccagctacttgggaggctgaggcaggagacttgcttgaacccgggaggcggaggttgcagtgagccgagatcaagccattgcactccagcctgggtgacagagtgagactccatctcaaaaaaaaaaagaaaattgatttttaatttacatttcaggagacatgtgctttcacagtttgatcctggttctttaggtagttagagctgtaacatgaccacgtttttaacagaaatctgtctttattgtgttagacagattggttcatttgggggcaaaagcactatgagtaactatttttcactagttactcttccttacaagtgatttggacactttggtggtaacaagtaaaatttcatcctactatgtattctgtttacctgttttgttgcttcatctcaataggaatttaaattttacttaccatttttgcaaataaaattgagtagttattaaattaatggaatagatttatgtctttacaaattacatgattttaggcaataatgacaaccaggactttaacctttttagctaccaatcttaattccaagagagaagaataacatttttttatgatctccaggtcactgaactgatgcaggagcagtcatacctgaagtctgaattgggcctgggacttggagaaatgggatttgaaattcctcctggagaaagctcagaatctgttttttcccaagcaacatcagaatcatcttctgtatgttctggtccctctcatgctaacagaagaactggagtaccttctactgcctcagtgggcaaatccaaaaccccattagtggcaaggaagaaagtgttccgagcatcggtggctctaacgccaacagctccttctagaacaggctctgtgcagacacctccagatttggaaagttctgaggaagttgatgcagctgaaggagccccagaagttgtaggacctaaatctgaagtggaagaagggcatggaaaactcccatcaatgccagctgctgaggaaatgcataaaaatgtggagcaagatgagttgcagcaagtcatacgggaggtgggtaaaatctgtgtttcattcatttatttggaggtatatgttagaggagattttgtctgaatattaattatttacagaatgttcttttgattcactgtattcaataattttcacagagcttttaaattagctttcctgttgatcaagtttgtgtcaattaagatatatttgtaatggcatttctgcaaatttcatactctaatgtgaaataattacaattctctgtgttcagtatggtgaaaaagatatgtgaaggactcaaaataaacatgacgtactctttggacctcttgtttccacatctacaaaatgaggatttacagtttagatctcttcgaggattaaaaactgcattttatagctggacgtggtggcatgtgcctgtagtcccagctactcgggaggctggggtaggagaattgcttgaacctgggaggcggaggttgcagtgagccaagatcatgccattgcactccagcctgggcagcagagcaagactccatctcaaaaaaaaaagaaactgcattttataattacaattgataggagaaaatgattttgtgattttaataagtataaatagattgatttggtttggtgttttttattcaaaaatcaaaatatacgaagaaaagagggtttgccctaggtgatagcagcataagaacttgaagaattaccatagttatggatgaccaaaagaactgcaaaaggaaattacatatgattagtagtgaaagttcaaaagttgagaaaattagtaaaataaatgttttttgcactgagatcaggtaataggaaggaatagaatatatcgtttaaacagctcaatgcaattatctctgtttacctagtagtattctgtggattaaattgtacataagcaaatgtgaaatttgctgtatatgcagttctctagtatttcaatcatgttgaatcaaatcacattttcaaaacaagcattatagcagaagacttcatatctgtaatttattttcatgatatgactctaccaactaaatgtttaaaaggtcttaattctataaatttatttttcctacaaatgtaattatttttgtaaattggttttggctgcctaatgtttagcaaactcagcattcaccctactcggtcaggtgtgtctatgattaataatccattcctgtttacatgttttatatcaaagattagtttttgagtgaaattatgtaattattcttctccacactatatttgctaactgaggaagtgggttttaaggtaatttttttttttctagaaatgtgatggttttgttccccttagcttgctttggtatgaaagttttctttgaaaactttatattgctcttttaaaacaaatactccattcaatgcacacttgaatcctcatttttagaattttaatggcctgatatgtcctgtaggtgatttcctaagaataaagtgttcatttcagactagaacattgattctttggcttataagacacagcatatagaaaatttagttattcccattaggctgccttggtcctagagaattaatcatttaaaagaacctctcattaaatatgaaagattttataatttgcaaacacttaagctggtatgcaaggcaaatgttcaaagaatttttcagaatttgttatttaaaccattaattagaaactacttagttctgaatttggcataggcttgaggaaattgggtttaacatttattcttttactgtctacaaagggcctacccagcaaaatatgtatagatcaaacaaggcataagaggagtattgttgtacttaagaaaacaaattattttgaagtactttaaaagcatatttaatagtttaatgccagttataatttaaaaaattatgttaatattctcttagttacaatagttttctgtttataaagtatttaaaatttagtttggtttttattccagtcattcaaattggtaacctttttacctaaatacatactgtactaaattccaattttttaaaatcttggtgtacagctaccaagaaaattaaattagattctgtcttcctagcagatctgagcccctaatcccattaacaaagccaccattcaggaaggcaagatttaatcttgggttgaacagttttgcaggtgaggattaagcatgtttggcaggcactttcaggaaagttttcttactgcgttcatggatgcatgaaaacaatggtatctgtcaggcctttgtttctttcgttgtaccattaagtgaggtttttaaaaagagggttttcatcatttataatgtgttaatacagtagaattctttttttgaaggacaacattgaaagtcttttcagacaaatatttaatacactaattacatagctaaacttttgtcatattaaagatacctcttttctgcatgtgcattgtactaggaaaaaagtacacactgtcttaaaatttgcccaagtcatctgtgatgtatgtgatcagtggcctgaaactgtttgcagttactttaaaaatgtataaatgtgtgtaaataaaaagattacttaataggatgaatgaatacatgcccacagaagccaattcagcaaaattaaatgtcaaggagtaaacatagattgctttgtgtttagagagttatttgttaattagagttcatagacttgattcatgccttttgggatctttattagagcacgtctgacatgttttacccatgtattttggtaaatacacagcttgctcatgtgttcttatggaaatttcttttagtgatcacttgtaatagctgccacttagtaggcactcagtaagtgcataataagtggatgtgttcccacatacttcagacttgtagtcagtctttttgtattgtcgatcagcatgactttctcaatctcaggtagtctgtatttagcctacatttttttggaaattatgctcataaaggtaattttaccatccatcccagggtagtttcctcacttctaatccttccaacctctccatagcatgggagactttagaactaaattatttgtccatgcatttattcattcaataaattaataaagacattgtatcattttcagggccattttatctgtagtctgctttcgtttttctgctttctcttcctttttgtgtctgatattgtctctcacccttgtgctttctcactctctcattgattcattcattcagacgcttactgagttcttactgtatgctgagatacactgataaatgagacctgacctgctcgctgaaggagctcacagtacaccttccatctgacctcacccttcctattctgattcccttctgctctctagagggaactgtcttggcagtcaggctccattatactcccctcttatttgagaccgtcttgctacagagttttctatctccactgtcatctgaaattgttctttctttgttgtgacataccatgtaaaagctgccattctct

SEQ ID NO: 8655 - DNA, 6000 bp, Homo sapiens
aagttgcgatgggtcccctgatgacttatatcaaacatgtaacatgtgtgagaaataaacctttattgcaataagatgctgagatttggtgaatgttactgtaatttagcccatcctaattagtacagatgccaaacctcacctgcatcaccagtcctttgttctcagctgagcttgacttacattgtctgccttttgtcgtggacaggtttcttgccaagtcttaattctgttctttgatgttctttctcactgtgagtgaacagccatgtcccaactgaaatatcacaagaaggaacagaaaagggaagagggtacatatctagttgtctacctaccaagtcagcggcatgtgttttttcttgtgaatttcctaagaccttttctttatgttctatataatttatcatacatttataacatgtacggtagtcctccctgccccttatccacaaggaacttgttccaagacctccagtggatgcctgaaactgcagacagtactgaacccaattgctataaactggaatacatttctattatgtcttctacccacaaatttaatgccttttccatcttaactaagcacttattacacattgtggccatcacttttgcagtttgaggtatggcagcaaaactagcatgaatttattttttcttcacaattcagtttcacagatagatttttttttttttttttgccagagtctctatcgcccgggctagagtgcaatgggcaacctccacctcctgcgttcaagtgattctcttgcttcagcctccggagtagctgctgggattacaggcacgtgccaccactcccagctaatttttgtatttttggtatagacggggtttcaccatgttggccaggcaggtcttgaactcttgacctcaagtgatcctcctgccttggtcccccaaagtgctgggattacagacgtgagccactgcaccctgccaaagattcattgttaccagcaatcttagcaacctcagcctataatttttttccctccttattaagtcaagaactctgactttttttttttttttttttttttttttttttttttttttgagacagagtcttgctctgtcgcccaggctggagtccagtggcatgatctcggctcactgcaagccccacctcccgggttcatgccattcattcactgcctcagcctcccgagtggctgggactacaggcgcctgccaccacgcctggctaatttttttgtattttcagtagagacagggtttcaccgtgttagccaggatggtctcgatcatcctgaccttgtgatctgcctgcctcggcctcccaaagtgctgagattacaggcaagaactctgacgttttaacttacaggaagcactttacagcttctgtatggctgaattgccagcatcactactcttgtgctttggggccattattaagtaaaacgagggttagttgaacacaagcacttggatattgcatactgccacagtcagtctgataagagactgctactaagtgattaaggaggttatagcggatacactgtacaaaccatgattcacatcccagaaggacagtgtgggatggcagcgatttcctcacagctagttagtaacagtactcaatttaaaatttatgaggccaggcgcagtggctcacgcctctaatcctatcattttgggaggccagaagggcggatcacctgaggtcaggagttcgagaccaggctgaccaacatggtgaaactccatctctactaaaaatacaaaactagccgggtgtggtggcgcatgcctgtaatcccagctactcagggggctgaggcaggagaatcgcttgagtctgggaggcggaggttgctgtgagctgagatcgtgccattgtgctccagcttgggcaacaaaagagaaactacgtctcaaaaaaaacaaaaacaacaacaacaaaaaaaaacaccacttattatttctggaactttccatgtaatattttcagaccgtggttgactgcaggtaactgaaacggtggataagggggaactacaaaaaggacacttaatgtttcttggaaaaaatcttaagcaaataaaaattgaatgatgaagtacttgatctcaatttgaggaagataaaagtgtactacgaattaataaactttaaactttctgcacctctaacatactaaaatccaatttctctgagtgctagaaactctcagttcttgaaagacaaatggtaaaacaataccgtttctaatttagaccttttgggcaaaacaaaatacagtaataaagctataaagaatcggtcgggggcggtggctcacgtctgtaatcccagcactttgggaggtcgagacgggcggatcacgtgaggtcaggagttcgagaccagcctggcaaacatggtgaaaccctgtctccactaaaaatacaaaaattagccgggcgtgatggcgccgcctgtaatctcagctactcgggaggttcaggccggagaattgcttgaacctgggaggtggaggttgcagtgagtcgagatcgcgccactgcaccgcagcctggtcgacagagcaagactccgcctcaataaataaataaataaataaataaaacctaaataaataaagctaatgaatcaaagcatatgctcttcgtctttttaagggattttactaggtagaatttttttttctctgtctaaagggtaaacagcataaacatatttcaactaaaaagagtcttagaatccggggttggtattgctacaacccctaattatggaagatgtttagtataacagaaccagtttaaggaatgtggagatttatttacatcaaattcagataaagaggtaacagcggactagaagaagcaagcagagcatgacttaaggagtctatctatgactgtatctgtggaactgcccttagccacaatgaaagaccagcaaaaccagccttcagcataaccctcctgcctggtaggagatgggaaggccagacttcacccctcaagatcgccctcccacgcgcattttccacctcgcagctaagaattcagtccagacttccgatcatggcgccacgcacgtcaccttctcccctcgccgccagcaaaatcccacccacgtcggctgaccccgcagcggggtgtaagggcgggagggatcccgtctcctatactggtcgcttgtacaaaccagatccaaaaaacgcactacacaaatccttggaaactgcggtaccaacgggatcttctcaattccttgagtgcaaaatgatcccactctctatcccgacacaactctaactccattttcctttcacgtgccctaaaaagccctcaaggcccccagccttggtgaatccaggccctctctcggggtgggcaccgcgctgtacggacagacgcgcgcacgcagcgggacgatttatagaattaaaagtcttttttttttttctggcttcgcatccttgcaaatactcaatattcctgtcaactaagaaggctaagggaatgggcggttgaggaaagcaggacgtcgattacagcgaacacatcaaaggggtggtctttccaattccggcttttgtttgagtcagaggggagcctgaggaggccaaggtctccggttctgggaaaggcgggtccatccggattctttgggctgcggagagggaggttccagccccgtgaaacaacagagggcagttctgcccctcgaggctttcctccgagagtactgagacggagacgcctcagtcgggagaaatcccggaactcggaggagtctgctgaacgccgaacaaaaggatgtggccgtcgtctcttaaacaaatacgcgaatcccaagccatgcacatttggaaggcatgtgtatgtgtgtgaaggagaaaggccaccgctgcccaccgcagccccacccagccctcggccattcaccggagagacgcgctgcggtggggcctcggagccctcagccagccccgaacgaggggcggggccgggcggggccgtgagcgcgcaggcgcagtgcgggcttcatcccgccgccggcgccgccgccgccgccgcccgctctgcaccacaggctagagacagacagggccgggaagagccggagactgaggaggaggcggaggcggcggcggaggcggggcgactccggtgaccgggagcgccgcagactggcagctgcggcgactcccccctttgtgtctggtctgctcggagccactggaagtgcctcccggagggacgcagggtgtctcgccgcctccctgcccacccccttccccggctaccttcatccgccctcccgccgccccccgccctcggtccgcgacgcccgagttccgtcaggagcccagagctgcgggagaacgaggcggcggcggcggcggcggcggcggcggcggcggcagcagcagcggcttcctcggggggttgtgattcgctcacaggagccattgacgggagaagaggaggctttcttggtggaatttacctcaggcaagatcgagccgcaggaataaaaagcgaggaagggaagggagcgccgccgggaggactagaaggggcagcctctcacacccactccgcctgccgtctcggggagcccggaccggggccgcgaccgcgacccctcccctcccccgctcctacctctcctcagccttcgccagggcctccccaaccctctcacggttgttctgcgaaggcgtggggactgtgagcttgtccatggaggcaggcaccttttttgatccagtcaaggaagaggatttgttgttttcgaaatcagagtgaaggaagcaccgaagcgaaacttaaggaatcctgccttcccggagccgcgggcgatgcgactagggctgccgggcgccgccgccgcccgtccggcttcgtccttcccggcagtcgggaactagttctgaccctcgccccccgaccccggatcgaatccccgccctccgcaccctggatatgttttctcccagacctggatatttttttgatatcgtgaaactacgagggaaataatttgggggatttcttcttggctccctgctttccccacagacatgccttccgtttggagggccgcggcaccccgtccgaggcgaaggaacccccccagccgcgagggagagaaatgaagggaatttctgcagcggcatgaaagctctgcagctaggtcctctcatcagccatttgtcctttcaaactgtattgtgatacgggcaggatcagtccacgggagagaagacgagcctcccggctgtttctccgccggtctacttcccatatttcttttctttgccctcctgattcttggctggcccagggatgacttcctcgctgcagcggccctggcgggtgccctggctaccatggaccatcctgctggtcagcactgcggctggtgagtagctccggccggcacgtcccggccactgcccctgcgggtggcgagggagggagcccgcagaggccgaggcctgtgcttgcccttcgccatgcgtccccccgatcgcggtgcagcggagctgcgacccggtgcctgcgcgcctgccccatgccttccagggaaatcgcctttaatattcttgtgtattttcctatccccacttccatattcccaccccacccccctttacggggtgaaaaagacatattgggtgtggtatcttgacatttttagctgtgaggtaatgcaacgattaaaaataatattttaatcaccagtgaacagtgcttattatgagatctctggaaacagacctgtagatttttaaaattattattataaagaagcggttttggcttatagtaaaaagaacatcaactagagaacacacacttgaaccttattttgaaatttagatcactctgggaatccatgttcctttcattattcagaaatgttaccgaatgaatagaataaatgttgaggaagccagaactgtgagattcttgatatattgta

SEQ ID NO: 8656 - DNA, 6000 bp, Homo sapiens
atggtttggcatgcctggtgagtggtggggagaggtgatattaaatggccctctctattcagggactgtcactacagatagcgttctttgtccttagattagcatcttggcaatgacataaaccgggatctctgcttaaggttaataatccaaactgctcttttactttgttaaatatttaaggcttggagtcattctttacaattgagctttaaagaggagaaatgtaaatctggagtttttaataatgtggatgtgctctcaagcctagaaaggaaggaagaaggaaggaaaggagggaggaagaggaaggagggaggcaaagagggaatgaaaggtagcatttaggctagccaagagacatgctccctggaagaactcagaggcctctgtgctgtgcctttcccaaccaggcatctgagattaacagtgtgatactcagcctgtggatttccactctaaaatcccgcgccaccccccaacacagcttggctcaactatttgcaaatcacttctgattcaattttgttttggttatctcagtgtaaataacagttaagtgggagttacagatttttcaaacactaaaagtgataaagctaatgggcaagtccagataaggagggaaaccacccagaagaatccacaagtacaagccaagaagaaaatgggtagtcaggtgtgtgtttctcgtcaccgaaactgtatttttcttaatctacagaaaattttactttcttaatttaaaaaaaatcttaatctgtaaatatttttctgaattttcttatttttcatatacctcttttgtggcagaaaaggtgtacatgtgcagggtgtaatttaggctgtttctgttgcagtctttatgataatgtagtaataggtgtctggtgaagcaagacagtttggaatccacaaagccatcctcagaaacaaagatacaagtgtttccccaactgttagcttgcagttccctctaaacagttttcacgcctccatttaaaaatagttggcataatgatgttttctttctctaggctttgtgaccacgtttccatgggggaaaatgtgaatagacgtagttacagtagcatttggatgagacgccttcaagcacctatactttttcgggggaacttgatggaatccaatttaattacctgaagaaattatttgctgaagaaagtctttcctctttttagggtagttacagttaaaggcgcaggggtaacgaaatcctaacccagagaggagcagagcatgtttgggacataacaaaggatctgagtagtaaacgcagcgagtgtttggggttttattcagaccgggctgacggtgtgtgtcgccgccacgcaccgctgcctgttcgaacgcatggctgagctgccgaccggctcgctaccccaaacaccgtacgccacccaactcctcttgtaacgccatcgcgcgtggcattgtgttgggttctgcgtgtgtggcatcggagtcgtggaatttagggggaacaaggcttttccccccgtccccccggggtctcccttgggtgggggcgacacggccaaggcggcgcgccctgggggtgcccgggggcgcttcttccccagggcgttacgcaccggcggcccggcgcggaggtgcgcgggggcgatcgggagatgcggggcgggcgaggggtggtgggatgggcgccgccttaacttcgatcctgcggcggcccgagagaagccgtcgccgccccgcccgagctgggtgccgcggcactctgctctgcgccgcgcgtctccgcggctgcctctttaatcaggaacacagaaggggcgggccctgagccggcgcgtaatcggatagctctgccgcggctctgacatccacatgctgctcggcctgaaaaggcagtggggagccggaggggaggcagagatcgcgagcgaggcaccagcctgcagccggcccccagcacatcctcagccgcacagacactcggcgaggtggaggtgagggcgggcgccagcgaactcggagaggggctcgctcactcccaggcgatcccagccgccaccgccgccgcaccagcagcagcaacagcagcagcagcttccttcctcagactcccctcgagaggctggccaagcgggtgtagccgttgggggaggctcccgccgggggaacccggcgaggacaagagcagggcggccgccttccactcgggctgtccggcggcggctgcctccgcccgtgtgtccgtcaagggtgccgcgggatgtgtgtcagtttacgcctctgagatcacacagctgcctgggggccgtgtgatgcccaaggcaagtcttggttttaattattattattatcattattgttacgcttggctttcgggaaatactcgtgatatttgtaggataaaggaaatgacactttgaggaactggagagaacatatatgcgttttgtttttaagaggaaaaccgtgttctcttcccggcttgttccctctttgctgatttcaggagctactctcctcctggtgaggtggaaattccagcaagaatagaggtgaagacaagccaccaggactcaggagggaaacgctgaccattagaaacctctgcataagacgttgtaaggaggaaaataaaagagagaaaaacacaaagatttaaacaagaaacctacgaacccagctctggaaagagccaccttctccaaaatggatatgtttcctctcacctgggttttcttagccctctacttttcaagacaccaagtgagaggccaaccaggtaagccactgaaagtttttctatttattgcaacatggtttcccctttaaaagtgaccgctaaagcaggaaggccacgcagaacggcacagaagaaggctccctcagtactcaataatttaaagagagatcccagccggcccttcctacaccaccacggctgctaaaacccaactttcctctcctgctaggagtgtgtgtgtgtgtgtgtgtgtgtgtgtgtgagtgtgttttgaaacagaatttggcggtgttcatatgtcacatatggactgaatcaaaggtttaaaaatactacaaagcctttgcattacagtttttgggaattttttttccctgtcttgaagcagaacacatctcccttgagtttctccaactagccagtgaaatataaatcatttgcattccctccacttagctacattgagcaatgttaactgaagggcttgggaaagacaagagtttagttttggttttcagatgctgtagattctttggagaatgactggttatgcttcagaatcataaggctcaggctggtggagcaagttggcttgtggctgagataggggcttggggttgggtgctgctggcaaccaagacggttggtctcttctctcttcatccatgtgttgtctgggaaagtaaatcgtacgttcttttagaaattattattagctaaaacaaattgcaggccctcgaaggtctctcactcttgtgaagtggttagaaacttttgagtggaatttgttctcaaccactgccaaaaagggtgtgtggacaggctgctgtggagataagcatttcgaggcccagaacagtctggggaccgcatttgtggggagcggcaaggggtatgctctggaaaggggaatccatggggaatgcagtggggtttgtgcttccttctcggaccactctctagagtgagcctccctacccctctgagaacagtgtctggaatctaacaacaaaactcttagcagctgctacaggtgattggagatggagaaaccatctatggaggaaatgggtgaaagaaaggcgaaaaagccttcctgaagtgccctcacccaaggcacttgcaaggcgatggcggcagtggtagagctaactctgcagcctccttggcatccccagaacatcagctagtggatcctagccttgcatctggtactgtcacccttccttctcctcacgccccccaccagcacacacaccactttaagcttgggcatttatttgaggggggaagaaaattcaggaatgcctttgccacccagatccgcacgtttgcagctctttctttgccataagtggtcttcagggcagctgcaaatcctgccaaagggatgggtgggggtcccacttggggagattttctgggcctccgccgttcccccttgccttatttctaaattcccagcttgaagcggaattaaattaccactcacagacctggatgctgcgtaaattatgtatgtttgtgtgattcgctgtgtgtgtgtgcacacgcgcgcgcgccgtgaggatgcccacagtatattatgtattcagacacggactccagtaggccccagcgcgcgagcgcgcacacactggcactcacactggcgcgcacacacatgcaacttcaggttccgtgtgctgtgcggagcgggaggggtcgtgaagactcaggggccatctcctaccccagatgttcgcacatctgtccccgagcgctgcttggagtgtgtgtacgtgtgtgcgcgacacccgcttggacccactcccgctctgccacctgcctgccgcgctctctgcagaaccccctcccatcccaatccccagcagtgctgcgtcacttccagagaagcccagaggcgcggagttcggggcaacctcggacccggggtgggatctcagggtgggattcgaagctgggacctgccagggacctccagctccccaaaatgcgatctcaagccgtgagctgctcaggctttcaggcggagcaaagcactggcaccctgggagccggcagcgggtggccagggcgaggccaagccacatacctctgactcacccggtgtgcgccggccgggaagggggcctggttcagccgccgccgccggcgacgagaaccaattctgggaaggagcaagatggggcagaaggtgcgcgcgggggagcaactgagcaaataacacggcggtcgcggcgcgcggcaccttgggctggcgcgtggctgggaggccgcatgggcgacgcgcaccaggctgcccctctcctcactgcgccgcctcgccagaccgcagtgcagccgctagcctgcctccctccctgccccgggcgcccccgccagtcccctgcgctccgctctgcgcggcaggctcgccgcgacccctagagagacggctttgagtggcgggaggccgaggccggctggcttgggaatccaagcgctggcccaactaggtgagaggaaactggggtgggatttcggagaggagggcggagagaggcgggaaggaaccagcttgagccccaggaatgcgcgcaacttgcacagcctctagaagcgccgcgcgcccagcgcccgccggtgcgcaggaacaggtgaagagcacgcggcgtgcggccatccacgtggtggggacgtgatagcccctcagctctcctcctagccctccctccccttccccgccccccagcgccttctctaacgccgcatcgatttgtttgggctacgcagcagaaacagagcccagcgatccataaacattctattaagcaaaaatattcccagcgaaagcaaaaccgaggctgaagcctccgcgaagttggccgcctccaactactccatgcttgtgccctcctcctcctcctcctcctaaggacacccccagggaaaagcctgcggcatttcttcaacgctgccctatgccggaaagttaggtctcggctgcagcgctggtctctggagaagcctctgcctgcagccgccggcgagttcccgcctcccctccccagccgcctcgctctttgcttttccacgtgagaaaaagaaatgttcacggccgatgcttcattttcactgattgatttctttttaatatcaacacaagttaatggaggcaaggcgcgctctgattgaagggctgcccccgcccttcgactcgggctggctgtgccgggggtctttcccaccgggtcgcaggcgtccagcggctgggtggc

SEQ ID NO: 8657 - DNA, 6000 bp, Homo sapiens
aatagtttctcttttgcttttatatttatttcagtatgaatataattaaatgttttgtatttaaagctttaaatgatcagttttgttccagcttgtatttgtgtagtgttaatagagtacatagatttatgatttgatcataaaatagcttagaagttagaaaatggaagtatgacattcaaagtattttttatggtaatattaatatagttttcagatgcttcacataatttagaactttgtaagtttttttcctgccttacgttagttatttcttcagtgagttgtaaagtcggccctctgtatcaacaggttccacatctttagattcaaccaaccgtggatcaaaagtattctggggaaaaaacaataaaatataacagtggaaaagaaaatacagtataacaactatttacaatgaatttatattgtattaggtattataagtaatctagagataatttaaagtattttggaggatgtgtgtaggctttatgcaaatactatgccgttttatataagggacttaggcatctgagggttttggtatccagaggactggatgccaagggataactgtaaaagctgatttgaaaagtctgttaataccatttttaaaaaattgtcaccgtgtagtcttcaccttttgcaaagatttttttttttaagtactacctctcctttttgatcaaggcagtatgcaatctttgtattagtgtattttcagaaacatcaattagatgtttaacttgtttccttttttaaatgcttcacagataatttactagattatttttaacaaacaattcaaagcttgaattagtgaaacttcaaaaacagattgtggtatacaaattatacacatttctaataaagtacattaaagcaaaaattaatttgattttaatacatttcataaagatgatagaattgttcagtattaatatatgataaatattttatgtaaataatgatataaaagtggccataagcaagggttttcctgtcactatacaaaactaaacctgacaattcaaattcgaatatcacttgaaaagctcttaagaggaaataataaattctttaccttgttgaacttcaaaaaattaacatttggggctcaagagactctccaaattggctgtgtgaccttggataagtaacttaatctcaaaatctctcatatcaaaactgggggattagtttaagtgatttggaaaatcccattcagttttaaaatcctgtggttctctaatttttttctttagctttgttttccggaaagttcgaagcttgctagggggaaatattcgtctcctgttgtgtggtggcgctccactttctgcaaccacgcagcgattcatgaacatctgtttctgctgtcctgttggtcagggatacgggctcactgaatctgctggggctggaacaatttccgaaggtagtgttctccatggtcagaggctggagtgtgatgccagacgtttttttggggtatgggatattttctgcaaatatataggagaagagtagtaaggtgtttgtgaggcagaataatggtggattccaagtactatgatcattgatatcaatttttagaatgtattagatgcatctggagtcaataatttatctggagaagtttttatatcaaactgataggtaatattaaaaaccacttagcattttggaagagaaactttagtaacaaacactgactgttttgtgtacatttattttctcacatcagtgattaaatttctttttatgtagaaaacttaaggtgcttttgtttatttgtgtaggtgagtatattaaggctcaggttcagaaatgtttatgaggatttctgtaagtgttagagaaggaactaagttctggtctagggaatattattaccagagtttatcatgtggttgtgtttgaggaggagatctaccaactaatcagcagttctgagatgaatcgcatagggcctcatgcgtcccttttatgggagaaagttattttgctttccggtacaggatacagctgtgcttctcctactttgtatttgccatatacggatagatacaaaacctcatgactgatttttccctatttattttgagtggctctgtataccattttcatgtattacttcatttttctgtttttcagttatgttctctgttttcgtatatttttggaagctagttctaagtcatgttttgtaggaaataagcaatcttaaatacatgcataggggatttctttcttctgaggatccttaatttcttctatttttaagattcaaattgaatgattaatcagtaacagtttatgttttaaataaaagtctttaaaatgttaaatatcagcctttcatttctgatatttggtctttgaagaggaaacataatgcaatagtaattcataatagtggagggttctttcctcacatccttgaaagccaccagtcttattcttcagcctggctcttgagctattgctgtattaattttaaatagggtgtgatagcataagctgatggaagcctgcagagatctcactttgaaatggtgatacattacatgggaaaagattagagaggtgttttatactgcacatcggtgaggcctaataagaaagtagaatagacgtaaaccattgttttcatcatcctttaagacagggatttcaaactcaagaaccaggcagctacctatttaaatgagtcaagtgggccctaatgtaagacaatgtgatgggtaaggattgattctgagggaacaggagcaggcatgccctctctaacagaggccgtcagttctgctgtacctgaaatgtgggcccattgttgctggcgattccacacttacatctaaaatttcctgattttttaagaatgacaataactaatttaaaaaaaaaaaaaaaacctcaatgtaggccaaaaaatacgactctacaggcctcacggcctgtgcttcaccaatatgtgacttctgcttttaaggaatagctggggatacctcagccttaggataaataatcatttttggtaatttagaaaaatgaagcagtgtattagctactgttctcaaatatcctttttttcatttaattcctagtgtgggactacaatactggcagagtgggagcaccattagtttgctgtgaaatcaaattaaaaaactgggaggaaggtaataaactattttaaccacagagcattaatttttaaagtattaaacttgaaaattagtgcttcactttcttgctttagaatgtaaacacccataagtgctcatttttgtcctttgtgatagacgtgttttatctcgaactatatgaatgcatttatttttcttgtttcaaagatgtttctgaagaactattattgttttcattttacttattacgtagatgcaagtaagaattatggcaaaaacttgagaaatgtactaataagtgaataatgtcaataaattaggagtgatcataactttattttgcagaagtaaaattataaaatttattttatgaaattgtggatttttaaatgatttttttctttttttttctgagggcttcaaccttgtattattagaaggaaattttcactgcaattccatagaagtctgtttattctcatgccatttaaaataatggtcacttaaaaatttatttgatcctgttaaaatatacaaattatctgtgttttattgggatgcacctttcctctacattaagtaaagataaagattctggccgggcgcagtggctcactcctgtaatcccagcactttgggaggccaagacgggcggatcatggggtcaggagttcgagaccagcctgaccaacatggtgaaaccgtctctactaaaaatacaaaaattagccaggcgtggtggtgcgtgcctgtaattccagctactcgggaggctgaggcaggagaatcacttgaacccgggaggtggaggttgcagtgagccaagattgcgccactgcactctagcctgggtgacagagcgaaactctcatctccaaaataaataaataaagaaagattctaaggcttggatgtcttttagctatctttagcagaattagtgggaatatttaataaatttaggcttggagtcattttgaaattatctataagaataaatcttaatatgtagtaactcactttttttttttttttttttttgacacggagttttgctcttgttgcccaggctggagtgcagtgtcaatggtttcggctcactgcaacctccacctcctgggttcaagtgattctcctgcctcagcctccctaatagctgggatttcaggtgtgcgccaccatgcccgactaattttttgtatttttagtagaggtggggtttcaccatgttggccaggctgacctcaaactcctgacctcaggcgatccaccctccttggcctcccaaagtgttgtgattacagacatgagccactggcccagcagtaactcattcttatatagggatttgttctattaattgcatgacttaatacttctgtcagtttatcaatatgatatttaagatgttgcagaatctttcaaataatttgtctcttgtatttataattttatacaacaaatggaagatgttgggttttagagtttaatttttttctcagaatagaagtttgaaaacataaatacttatggtttagcaactgagattttgtgcctactgttaaattgataaactttgttcattcatagtgtctgccttttttcctttgggaagttctaattggattaaaataagatgactgtttagaaactagtagtttcaaattttcatgtgttgtatttaactcaactattaactcaattattattttattaggtggatactttaatactgataagccacaccccaggggtgaaattcttattgggggccaaagtgtgacaatggggtactacaaaaatgaagcaaaaacaaaagctgatttctttgaagatgaaaatggacaaaggtggctctgtactggggatattggagagtttgaacccgatggatgcttaaagattattggtaagtcatctaatatttttttgaaaatgaatgtttctgaaatagtttacacaagaagcacaatatatttagaggaggcgctgaataatataaatctttatgtaatcttagtttgggttgttgcatcactcctggaatataaaatattacggactgtggaatttatgaggcctgacatgttatgagttctcaaagatggttcagcagcagtggtattttaaattactcttagataaccttcagtcattgtttcctgcctgtgtttctgacatctagagattagtggatggagctctcacagtctgaactgcacccttgccttgccctgcccaggagaatagaggaaagccaggcagctcaagtactatgactcatatgggttgaaaaataccttattctgcttctccttttaggttctttttttttaaaagttaatggcatttcagttagccgtgtgtggtgtctttgtcgggcacctgtaatcccagctacttgggaggccgaggcaggagaatggcatgaacccgggaggcagagcttgcagcaagcggagatcgcgacactgcactccaacctgggcaacagagcaagactctgtctaaaaaaaaaaaaaaagttaatggcatttctatccctgtcttgctaactagaaacctgggaggagactcaagactgttctcttcagtcagcttcccatgcctattttatatcccactagtttattttatgagctatgtctcaaaatcatactcttctctctttgtctctcttacttgatcattggtcaggcctgtaccttctgccaccctctcccaataatttctctgttgccatgtttacccccttaaacacaccctctcactgccaccatgtaattactaaacatggatcttactggccacaaccatttaatgtctcctagaagctcagttcagg

SEQ ID NO: 8658 - DNA, 6000 bp, Homo sapiens
taatgattgccattctaactggcatgagatggtatctcattgtggttttgatttgcatttctctaatgaccagtgatgatcggctttttttgatatgcttgttggttgtataaatgtcttcttttgtgaagtgtctgttcatatccttcgaccgctttttgatggggtttttttttcttgtaaattggtttaagttccttgtagattcaggatattagccctttgtcagatggatagattgcaaaatttttctcccattctgtaagttgcctgttcagtctgatgatagtttcttttgctgtgcagaagctgtttagtttaattagatcccatttctcaattttggcttttggttgtcattgcttttggtgttttagttatgaagtctttgcccatgcctatttcctgaatggtattgcctaggtttttttctagagttttcatggttttaggtcttatgtttaagtctttaatccatcttgagttaatttttgtataaggtgtaaggaaggggtccagattcagttttctacatatggctagccagttttcccaacaccatttattacataggaaatccttgccccatttcttgtttttgtcaggtttgtcaaaggtcagatggttgtagatgtgtggcataatttctgaggcctctgttcagttccattggtctatatatctgtttgggtacaagtaccatgctgtttttgttactgtagccttgtagtataatttgaagtcaggtagcatgatgcctccagctttgttctttttgcttaggattgtcttggatatacaggctattttttagctccgtatgaactttaaagtagttttttcctattctgtgaagaaagtcaatggtagcttgatgtggatagcattcaatctataaattaccttcagcagtacggccattttcacaatattgattcttcctatccatgagcatggaatgattttccatttgtttgtgtcctctcttatttacttgagcagtggtttgtagttctccttgaagaggtctttcccatcccttgtaagttgtattcctaggtattttattctttttgtagcaattgtgaatgggagtttacaatttggctctctgtttttccattattggtgtataggaatgcttgtgatttttgcatattgattttgtaacctgagacttttctgaagttgcttatcagcttaaggagtttttggactgagatgatggggttttctaaatatacaatcatgtcatctgcaaacagagacaatttgactttctctcttcctatttgaataccctgtatttctttctcttgcttgattgccctggccagaacttccaatactatgttgaataggagtggtgagagagggcatccttatcttgtgccagttttcaaagggaatgcttccagcttttgcccattcagtatgatattggctgtcggtttgtcataaataacttttattattttgagatacgttccatcaataactagttcatcaagaatttttggcatgaagtgctgttgaattttattgatgtaatcatgtggtttttgtcattggttctgtttatgtgatggattatgtttattgatttgtgtatgttggaccagccttgcatcccagggatgaagccgacttgatcatggtggataagctttttgatgtactactggactcagtttgccagtactttattgaggatatttgccatcgatgttcatcagagatattggcctgaaatttttttggttgttgtgtctctgccacatcctggtatcaggatgatgctggcctcataaaatgagttatggaggagtccctctttttctattgtttggaatagtttcagaaggaatgataccaggccctctttgtacctctggtagagttcggctgtgaactcatctggtcctgggtgtttttggtgggtaggctattaattactgcctcaatttcaaaacctgttattggtctattcaggaattctgcttcttcctggtttagtcttgggaggatatacgtgtccaggaatttatccatttctcctagaatgtctagtttatttgtgtagaggtgttgatagtattctctgatggtagtttgtatttctgtgggctcagtggttatctcccctttatcattttttattgtgtctattgattcttctctcttttcttctttattagtctggctagtggtctatctattttgttaatcttttcaaaaaaccagctcctggattcattgattttttgaagggttttttgtgtctctatctccttcagttctgctctgatcttagttttttcttgtcttctgctagcttttgaatttgtttgctcttgcttctctagttcttttaattgtgatgttatggttttgattttagatctttcctgctttctcctgtgggcatttagtgctataaatttccctctgaacatagatttagctgtgtcccagagattctggtaggttgtgtctttgttctcattggtttcaaagaacttatttatttctgccttaatttcattatttacccagtagtaatgcatgagcaggttgttcagtttccatgtagttgtgcagttttgagtgagtttcttaatcccgagttctaatttgattgcactgtgatctaagagactgtttgttatgatttctgttcttttgcattttctgaggagtgttttgcttccaattatgtggtcaattttagaataagtgcaatgtggtgctgagaagaatatatattctgttgatttgggttggagagttctatacatgtgtattaggtttgcttggtccagaactgagttcaagtcctgaatttccttgtgaattttctgtctcgttgatctgtctaatattgacaatggagtgttaaagtctcccactattattgtatgggagcctaagtctctttgtaggtctctaagaacttgctttatgggtgctcctgtattgggcgcatatatatttaggatggttagctcttcttgttacattgatccctttaccattatataatgcccttctttgtcttttttgatctctgttgatttaaagtctgtttttatcagagactagattgcaacccctgattttttttgctttccatatgcttggtaaatattcctctatccctttattttgagcctatatgtctttacacgtgaaatgggtcttctgaatgcagcacactgatgggtcttgactgtttatccaatttgccagtctgtgtcttttaattggggcatttagcccatttacatttaagattaatattgttatgtgtgaacttgatcctgtcattatgatgctagctgtttattttgcctactagttgatgcagtttctttatagtgtcaattgtcctgacaattgggtatgtttgtgcagtggctggtaccggttttttctttccatatttagtgcttccttcaggagctcttgtaaggcaggcctggtggtgacaaaatctctcagcatttgcttgtctgtaaaggattttatttctctttcacttatgaagcttagtttggctggatatgaaattctggattgaaaattctttcctttaggaatgttgagttttggtccccactgtcttctggtttgttgggtctctaaagagaggtctgctgttagtctgatgaacttcttttcgtgtgtaacaggacctttctctctggctgcccttaacatttttccttcatttcaacgttggtgaatctgatgattatgtgtcttggagttgcttttctcgaggagtatctttatggtgttctctgtgtttcctgaatttgaatgttggcctgtcttgctaggctggggaagttctcctgaataatatcctgaagagggtttttggcattttttaaaaaattatactttaagagatctgggatacatgtactgtcgtatacttttaaacaatcaaatctcatgagaaatcactcacaattgggagggcagtgccaagccattcatgagggatccatgcccatgacccaaacacctcccaccatgcttcatctccaacactggggattatatttgaccatgatatatggaggggacaaacatacaaactacgtcaaaggcaaagcatggctactgtgaaagaagggtaaaaacacagagatggcatcacctctgacttccaggagtcctcagcagactgagggagacaagtacatattttcctgaaagaggtcactggagtgatggtgtgtttagaatatagaagtagagcagtcacagagaggcagcccagcagagtgttcgcacaaggactgggccagcaactccccactgcatgcaacgtatctgaggaaagtcattaaaataggtgatggtcactttccatcaagtccctggtatggtccatggaggcagggttgtcaatctcattttggcatttcagaggcctctcagggtttggatatggaagaagacaaccagcaatgattatgcattgcagagatgcaggtgagccccagtttcttgccagttgggaggtcagtgctaagagccttgctgtctttccctggaacatgagatgccaatttctttctggacagagagtatttggttggctaaagtcaaaatctaaattttgctttgggataaattccaaaaatattagcattattcaaatttactttcactttatctttccgaatcttcaaggtccaaaagcattgctgaataattctgtttctaaactcacttgcagcgtgctctccctccaaggcgaagaccataatctactcttgtctggaaatcatacaagtaggtatctcagcaaatgatactcgtgtgttatcgttcttatgagtaaatcattggcagtgagtgtgatttttttttttttatgaaaggataaatacacgccctctattggggtcaggttttgtgcctgtacttcttccgcctactgtatcatagcagcttagaatcccagctgctggctcgggctgcagttctctcatggctcgcgcagggtggaccagccccgttcctttatgtgtgtgtctactgctgacctgtggctttgccgaggcagggaagctgctggtagtgcccatggatgggagtcactggttcaccatgcagtcggtggtggagaaacttatcctcagggggcatgaggtggttgtagtcatgccagaggtgagttggcaactggaaagatcactgaattgcacagtgaagacttactcaacctcgtacactctggaagatcagaaccgggaattcatggttttcgcccatgctcaatggaaagcacaggcacaaagtatattttctctattaatgagttcatccagtggttttcttgacttatttttttcgcattgcaggagtttgtttaatgaccgaaaattagtagaatacttaaaggagagttcttttgatgcagtgtttctggatccttttgatacctgtggcttaattgttgctaaatatttctccctcccctctgtggtcttcaccaggggaatattttgccaccatcttgaagaaggtgcacagtgccctgctcctctttcctatgtccccaatgatctcttagggttctcagatgccatgactttcaaggagagagtatggaaccacatcgtgcacttggaggaccatttattttgccagtatctttttagaaatgccctagaaatagcctctgaaattctccaaacccctgtcacggcatatgatctctacagtcacacatcaatttggttgttgcgaacggactttgttttggactatcccaaacccgtgatgcccaacatgatcttcattggtggtatcaactgtcatcagggaaagccattgcctatggtaagtcacctctcctttagcacattaagaataatctggctttggaaattaaaaaaggattccttactgaactgtgatttgacattttcgtttgttgcatttcaaatttctttccagtttaacaaattattttgtgcg

SEQ ID NO: 8659 - DNA, 6000 bp, Homo sapiens
ccaccctccctcccccctcagcccagggacctccgcaggccaccttccctccccctcaacccagggacctcggcaggccaccctccctcccccctcagcccagggacctccgcaggccaccctccctcccccctcagcccagggacgtctgcaggccaccctccctcccccctcagcccagggacctccgcaggccaccctccctccctcccccctcagcccagggacctccgcaggccaccttccctccccctcagcccagggacctccgcaggccaccctccctccccctcaacccagggacctccgcaggccaccctccctccctcccccctcagcccagggacctccgcaggccaccttccctcccccctcagcccagggacctccgcaggcctccctccctccccctcagcccagggacctccgcaggccaccctccctcccccctcagcccagggacctccgcaggccaccttccctcccccctcagcccagggacctccgcaggccaccctccctcccccctcaacccagggacctccgcaggccaccctccctcccccctcagcccagggacctccgcaggccaccttccctcccccctcaacccagggacctccgcaggccaccctccctccccctcagcccagggacctccgcaggccaccctccctcccccctcaacccagggacctccgcaggccaccctccctcccccctcaacccagggacctccgcaggccaccttccctcccccctcagcccagggacctccgcaggccaccctccctcccccctcagcccagggacctccgcaggccaccttccctccccctcaacccagggacctcggcaggccaccctccctcccccctcagcccagggacctccgcaggccaccctccctccccctcagcccagggacctccgcaggccaccctccctcccccctcaacccagggacctccgcaggccaccctccctcccccctcaacccagggacctccgcaggccaccctccctcccccctcagcccagggacctctgcaggccaccttccctcccccctcagcccagggacctctgcaggccaccctccctcccccctcagcccagggacctctgcaggccaccctccctccctcctccctcagcccagggatgtctgcaggccactctccctcccccctcaacccagggacctccgcaggccaccctccctcccccctcagcccagggacctctgcaggccaccttccctcccccctcagcccagggacctctgcaggccaccctccctcccccctcagcccagggacctctgcaggccaccctccctccctcctccctcagcccagggatgtctgcaggccactctccctcccccctcagcccagggacctccgcaggccaccctccctccccctcaacccagggacctccgcaggccaccctccctcccccctcagcccagggacctctgcaggccactctccctcccccctcaacccagggacctctgcaggccaccctccctcccccctcagcccagggacctccgcaggccactctccctcccccctcagcccagggacctcggcaggccactctcccctcttagcccagggacctcggcaggccaccctcccaccctccctccctccctccctccctcccccctcagcccaggaaaggcacaggagaggatcctgccaggtaaagggaaagtggcccgggaggagcccacgtgccaacaacaggagtcccagaagacagaaaagaccacagatgagaaagcagttcacgcagagaacaaaacgttcccggaccaaacccagggtcgggttgctcattcccgaggcccgatagcgagatgcagatgaactggggaagaagagggattttatttctgtaactggttacagggagaaggcctggaaatgatcgccagaccaactccagattacagtttttccagagcttacacaccttctaagctctgtgtctccgtgtcagtgtgcattcgtctaaagacgtacgtgattcaattcttctcatctctaactgaggtttggtcctgaagatcttcctctgaagactcagtaaatttacttgatctaaatgggcccaggtgtttacccttatcttgttttctgctaaatcatggaggtttggggagttccttctccacttgtttgtggaggcctggggagttttttcagacccccagtaaaacttgcttaatcctaaacgggtcctggtctcgtcatgcttcaaggcccaagaaagccctgggcaaaactcttgatgggcttttgttacgtcccagccctcgtgtgagggcgctggctctcagctttcaggatttcacttcaccctcagtcagtgctgaacagttgtcgcggaggcctgcgtgagtgaggcctggcgtgccctggaaacattcccctgagttgaagaaagactcacagttttcagcatccagttaccctctgagcatcaggcagaacccgccggccccaaaaccaggcccccttggcacatgtgggcccgagtgagtccagcatgaggaggtgccgcttctgagcagagctcaggttgtctctgggaggaggagcgagcgttgggtgcggtggccgctgcgttggcagccctgtccctgagcggaacgcaggtcgtctctgggaggaggagcgagggttggactcagtggccgctgcggtggcagccctgtccccaggcgtggactctgccctcagcttcacagtcaccgaagaaatgaagttacaggaggggcacaccgtccttttgtctctgcctttgaggttggcgggaactgaaactggtacggtctttttgaatagaaatttggggtctttctggcgacgtaaaactgtgtgtagtttgcagtagagagtgttgagaacagcctgtctgggctgtgcattgagaaggggcggttaaaatgctgccacgtcgtgcagcccataaaagggggacacagagtagccgaaactgctcttgggggagggggcacgtcccagccttccgtgtgatgctggggtcagcgtggcccctcggctgccagagctcacgaagacggttaaggaaagcttcccccgggtggctttcaccccacggggacagagccccagatgggcccagggacctctgagcagccgtgggccatggggtgacagttgggggttggtgggacccgtggctgtcatataccctgggtagacggtggcttgtccaggcagagatgcccaggggaagtgggtggcacctgagggcagatctgacttttcaagagaagctgaaaacacgggtttttctgtgaaatctctagattgaaaacagtgggcttgaaaagcctggagcagagggagtgaggcctgctccccaccccagctctgcgggcacaccctggccagacagccctgctccagacctggcctgtgtctcagggtggcccaggaggggactttgcaaggtgacgtggggcttggaggtcccgtttccctgtaagcctgggtacttaggggatggccctggtcagactccaccagtcccagacttgggggacacgagaagggagatgggccacccagttctggttgggctggggtggggcttctgaggggtggggaggttgtcccttcccacccacctgcccctgccccaggattctcggctgtgagcaggaggatgtgtacgatggccaagttgcctggactgggtccgcccctcctggggctgtgagtgcacaggacactgggcccacaggcacctctggggctctgtccccgtggggtgaaagccactggggggaagctttccttaaccgtcttcacgagctctggcggccgaggggccacggggggcattcagatgagtcagaaggagctggggcccacccctcctgcttcctcgccgcccccctcccagctgcccccagtaaatcccctcaggcccctaggacctggagggacgcggcaggtttatcatctcagcctggaaaccacgtgacctacctgtttcccaccacagcgccccaggtttcagaagcagctgaggatgcccttcgcaggggagggagggacagtgagaaaggagggtgttcagggcccagggatcccccacggaggctgccccatcagaacttaccggggacctgtggcctcctctgagattctggcctgggcagtggtcatttgagcattggttaccaaggctgcctctgaaatggcaggctgggggcaggccagcgtgaaagggactggcaggagtcctgtggggacaggctgggggcaggccagcgtgaaagggactggcaggagtcctgcggggacaggctgggggcaggccagcgtgaatgggactggcaggagtcctgcggggacaggctgggggcaggccagcgtgaatgggactggcaggagtcctgcagggcagctgtgctggggaggggtcaccctgggccctgagaggcacaggacattgcgatggggtgctggcctgccaggagcacagatacagagctagagcccagcgaggcctgtgctgcgaggggctgtgctgtgccaggggaggccccgcacccgggaagcccagaggagagtgtgcactcacggagccctcctggcagggccgcgtctctggagcagcagacccgtgtccctctgggaggtcaactgcggcctcacagctgggcctgtcccagcacagcccttgttggagggcgcacccccgtgtcctcagcaccccagtgttgagtgcattgacctgcagaggggagcctgtgctggtcccgggcgtctgtgtggctcctgggtgcccatctgcacccctggccctgctctgggcttcagtggagccgtgccaccgtgggagtgtccagggtcctgacgtagccctgagacgtggccagctccctggcctgctgcccgcacagtgggcccttgtctctgctctgggtcaggcgaggcagccacccatgatgagctctgcagccttcccaaggtggctggtgagtccctgccctttgcacccccagcaccctcacccctctacccgggcgcccggggtcaggacccgctcctgaggtatctgtccagctggccgccccctctgtctgggggtgctggacgagtcccactccttgccaaccccagggtggctcctcagctctcaaacaaggggcgggctgcagggattccgagggcccctccagcaagaggtcccacatgcatctcccaatgggacacttacctggcccacagggtgggtgtgacactgagggttcctgggggcagattcagggcatgggatggagacagactggttgtgaggggcccaatgcagggggccggccccagcccacagggtcgttctgcagatgggctggtcggggacgctctaccaggtgaagggtctgtggtcggagtcttcgccctggccagggcccaggacgctcacggtgcaggctgagggtcagagccgccgagggccccctgccgggattctgtgcaaagggcctctgcactttatgtgggtgcatgtgaatgcccctcgccaagatgttcctaccctgcacctgacacttcccacgacaagaagtgctgaccccagagggtgtgcgcggaccccagagggtgtgcgtggaccccagagggtgtgtgcggaccccagagggtgtgcgtggagggcctggtctgacctcaaggctcttggggcgcccacacaggatgggctgtgaggggttggcgggggtggggggggtggtctgtgatggccccctgctgagccagagtgacccctacaaccggtccaggggtccacggaccagaaggccaggttctcctggaggtcccatctcccctgggcctcggtttccccttctgtgactccacacccccaaggagggccctgtcagggagggcggggggcactggttaatgtccaggacatggctgtcccagtcaagccaaaccc

SEQ ID NO: 8660 - DNA, 6000 bp, Homo sapiens
gtcttcaactaatggcattgggacaactagatattcatgtgcagaagaatgaagttggattcctatctcatatcatacacaaaaactaaccccaaatggattagagacctaattgtaagagctaaaatcacaaaactcttagaagaaaacataggagtaaatattcatgaccttccttagctttggcaacagattattggataataatctgttggattataattattggataagcatgagcaaaagaaataaataatagataaattggatttcaccaaaattgcaatggctacaagaaaaataaaaataaaaacttttgttcttcaaagaccagcatcaggaaagtgaaaaaataatccacagagtggaaaaaagtatttgtaaatcacatatctgataagggtcttgtatcaagactatataaagacatgactcaatcataaaagacaaataacctgattaaaaatcagctaaggatcttaatagccacttcactaagaaagacgtacacatggccaatgagccataaaaaaaagctacttaacattattagtcattaaagaaatgcaaatcaaaaccacaatcagatgccacttcaaaggcactaggatagcaagtatcaaaaagataacaaagtgttggtgagtatgtggagaaattgaaccctcctacactgctgatgtgagtataaaatggtgcagctgctttggaaaataatctgacagtttctcaaatgattaaacatagagtttccatataactcaacatttccactcctaggtatatacccaaagaaataaaaatatatgtccacacaaaaacttgtacatggatgtttttaacagcactagtcatagcagtcaataggcagaagctactcagatattcattaacagatgaatggacaaacaatacaaggtacatctgtacaacgagattttatattcagccacaaagaggaatgaagtactgatgcatgatacaaatgaatgaactttgaaaacactatgctaagtgatagaatccagagatgaagtggaagccttgtttaatctctttttttcatttctagtctttatatgttctctttctgccctgaaagagagccctgatgatagattacctttatcctggattcagcctctgagtcataatattagtagaaattaaattaaaaaagaaaaatatgcatggaatttttttacctgaatttttttccttattggttaaatacaattgtttttaatgttaaaagagggaatagatatttcattacttattcaccttcaaattctttcaaaacttgccatatgcctcaacaagtctttcatcaaagattcccctcgtattcttagacaaaggaagacaaatattaaattgccaaggattgaatatttgtaatcttttaaaagagtacaatacttgcccctctctttcatactaaaaatctgagtctgatatccactgtaaatgatctgtcctaatataatggtcctctgccttggataactggaaaccttagataatctgctcagttaaattggaatgatattaatattttgtcacactctgttttctgtctccttttagttgacagtttttacccacagggcagtggggtacttgagattcttaagccttatgcaacagggaaagctgccaggctaatggtcactagttgagagatacaaccagttacccatttttcaatcacatttttcaatcacttagcaatgaatttagttcttcaacagtcttatgttaaggtttgttttctataggacagacactataatggatgctgatgatacaaaagcaaataatacagagcccctgtcctttggcactcacagtctaatggccaaatgcaaagaggagacggggtgaatgtacaacaatatgctgtatatacttcagaatacatgatggtgaggtcagtaaagatttcaggaaagaagagacactgagctgaatcttaaaagactgaggatatgttcttccagcaggcaaaggtggattgcatgtacagtggtgtacatacttctaggaggaggtggagtctatttcattgaaagaatcatcctctaagccacggcaaaatagaatgccaagatgactacatccttccccacagagttaagcaaatcaatgtcaatacattaaatcctgacttccacatttacgaagctcacagaaaatcatttaacctctttctttggagatatgataggtctttaacctctttatcaggagatctcttcctgctcatgaaccccacagcatcctccagagttgggaatgagtgtcctgagccttcctggtggtgatggtggtatagtagttagcatggctgctttcctgagcctttcatttttctaggaaaaaggaaagcctagcctaggtgaagcaggaaactggcccacttccactgtatacctcaccaagaacatgccaactcaatctgactgacccaacatgggcaaatacattttggaatacacaaacacaaacgtcctctaccttggaagttcctaacttcagaacagaattcccaagaagtctgaaattaagccagtcaaagtaagtgtctgcaaattcttctttgaacggaaagcagactcctgggcactgttatatttaactgtggagtcactgcgtgtcctatgtatcaaccacctggcatgttaaataagcaacatcttccattgatgtactctcttaccatgtatgaagatatataacatgcattatttcataggataactctaggctaaagaagtcaagtgttctcttgagtaacagaggagggaatagaactctatgacatgatcaatgtcactcaggtagtaagtaacagagtcagatccagagcagagctttttggtttctgggttcataatgtagaatctactttttgtattaattatcgttttatttttctcacatgacacaaagtttagagggacaatttactgttgctgtagtgactcaataatactggcaagaactgcagttctttccatctgctccatttaccttaccttgtaggcctttgtccttctgtttgcccactcctggtcaccaaatgagtgctgcaatttcaggcttcaagtttactctctgggaaggaaaaaggtggaaggggtgcaggaacaagaggggcaaaagctgagcctgtccttttttttttttttaacaaatatgagctttcctgaagtcccacccagggaactcctattgacatctgtttggacaatattatgttgccttgtcatctccaggtgtgagggacaataggaaaaaaggttttgcttttgaacttctaaagtagaaaaagtaagggaagagagggtattgaatggctcctgggtaagcacccatctaccatgtctagcactgagctgcattaggttggctttttaaatatcatatcttaattttcattagatacaaattattattacatagaataattggaggttccaaggaggaggttggaatatcagaatattttgaattaaaaaacacagtctcatcccttcttgttctgacctaaatgctttggcaggaaaattactcaaatctaggaatactcacatttgccattaatacatccgttttgtacttcgtgtctttttttcacacatctgtttgttgttctcttttctctcttttccttcaatttttaatacaaattttaaacacacaccgataaataggataatataatgaacccctatgtacctatcaaccacctgcaacaatgaacattttaccagcctggttttgactattccctccttttatccctcctgaatattttaacaaaactcatttcatttctgccacaccaaaatgagttatgtctgtatctatgcctctaatttatttttgcttcttcaaacagaataacttacaagggttttaacatgatttcgaaaaaaaatcaatggaaaattattattttgaaatcctctcttctctttctctctatattttgacctcttgttgcacaagattaacaagttggaaaaaatgagagaaataaatgttaaaaatgagaagtgaagtttctaaagaactggggtgttaagcagagcttcagcaaccccctaagggagtacttctccaccacgcagagcagaatttatcccccatctaacatttaggtcacagatatctgtcatttaaactatccttgacaattaacaaatgtaaaaattagtattctattcatatttacattctttaatttttttaaaaaaattacaaatcttaaactatgttctagaaagtagtttaatgggaactgccacaatacgctatatgagaagctgtttaaaataacagcttcttctctcttagagatattgataacttttaccctctgctatcttttccttgaagacaaataatccaaaatgttaaccactattcccagttaagtaaatatgtaaagtacgtagtttttcattcacatacagtgttattcatctgttcagccattcgtttataaattcattcattcattaaacatttcacaggtcccatatacatgctgtcactagaatctttaaggatgaagactctagtaaggaaccataattgtctctctgttttcataaagctaggcgaacccacaccctaaaagctttatgtgggaatcaggtaaaaattggttatgatctaaatatttggagagtagaaatgccaatctcaaaagtgttttggaaaaaaaaaaaaaaaaaaaagcatagtgacaggatcatgtggtgggaaatgggcctggctggaagaatcgctatatgtgtatttttatcatccatgtgttggatgaagcagagagctgccagatagcttcttttcgacagcttggagttactgttgggaacagatccatgtatggaagcgaaagccgaaaggcacagataagctgagatccagctatgcaaaccatgtttagagacacttaaaggacaagcatcccaggtcctttctttctggtaaatttagagaaggcatcatactgggatcttttttcacatccagcccatgcggactgagcagccaaagcttgacagaggtaggtgccgggcttttgtgatggaacttctataaaggatcatttgcaaatatttcctccagagcccttgatgtcctttaagggaaggtgccagataatattttgaaaagaaaaacaaacaaacaaaaaaataggttggagctagtgactaagaggtatttaacagctctgcctccacaagacagggaagctttgcaacggaaggaaagtggcaacacagatttgctgccaaataaaatccctctgtcctgggtcacttaccatttggaattttgtggatacaagtcttcctcgatattgccagcacctttagaaatgagccacagcttccgcggggttctgagactcactgtgtattttaggctagggtaggtgggatttgtctttttccttgcttgttctcaagccagcaaaaactcgcatgtgtgactagttcttccttagacataggaagagctgcttgtaaacgacattatttttggcagctgaagtcatttttgcaatatttctcagcagttcggaggttgattacatcctgttcaaagattcttgggttgttttcacaaacacggggtcttacgcaagttgaagttgctgaaaccagctgtgagccctgggcttttctcagcacctttaaaattttgtcttctttcttttttttctactgactgaaaactttggaacttgagaggaaatgtttccaaagattattatcgttttgtcatcagtgatgttttgggaatagattgtggcagaatatcaaaaattctgtgtctcaggaatgatgcaaggtaaaagtgtgaatatgaacagagtaacaacaccagtatctatacgactgtcctgtattttctagaatacagataaatccagccaaatcatatcaattgcattttgaaatgcgactccagctaatt

SEQ ID NO: 8661 - DNA, 6000 bp, Homo sapiens
tcatgcacctaatttgttgttacgcttgaacagttcatgttaaactgaggctcaggtgaggaagcaatctccacaaaaaaatgcacgtctaaaagtaggaccacagacatatctcgtgagttcttctgtgaaccttttcctgaaccttttcttccgtggtggattagaactttgtctttggtatcaaagagaccagagattctttcaaccttgaattgtcaccatttgctgtgagaagctaatccagtcacctggaggtctctgaaactcagtttctttctctgtaaaatgtgaatagtaaaagtacatactagtatatatatatgggcaagaatgaacactaaccacttgatacttgaggtaagattctagtcatgaacctagatgagaatgaaagatatgtcctttcccttacaatttcatactacacaaagaacttgcaatgatattttaagatgtatatgcagacatgcacctacacatacaataagattgtgaattttctaaggtcagaaactttgttttctttatctccatatatccaaatctgagatcagtgcctaccacatatttgaaacaccatatatatatttgttggatatattgatgaatggactacgtgaggttctgggaggtagtgctccagtatcttggaggaccctaaattcaagtcagagacagccagccagaaatatggcactggcctgcttcctggaaagtccaagcaccagacattcacattgctgtaaaccagcagtcggtcttgctactgtcaagcctctcacctgttctaactgcaagctacacattacccttgaacaaggtctcttctcattagatgagttttgatgtttcaaggtaggagaatgccacccttctaaaaaccaaaacagattaatggtactaggtcgtgacttaattgtggcactgacttgcaaagatttctttttgcaagtaattttatctcagtcagtctgaatattcatatacagtgtggagatagaggaagagtaattaatgttccttctagttacaatacttttgggtgaaggcaggcaacttagggtgttgttaagagcctagactttgcagacagacagacttcaaggcatttattctaaccttgcaatttattacctctgttatcttacatgaaaaccttaacttctcaatgcatctatttcctcatctgtgaaatggggatgttgaaagttaccacaaagaatatttatgatagttaaatgagattatgtgacattgcttactataatgtctggcacagtaagggcctctcctgaccttccaagtccccagtgggtaaagtgcagtggataggaggcatttgatgtatttgtttagtgccccctgaacaccaagcactgttctagatgttgggataaatcaatgaataaaatagaaaaaggccagtcctcttggaacaattgtaatgataaatctgttttttaatataaagcggaagtatgtttcccagatcccattgtttcttcaaagcctctaatcatattaaaatagaaacttaatttagaatgaaatcaaagaaaaatcaagtataaatcatagttataatttattgtgaaatgttaatcaaggcattaactttcagaaagggaagtcctgttgaaaatttttaaaagttgtggatttgggaaaaaaaaaaaagaaaaaggaagctaaaatgtatatgaattaaagaatgaacaactaatttttgcagaaaaatataaatgaatattcaacttacactgtacagaaatatattccaaataagtgtggcatttatagaagtatatttggtttctaaatgtaaagaaatttataatatttttaaaatatgaaattctcaataatttatgtcaacaaatgatttttaagtaggattcattccatttatatagattgcccccagacagtataccaatgtgttgcgtactaaaaaaaaaagtgatattgaagcttcttagatcaaaaatttctcactattttattgaaggaaaatatcctgtgttatcctgtatacccaaataaaatggatcaagtaataggcctatcaaatgaacgtgttttcatatatattaaacataatgaggttctttgtaatgggtaaatgttgtaataaatgtccagcaaaatgagaactagtttactgcataaaaacatgcactggccaaagaacaattgcttatatacttatagtggaatggaaccttgaggcaatgtgtcattgatgcattcagcatcctccctacttgatggaacagtagtcatacctcatgctgtctcacatgtgtggcatgccagtggggagcaaagtggaggactgaaaaagggccagagggcagaagttgggtggtgaagaaaggcaagcagtgcttcctgccgtcacccttgctcatgacttccctgaagctatctttttgagttcatggctcatttctcaaatacctatgcctacccaaagtataaaaggcactgttttcagtgctgtactgtgatgtgggctggagagtatggagattgtagagccagctctcaggaagcttatacaactctaaaaagggagaagaaagttcttcaaacttgggctacatatggatctggagggataaaaggaagcacctttactagtgtagccaaagaggaaatgatgttaattttggatgtggaatctggcaaaactgcatttgggacctgaagatgacaggaggaggcagcgggaaagtctcaaaagcaggaaatgaagatcggtagaaggaagtgatgaggctgtaaagacaaaagggaaaggaatgtgaaggaacggccaaagagtctgtttttgaattatggcagcagaaaaattgccaggaagtggaagtggagtgcaaaagtgacaattatatttctagaagacatgtgaaataagaataatttagataatttcttcctattatgtaattgctcccctgcctcaaacacacacacacacacacacacacacaccagtgaatgcatttcctgtaaattaaaaacattgagtttacactaaagagatcaatttttttttgccctgtttctgaggctcaccactgatgtcgcattgggcaggtcaaggatccttctgaggtaaagatacacccacctgcttttacctcagctagcgttgttttgagggtgtatcagatggacaaagtgtgaatgctttctggaccctgggatagcctatgcaaatgtaggggttttatattttgataaaactaagtgaaatgaagattaaagccaagcactttcacattgaactaaacaaaggaaataaataatggaaagtctaagatctgctgagagcacatcaatgaaatagttattcttgtatctttattgaaaagctaattgtaaaggctaaaaacctcttttgagggtggaaagaaagacttctgtctacttgctaatttattgttctgggagatgtggctgcagttcattgtgactatatagaagcagaaacctaataacatggtttactagtcctggttctgccatttaggacctcagtaaataccacagcctcttcctttctttctcagttgtggataataacagctcagagctgttgtaagggtcaacagattatccttgtgatttaaaggaaggtgagaatttcaagcataaaagaattgaaaagatgtatacttcttttttgtctttttgatggcagaacacagaactcttatctcatgtctactcttcaatccaggctgtgccttagttaatgagaagcaagaacacccaccacttctctagaaaaaggacttgacaacttcactcctgacattctgtcacagggaataacgctctttacggaactgcttatcatgagtatggcatcattctgggccctgggtataccaaacaaacaaaaaatgaagatccctgtcctctgtcactcatattctactgtaggagatggacgaaaaaatatttaaacatgagtgattaactatggtatactcagtagttaagttttatggagaaaaataaagcaaggcatgtaaaggcaaggtgtaggtggtagtggaccaaagacttagaagaggtgagagagcacacagtgaataacatgttggagaggaatttagcaggcagaggaaggagccactgaaatgccaaaatccagggaactgtctggcttattaaagagtcaatggggagatggatgtggctaaagcaaaactggaggctttagggtagtattgaagatgagcccacagatgaaatggtggaccagattgtatagagttacgggctatcctcaggattttggcttttactctgagagagacgagaaaccacacaagttgttgttattgttttctatgtttctttagagtttttattgagttaagaaaatgcttatgtcatatatcaaggaaggtggaaaacttacataaaatattaatagtgtttatttctgagttattattgttaatttctcttccatttaattttattttccaaggcatcaaaactgcagatattcttggatagccttccttttataaccagtgaattaatttcaatgatagcatctctaataatgaagttattttgtctctagtgtgaatgacataacattattgctaagagtttgttttgtctttttttttttctttgtaagctgctactatgcttcagtagcccttgagcttgaatggagtggtggggacatgagggctgtgaagtagctagtccatcatgaaattaatggtggtgatgagggtggtacaaacggaattcctgtcattcaggaatgaatagccaagaagagcaggttagactactgaatacatttaaccattcttttgtatacaaaataaatattatttaggggataaattaacttcccctttcacccccagacctcagttggtgtgaatgtttaaacagagcaaaaactgaaaagaatctagaaacttgatacttctagaactttataaactcctatttgtgacttcttcagaccactttcatgacttctggaagcaaatgtcctagtacagactcaggtactctttagagtatagaattataagtgttacttttaaaattgatacgtaactttaaaagcctatttaatttctcatgggtgggttttgagccaagaaggggcatgattagactttaagtttaaaaaagatcactttgcttttgtgtgtttgggggcagggggtgaagtggtgtatgagaggtggggtaagtctgaggaacaatagtttggaagttatttcagaagtcccagaaaatgcgggtaactcagaccagggtggcagcaatgaaaatgataagaagtgcttagattccagatttattttgatggtacaactgacagatttgtaatgattttacctaagctttctgaagcctagaggtcgatgctttcccatttctttgtatcggtaattaggtttaaaagtgatttgagtttaattacaccacatttatatgtcaatttactgctaaataattgctggccagagaatttcttttcttatttattttcctgcatctctttgagtatttttctttgtatagatctagaatatcaaaaagaagtgtcaatgtacacgattacaaagttaaaatcatatacactagttacgtttatgtggtgggtaggccagtgatgatgtcccagttttcaaaatactaagtcctagttctcttctgtcctctttcttccctccccccccaaaagaaaaataaaaacaacaacacaaaaaatataactattcctcattcataagtagtttgttcctaccaaaatgccagatgtagctcttaaactaagccacagcgctgaggctttttaacaattaacaaaaactttcggttcactttgtgaatcattttacattcaaacaagcacagcaaccttgtcagattggactgggtcagattttattctcagagtttctcaaaagccatcctgacaggaaagtatatatt

SEQ ID NO: 8662 - DNA, 6000 bp, Homo sapiens; identical to SEQ ID NO: 870

SEQ ID NO: 8663 - DNA, 6000 bp, Homo sapiens
tatttgtagagacggggtttcgccgtgttgcccagggtggtcttgaactcctgggctcaatcagccagcctcggcctcccaaccaaagtgctgggattacaggtgtgagccactgcacctcaccagagttttcttttagaaacaaattaatttaccaattcatttcttttagcctaagtggagtcaaggttctaaatagtttggcaaaagatttctcacttcctgtgattcttattttctcttcagtaatgagtgtatgtgtgagagacattttcttatgacagagaaacatattgagaacataattgttttttaaattaaaaaatatccggcctgggcgacagagtgagaccctgtctcaaattaataaataaacaaataaaaataaaaataaagcacttgttcctgaaaattatatgccactatatgcactattctttgaaattctgaagaactctgattgactagaactgcatatcatgtaagccaaatattgccctcagtagactccagaggagttatttcccctggcagctatagttctttctggcaggagagggactagtttacatttcaatcaaagttaactggcatacagcagggcgcagtggctcacgcctgtaatctcagcactttcagaggctgaggtgggtggatcatttgaggtcaggagtttgagaccagcctggtcaacacggtaaaaccccgcctctactaaaaatacaaaaattagcccggcgtggtggcgggtgtctgtaatctcagctacgcagtagtctgaggcagaagaatcatctgaacccgggaggcggaggctgcagtgagctgagatcacgcactccagcatgggcgacagagggagactccatctcaaaacaaaacccacaaagttaactgccttattttctgttgtactttttgtgcttagtagattcatgttctagacaattctcaggtcatttgttctttaacctggctctgctccagcctctttcctgcctttctccttgttctctattacctgacaatcatagtctttagacttacacaaaataccaggtccccacctgtctgcaggccattgtattaggttggtgcaaaagtaattgctgtttttgtcaaacagcaaaaacgcaattgcttttgtaccaacctactacatgctgtacactcagccaggaaagctcatcctcctcttcccttcatcttcccagtatgtacctgggacatagctacatcctttggtcctcatcttaaaggtcccttcctcaaatgatctcatagtttctataattttctttctggcagttcttggaatgtgcatgcacatacacacatttgtgtagatatttaatatttatgtaccgcaaactgcatgctccatgaagttaatacctaccttaaaaatttgatatagggccgggggcagtggctcacgcctgtaatcccagcactttgggaggccgaggatggtggatcccctgaggtcagaagttcaagaccagcctaacatggagaaaccccatctctactaaaaatacaaaattagctaggtatggtggcgcatgcctgtagtcccagctactcgggaggctgaggcaggagaatcgcttgaacctgggaggcagaggttgtgctgagccgaaaatgcaccattgcactccatccaaaaaaatttttttttatatagttgtacatatttatggggtacatgtggtggtatttttatacaggtatacaatatgtaatgaccaaatcagggtaagtgggatatccatcaactcaaatatttatctattctttgtattgggaacattacaattcttttcttttaaaatatacaatgtttctgttaactatattttcctaccgtattactgactacagaacttactctttttatgtatctgtatttttgtacccattaacaaacttctcttcatctttcctcccatcttcccttcccagcctctggtaaccacctctacttccatgagatccactagtctcagctacttggaaggctgaggtgggggatcactagagcccaggagatggagattgcagtgagctgagatcgtgccactgcactcaagcctgggtgacagagtaagaccctgtctcaaaaaaaaaaaaaaaaaaaaaaagagagatgggatcttgccatgttgcccagtctggtctggaacttctgggctcatgtgatccccctgcctcagcctcccaaagtgctgggattacaggagtagatatcttagatatacttatttcctttcttttgtacatatccagcagtgggaatactggatcatatggcagttctatttttagtttttgagaaactctgtgctgctttcctttatttttttatagagacaagagtcttgctacgttgcccaggctgatctcgaactcctgggctcaagccatctgcctgcctcagcctcccaaggtgctgggactacaggtgtgagcctccatgccctgccaatactgttttccataatggctgtactaatctacattctcaccaacaggctattagcattcccttttcttcttatctttgtcaccattttgtatttttttttcttttgataacagtcattctaactggggctaagatgatctcttattgtggtttggatttgcatttccctgatgattagtgatagtgagcattttttcatataccatttctatgttggccatttgtatgtcatcttttgagatatgtctattcagcaggtcctttgcccatgtttttcttttttctttttctttttttgagatggttgcctaggctggagtgcagtgataagattttggctaactcactgcaacctccacctcccaggctcaagtaatccttccatcctcagccttctgagtagctgggattacatgcacaggccaccatgactggctaattttttgtatttttggtagacatggggtttcaccatgttgccccggctggtgcccatttaattatattttttccttgagtttattatatattctagttattaatcccttgtcggatggatagtttgcgaatagtttctcccattatgtaggttgtttcttcactgtttcctttgctgtgcagaagctttttaacttgatgtaatctcatataagacctatcatttcttaaatcactgtctccaaagcaccaagcctggcaatcgttgataaagtgatttcaaacatttaatgtataaacataacagtaactgtaaacggtgagatacaaaaccacttacctgattatcccaatatggggagaaaataaatatgcatagaggaaaagagaaatacactaattaagaagggaaagagtcctttttttttttttttaacaaaactaaatggaaacataataaactaatgtaagcggtaacctgtggaggagtaggaagacttttctaaagtctgtttactttaaaatccggttttcatttctgaaacattataatgtattatctattcaaaaacatcaaatgtttagagggcagacaatacactaaaacattaatagtgattatcccggaagggtaggagtcaggctttgttttctgcttctgtatcagaaaaaggatgcactttttggaaaagatgtttggcgacctggaaggacaccgtctccgtggagtcgggaaggaggagggccaggatgcgaaggcaacgctttgcaggtgatcggatggatttattcccacatgggagagaccagagcacagcacgtttgtgtacggccaggagggaaccacgaaaaaagcagaggatagaaacgcaagcacacgatggtggtggccaagaggagcctgcccctagtgacctcacttccgcggccagtgcgagaggcgagggagctccagctctgcctgtaaggtctcggaagtacgaggcggaggggacgaaaaacggggggccagactgttgtggctgtggtggagacgagaaaccaggaagaagaggctcgcctcccactcggcgacagtaagcgaagcagccgaaggcgagcgccgacatcagcagctgccccctaaatcccgcccttcgtcttggcggcagcgggagactgagagacgcgcgcagcaggggcgggactggagaggggccccgcgcgcggatctcgcgagagcattagagggcggaagcgctatccgagcaggatgcggttcgtggttgccttggtcctcctgaacgtcgcagcggcgggtaagaccctccatcccgcatcccactcttgcccccagatcccccattctcacctgggcaggtcacctctaggctcgcttcttccctacccgacccacctctccgctcgccatcgtctcccgccccaccccccaatccccattcccccgctgctcccgatctcttccagttctgaggagttccttcttcccgcctgcccttctccggtgctaactcgtttttctatttcaggagccgtgccgctcttggccaccgaaagcgtcaagcaagaagaagctggagtacggccttctgcaggaaacgtctccacccaccccagcttgagccaacggcctggaggctctaccaagtcgcatccggagccgcagactccaaaagacagccctagcaagtcgagtgcggaggcgcagaccccagaagacacccccaacaagtcgggtgcggaggcaaagacccaaaaagacagctccaacaagtcgggtgcggaggcaaagacccaaaaaggcagcactagcaagtcgggttcggaggcgcagaccacaaaagacagcactagtaagtcgcatccggagctgcagactccaaaagacagcactggcaaatcgggtgcggaggcgcagaccccagaagacagccccaacaggtcgggtgcggaggcaaagacccaaaaagacagccctagcaagtcaggttcggaggcgcagaccacaaaagatgtccctaataagtcgggtgcggacggccagaccccaaaagacggctccagcaagtcgggtgcggaggatcagaccccaaaagacgtccctaacaagtcgggtgcggagaagcagactccaaaagacggctctaacaagtccggtgcagaggagcagggcccaatagacgggcccagcaagtcgggtgcggaggagcagacctcaaaagacagccctaacaaggtggttccagagcagccttcccggaaagaccattccaagcccatctccaacccttctgataacaaggagctccccaaggctgacacaaaccagcttgctgacaaagggaagctttctcctcatgctttcaaaaccgaatctggggaggaaactgacctcatttctcccccgcaggaggaagttaagtcttcagagcctactgaggatgtggagcccaaagaggctgaagatgatgatacaggacccgaggagggctcaccgcccaaagaagagaaagaaaagatgtccggttctgcctccagtgagaaccgtgaagggacactttcggattccacgggtagcgagaaggatgacctttatccgaacggttctggaaatggcagcgcggagagcagccacttctttgcatatctggtgactgcagccattcttgtggctgtcctctatatcgctcatcacaacaagcggaaggtaagtcgacagcggccttccggaggggagtggggtttccagcaccctggaagcttgggtgtgggtgggtatcccgtcactagatgcccgtgagcactggggactttaaaacaaacttcagttttttcctcaggccctattaggcctctttactcttgttttgttaatcgtgttttcatcctgtcacctgtttactctgagtgtcctctgctactgcattaggagccaagttaggacattattaggatctgacctgacttggaatctcctcccataactttgcacttaggtccttcacagcctcagaggacctgagtacttgacagttaaagcacgtaccttccatcctatttcccttcttgag

SEQ ID NO: 8664 - DNA, 6000 bp, Homo sapiens
acccatgaaccattcctagtggcaaggaggatggggcaatggggctatctgggtggctgagaccagtaagtctcaaactctggtctcaggatcaatttacacacctagaaattactgaggatcccaaagaatctttttgacatggtctttctcttgatatttgccaaattaaaaattaaaactgagaaatttttaaatatttaatttaatttaaatatttaaattttaaaatatttattaagtcattaaaataataaatctggctgggcattgtggttcacacctataatcccagcactttgggaggctgaggagggtggatcacctgaggtccggagttcttgaccagcctggccaacatggtgaaaccccatctgtactaaaaatacaaatattagctgggcatggtggtacgtgcctgtaatcccagctacttctggaggctaaggcaggagaatcacctgaacctgggaggtggaggttgcagtgagccatgattgtaccattgcactccagcctgggtggcagagcaagactctgtctcaagtaaaaaataaataaataaaataataataataataaatccattgcatgttaatatatattgataaaaaataacttcttttttttagacagagtttcgctctgtcacccaggctagagtgcactagcgtgatctcggctcactgcaacctctgcctcctgggttcaagcaattttcctgcctcagcctcctgagtagctgggattacaggcacatgccaccatgcccagctaattttttgtacttttagcagagacagggtttcaccatgttgtccaggctggtctcaaactcctgacctcaagtaatctgcccacctcggcttcccaaagtgctgggatcacaggtgcgagccaccatgcccagccaaaaaataactggttttggctgcatgcagtggctcacatctgtgatcccagcactttgggaggcccaggcaggaggaacacttgagcctaggagtttgaggccagcctgggcaacagagggagactgctgtctctacaaaaaattagaaattagcctggcatggtgttgggtacctgtagttccagctacttgggaggctgaggtaggaggattgcttgagcccaggaggtggaggttgcagtgagccaagatcgtgccactgcactccagcttggatgacagagtgaatctgtctctaaaaaagaaaaaaaaaaaaacgctgctgtcctggatttgtaagtagcctgagtgactctttgctagtcactattcagaagcttctctgagatcagccactgacttggagagataacagtaaggctttgagatctagaggctgatcttagtctgctgtttggagatctctgccttaatccagaataatagctgaggatgtctctgtggctgatgaagaaaaggaagtttgcaggcctgcttgtcttgctgcccaagtgggtcaacctaatgtgagtggagtgaatgaggtagtaagggcttaacagatgtcttgtgattctgggacaggaggcagcttcaagttccttttcttcctcacccccaccttacacccatccttggaagctgggatactgctgactctcatggcagccataacgctatcagcgcctggctttgccgacaaggggaatctggaagagaaggggaaggacaggggagacaaagagaggtaaagagtgttgcatcaagcacatgtgtcagaagtgttcaaaccagagcgcctccattttgagtgagggctagaaaaatgaggctgggacttgctaggctgcatttcctgaaagctaggcattcctagcctctaggtgtttatggttaagagaacaaattaataatgcttactaaacagacccagacttgagagagtccagatatcccgatatctggagaacaaaggcattcctaattttgctttaaaaataataatattgattattgcaaaatatagtaattagggaaaattaatcctttatcacaaacccttgtagcagaagacatctgcccatatatacaagcattacaagcattgtaccttagttggatatgtccctcctcttattttcaggaatgccctgctggagtgcagtggcgatctcggctcactgtagcctctgcctcccgggttcaagcgattctcctgcctcagccccgtgagtagctgagacaacaggcttgcgccaccacgcccggccaatatttgtatttctagtagagacggggttttgccatgttggccagctggtcttgaactcctgacatcaggtgatctgtccgtctcagcctcccaaagtgctgggattacgcgtgagccactgtgcccagccaccactttactttcttaataaacttgcttttactttgcactgtggacttactctgaattgtttcttgcgtgagatcgaagaaccctctcttggggtctagatcgggacccctttcctgtaacacatgggccttgggctgatctccaagattaagagggcaagatactcagctgcaagggtcagctgtcgctgaccccagcagctgctctgccttggccaacttaccggatttaaatcgcccagtgacagcttttcctccagtattttcaaaatgctcccaatatcctcacgttagaacaatccagaaatagtcttatggtaaaactcttttgggaaatgtgaaagtagagtcctcccaccttttcctttgcaacgcttttgccccaacctcgatcgcccaggcagcacattttttccggcacccccaccaagggaagaacagagacatctccaaaccagctgccctgcgccaagctgttacaaaatagagccacaagtctcccggtttatgcaaacatatttggctcggtgtctaggatcttctttttcaaactcagaaggagatcacaggcacacggccgcggtgctgtgtacgcccctctgaaaggaagttctgcaagtcgaccgacttcactggcttcactgaagtccggtccgaaaccaccggaaagttgcaggcgcacagtatacgttcagctgtgtccaagaaataacctatcaatcactgccttaagctttgtttccttcctgaattttcttattttcacgaatatttatgctttcacaaactgtatgtcatttcctctccagaaccaaggggggctcgccccagcctggcccccgccccgggtgcgtccctgcagggggcgccctgctctggcaatgcccaccgcaccgcagggctgactggccgcgcgcccgggggcgggggccgccgcggaggcatcgtgctctccgattggccgtccgcgtcctcgtgacgtcagaccccgcccacgcgcccctcctccgcatctgagcgggggagcggcggcccccagctgaatgggcgcgagagcggcgctgggggcgggtgggggcgcggggtaccgggctggcggccggccggcgccccctcattagtatgcggacgaaggcggcgggctgcgcggagcggcgtcccctgcagccgcggaccgaggcagcggcggcacctgccggccgaggtacgtggcgcagccccctcctcggcgtcgcgggggcccgcgggctgggggctgcggcggcgacttgtctcttcccgggccggctgggcgcggcgtttccgcctcgaaccccgcgggcagcgcccagggcacgacaccctcaggcgagcccggctggggcgcgggcggagggtcgtggtcccgggccgtgtggaccgggcggggggtcccacgcaggtgtgtacgcggtagagggtggggcggaccgccgggtgtcgggtcccgccgcagtggccctttccccgccgctttccgctgcagctcgggatttaattcattgctggaagcttcggagttagcagagccgagttaactcgttttcctgggatgggcttagggaaccccctgcaaggttactagcagctcctgaaacctctctctgcatccatcggggaggcgtgatgtggggccgctggtagaaatttgccggtgaccttccctgcaccctctctgcagccagccttgcggagaagacaggttttggcgaccttttgatttcttctgaattgtaagccgtggcttgacgcgggtgtgcattcattgtacgccttgcgtgtgtaagtaacgcagggttttccgagagcatccccgaggagccctgcccttgcctcacacccgcttggtgaccttggcagacactgatccccctgtggggctcgggctcatggtctctcctgagaagcttaccctgccgatggccgaggtcccttccaggccccgggtttttctaatcataaaaaaatacgtttacgagggtagaggatcctgcagaatctctagctgactcggaagacgaattttatatcctcatgtcttaagtcatgcatgcggcttttgcttaattaggcatcgttcatttgaaggggaaaatggttttatgtgctgcgcttcatctggcaccagtggttgcctgctcctcgtggcagggccgtgctgggtgtcacagagaggaaggagactcatctcctgccctctggtgtttagctgccctcccccgggcttatggctgctaatccttttccacggaaggatacagctgctgaaactgtggaagaggaatccatttctgctgcatgaaggggcacagacttgaatacagtcaggacaggttgtggtttcacttgtgtaatcctgagagcttgacagcttcgaggagtgtctaacattgctagtaacagagcctagaagcacctgaattccagctgtcacttggagaaggagagattcatacgaactgcgagagcatataaccagcatgtcttgagtcttttacccatgtgcctgttatatggatgctgctgtttttgtaagatgaaatgacccttggatattctgggttatgatcagcatttcttcgtctaggcgagaaaagaaacaggtgagataggaaggcatgaaggggctcatggaagagagagggctgacaggcagaaattttgagagctcacatttacgactatttggacagttcttataattttggcataaattgtaaattgttgcatgttatcaaaatagattggtgatgaacgttaaggatatatccgtggcagaataagaacacactctttgttctttggtttgctcctctagttcttccctgcttgccttgtgggactatttgcagcaatgaggggaatttatctagcaggttggcctcgggaggcaatgaatgaaaagaggttggtgagtcctctgtgggagtccattccaggtcctggagggctgaggtgggtgtcttggagccagcagtttctgggagaagggataaagctcaccttccacaccctcctggctcctgaggagcgatttaatccgcactgcctgtggacacgatggaggactgagatcactcccgaagggcatgctccgtggttttagtctgctgggaagctctggcagaagtaaaacaactgggaatatacacatgttaatgatgctccaagctgcctaactgctgaggaaggaaaagcaagggctggatcagtgtgggtggcataagttagcaaaggcatccaaagtggggtgaatcacaggcctggtgtgggaggaaaccataaatatgacggtgacacgcaggctcgcccgggagacagccagcttaagcacacgtgcagaggagaagcaagtgaaatgcgtaagggagcaggagaaaaatcagctttgaggcttcaaggacactaccaggcttgtcttacctggacaccagacagacaaaacttttttttcctcttttttttttaagtatagcatagatactaggaaagtagacataccataagtgtcctgctcaatgaattttccagactgaacatgcccatgcactcagcacttagatcaacaaacagaactggccgggaccctgggagctccccttgtgttgtactccagtcgcggcctc

SEQ ID NO: 8665 - DNA, 6000 bp, Homo sapiens
cacttcctgcctccctcttgggcaacaaaggggcctcgggaagctgggccccttcgctcccggcccttctcacactcctgccctgctgatgtggaacggggtttggggttctgcagggctattgtctgcgctggggaaggggacaggccgggaccgggacctccgctcgcagccggccgcaccaggtttcccctttggggctttcccgaccgcctaccccaccgcatgccctcgtcgccctaaggagtcttcctcccagaattaggtgttggcagggtccggagccccagtggctgcaaggcctgctgcctgaggttctttcaagaaactcaaacctcttaggcctgagtgtgtatgttgggcgggggtcccctttttatttctcaaatgatttcctgttgcgcagaggtagtggtgggtctggaggccagggagggcttcccggagcctgtttagccttcagccaactcaactcctccccgcttcccagggagacctgtggtcttttaggcagaggccaagtgtggggacttaggtccacctccaaagagaaggggaaggagggcaccggggctcctggaaggcctgatgaggagtcctgtggcctctcctgctgcgggcccctctggtttgctttctctggctgtgatttctgaccatgtcttttccctcagcaggacagctggcctgaagctcagagccggggcgtgcgccatggccccacactgggctgtctggctgctggcagcaaggctgtggggcctgggcattggggctgaggtgtggtggaaccttgtgccgcgtaagacagtgtcttctgggggtgagtgcctggaggggtgaggaggaagtcagggacaggctgctgaggagttgcccccatagtgtgctggctttattctcacgtgtgtggcacagctttctaagaaactcgagttggaagaacgggcagtgtgggttgggacctgggattagcctcctctgggggagctctgtccaactccccaccccagactgcctgcccaggtgtgggagggggagagccttctgcctcgccctctccacgcctcgcttcttgaattgtcactggcgctgggagcctaaagagaaactggaaccgggataaatataaactggaggctctctcccctggctccccaggcccccctaagacctcctactgccctgtacacatcatacactctggtggccctggaagtgtgtgtgtatgtgcacatgctcgcatggttgccggggcacagcggggacccagcagtgctccctgtgcacacacccgtgtgaaaggtgatgtcaggtgtttgtatcagccgtgcgctctggggacctgggatgagctcacctcccacaggctccactcgggtgccagtgaagccctgccatgccggtctgtgtctggatccattgttgcctgcaaagactaaggctggtttggggggaccctgaggacaggtcggcagccatatttggcagctgatgtaggaatcacgtgactgtataaatgtcgtagtgccctgcatgccgggtggcagcaagacttcccaggccccagccccatctccgctctctgagcctctggtttctccggacctccctggcctggctcacagcccagctcccctcctgccatccccacctgtcctagtggcctgctgtgctcgcatctctggcagcctggattggggtcctgctggagtgaagggtttcctgaggcagggagtactcatagccgtctgtgcctcctgctctgctggactctgatagaggcagtgggcagcagggcaaagaaggaagcagccgccgaggaagcgaaggtggggtgggggtgcccagccctgcggccggaggtgccattgaccctgagagcaagagccatcagtctgatggcttcctctggccggaagctgtggctgagatatccttccttcctcccagcagcctggatttgcctcctcccaggctgggaaaggctagggaggcccaggtggggctgtcagggccaaaggctgtttcaaaagtgtcctttattgccaatcagggggtttggctggcatctgcttgtggcatggggtgctggctctcgtggagcaagactgagggctgtcgagccccaggggtcctgcccatcagcagccatgcttacccctgcagagctggccacggtagtacggcggttctcccagaccggcatccaggacttcctgacactgacgctgacggagcccactgggcttctgtacgtgggcgcccgagaggccctgtttgccttcagcatggaggccctggagctgcaaggagcggtgagaggtggggcagtgggaggcagtcgggcctgccagagggcaaggcccagaggggctgtgcttggctaggtggtccctcagcctggctgcccccacagaagtgctgctgggcatccggggcctgccctctggttggggtcagcatgcggcattcctctcctctctggcacttactgaattctgtgtagtggggtggtttggggcttccattctgtactaaaggaagtccccagagaatagggaccatgcctctgcactgggcgtccctgtgttgctgctgcaggctgtgcttgtgacacgtgctcagtccgtacctgtaacgtggctgacatccccttccctttccccagatctcctgggaggcccccgtggagaagaagactgagtgtatccagaaagggaagaacaaccaggtgggtgcttggacgctgctcctggtgctgccttcaccccaggacgtctcctcccattctggccctcgcgctctcactaaccggacacctttctgcccccagaccgagtgcttcaacttcatccgcttcctgcagccctacaatgcctcccacctgtacgtctgtggcacctacgccttccagcccaagtgcacctacgtcgtgagtgctgccctcctacctcggtgtccccagccccccgccctcctcacccttctctggactcgtggatgtggcccacagagccctgcccttaagcatctcctcatcacctctctctctgtccttagaacatgctcaccttcactttggagcatggagagtttgaagatgggaagggcaagtgtccctatgacccagctaagggccatgctggccttcttgtgggtgagtggctgccccccatgcaggctgggtgagtccttggggcttggttccacttgggtctgtgttggccggatgtgtccatacctcatgtgtggcctagctgacctctgtctcccatagatggtgagctgtactcggccacactcaacaacttcctgggcacggaacccattatcctgcgtaacatggggccccaccactccatgaagacagagtacctggccttttggctcaacggtgagccaccggggggcctgtgggagccatgggtgggaggtcccccggggcccagcccctccctgctgacctcctccccttcccacagaacctcactttgtaggctctgcctatgtacctgagagtgtgggcagcttcacgggggacgacgacaaggtctacttcttcttcagggagcgggcagtggagtccgactgctatgccgagcaggtggtggctcgtgtggcccgtgtctgcaaggtaccgagtctcacagcggtgggccctgggagccctgctggcccagcggggctgaccggcagtgtccccttgccgtctgccagggcgatatggggggcgcacggaccctgcagaggaagtggaccacgttcctgaaggcgcggctggcatgctctgccccgaactggcagctctacttcaaccagctgcaggcgatgcacaccctgcaggacacctcctggcacaacaccaccttctttggggtttttcaagcacagtggtgagttggccagggctcccacagagtggggaggagctggggttcaggtcagggacggtgcatgggtgggagcctggaccaggcctcagaggcagtcccggaagccaggtgtccagaagccaaggagaatgctggcacctgcccctttcagagctgcctgtgaaggggcagggccccatgccaggtggcacttgagctgccagggcattctggtacccatggccagtttgtgccaggccctgccttcctgctgcttgcccttagctggggtgggaagagataaggtgggtacctgaccctgggctccctctcgctgtgacaggggtgacatgtacctgtcggccatctgtgagtaccagttggaagagatccagcgggtgtttgagggcccctataaggagtaccatgaggaagcccagaagtgggaccgctacactgaccctgtacccagccctcggcctggctcggtgagtgctagggcagggatgcatctccccacccagctgcggtgccatcccaccctgctgatggcctgccccccacaccctgcccccagtgcattaacaactggcatcggcgccacggctacaccagctccctggagctacccgacaacatcctcaacttcgtcaagaagcacccgctgatggaggagcaggtggggcctcggtggagccgccccctgctcgtgaagaagggcaccaacttcacccacctggtggccgaccgggttacaggacttgatggagccacctatacagtgctgttcattggcacaggtgggtgcatgggtatgcaggcatggctgctcaaggctgggcagaagcccgtgtgcccagggcagggagatttggagctgccccacggccttgtgccctctcatttacaccttctcctctgcaccccccaggagacggctggctgctcaaggctgtgagcctggggccctgggttcacctgattgaggagctgcagctgtttgaccaggagcccatgagaagcctggtgctatctcagagcaaggtagtaagttgggccctatctgccactgtccccagcactatcccatctcactctctccatctggctgcttctcccagttgggcctatgtgcttggccagtgcagagttaggaacacacacacatgtggatgcacaccttgcctaacttggggtgggttcctggaaacgagaatgaaaacagaatggaatctgcactgcacagggccattatatatagccaggtcacggggctgcgctcccagcatcaagccttggcaactgctcccatgtttctttcagaccctccaagctgtgctgtggttctggctctggcctcttccctgaccatgcccctgtgaccagacctcccaggctgtgagatgtttatgatgccctcaccatggtggttttccttccagcccccatttccgtgactgtttccctgaagtgcttgcattatacccttgtgcaatactctttttggtttttttttgagatggagtctcactctgtcacccaggctagagtgcagtgacgcgatctcagctcactgcaacctccacctcccaggttgaagctattcttatgcctcagcctcctgagtagctgggattacaggtgcctgccactatgcccagctaaaggttttttgtttttgtttttgttttctttgagatggagtctcactctgtcgcccaggctggagtgcggtggcatgatctctgctcactgcaacctccacctcccgggttcaagcaattctgcctcggcctcccaagtaactgggactacaggcacgtgccaccatgcccagctaatttttttttttttttttttttttgagatggagtctcgctctgtcacccaggctggagtgcagtggcgcaatctcggctcactgcaagctctgcctcccaggttcacaccattctcctgcctcagccttccatgtagctgggactacaggctcccatcaccacgcctggctaattttttgtatttttagtagagacggggtttcaccgtgttagccaggatggtctcgatctcctgaccttgcgatccgcccgactcagcctcccaaagtgctgggattacaggc

SEQ ID NO: 8666 - DNA, 6000 bp, Homo sapiens; identical to SEQ ID NO: 915

SEQ ID NO: 8667 - DNA, 6000 bp, Homo sapiens
ttcagatctttgctcccaatttttttttttttctgagatggagtcttactctgttgcccaggctggagtgaggtggcccagtctccactgactgcaacctctgtctcccaggttcaagtgattctcctgagtcagcctccagagtagctgggactacagatgcttgccaccacatccgggctaatttttttggtatttttagtagagacagggtttcaccgtattacccaggatggtctcgatctcctgacctcatgattgtcctgcctcggcctcccaaagtgctgggattacaggtgtgagccaccgcgcccagcctcctcccattctttcggtgtttgacttgggtgttctcctatagaattaatacatactaggtatggtagaattcttatttttagtcactggccttactgttccttaaacatttcaagtttttgccttagggcctttgcatttgctgatatctctgtctggaacattcagcgcccaaataatcaggtggtttgccccttctgtacccatagttaatgtacacagcttgctagcttactacatttatgtcatgcttattccttgaccctccccacccaaatggtgcccccccttccatcactctcctcttacccttctttatttctcttcacagcatttgtcagtactttacattattccatactagaaggtgagtgtcagttctattagaacaggaacttggtcttattccctcctatatttcggtgcccagaatagcacttggcacacagtcttttgagtgagtggatgaccttgtgcacaatcagttattatcattgaacttcggtaaagcattaattgtggcatctttgtcagatgtttagataagatggttggcgtacgcatagtctgcatgttgtatttttagtctttgaagatatgaagtcaggtaagcaacatcctaacatagtctatttcttgacatctcttacaaacgtagagtatagcctatcctcaggtgtgtgctgaagtttatattagggcttttgggtaccttagaatgtgggtattgcaatctttattcaggatgttatcagtcactggtacagttagtcttgttattaaaagaaaaaagaaaaaaaaacaggtagaagttggaattagccttcgtaggaagaattccagatgcaaatgcaggaaaaactctgttgtccttggaaactactctggagagagttattggcactataattcccaaacctaccctgttaaaagattctgtggaaatgggttaacctttataccttttaagatattgatcttaatgatgttttacaggcagatccagttcctaatggtttgcgagctttgccagttttctatgcctgcacagttggaataaacctcttttccatcatgtatactggagcaccgtgtaagtacctatcaaaatatttaaatgtgaatttaaagttgtttacaaaacttgcattaaatgcccaatttacccctttttgctttacagggctgaaatctcctagaaggtggctggcctgcgcccatttcagaaggctgcaggctagtgtacgctgagttaacctagatagtttttcaaccaaagagacctgctcagattctaaatcactacagacctttcctctttagtcttcacaggatccactgataatatgatcatctccttccctttctcctgtctatgctaaaaatgctggaattaatactgacctcaactactgaagtcattagttatatctgatcttcagtaatcagtcatttaggactggtttgctggatattctcatttttctctcccaaatggagatactattgtttctaagtactaaacttccatgaatctgcttgaatgagaagagttgggatgtttaccacctgctctaagtgcacttggaagaagaaattcatgcagctaagaggaaaaataatttgtgagaatataaaggttgaaatgttgatgactttcatgtttgggactaaggcaaggcatggattaaattatggcgctacaagtttaatttagcaacaacaaaagattggtaacttgtaactggcaggacagtacagttttggtatctagactcatttggcctgatggtctgtgactacataggcagtgacttttattctttatactgtgacccactggatgaaatacaggacacacatgtatgtatgtagagagaaagataactggaatagtgtcatgaagccacttaatgcttactatgtgctatgcacccatattttcaaattctctctttttttttttcttaacatttgttgtggcccactgaaatgatttcagttttgagtaatgggttgtgacttgctcttaaacctcactgaagtagtaagttgctgacccaaagtagagttagctaaatatttttattatttatttatttttttgagacagttttgctcttgttgcccaggctggagtgcaatggcatgatcttggctcaccacaacctctacctcccgggttcaagcaattctcctgcttcagcctcccaagtaactgggattacaggcgtgcaccaccaagcccggctgattttgtatttttagtagagacggggtttctccatgttggtcaggctggtctccaactcctgacctcaggtggtccgcctgcctcagcctcccaaagtgctgggattacagacatgatcaccgcacctcgccaatattttaattttttaccttattttagattgagggattatatgtgtattttgttagatggagctaagtatttttaatcttgctaattaattcttggaataatcaggaacgaaacagacaactttaagaaaatattgttcttacttagactatactgaactgctatgtgccggtgaagagaagtttgtatgccagatttccattgtaaacagttctttgtgataaactaaaaagtctcccatgatgctcttaacactcattctttatgtggtagaagcaaagctcagagatgagtgaaattagaatcattttaaaaacagaaacttagatattttcgttgtgtcctttatggatcatttgtaagaaaaaccagtctctttcctttttgacttggaatgtagaccaacttaaattgtgatagacagtaatttcatgtatattttagtttgtgtgaccacatgatcaaaattgaaagcagaatttaaaatgaaaagatacatagtcaccatagaattgtagtttggggccgggcgcggtggctcatgcttgtaatcccagcactttgggaggccgaggtgggtggatcatgaggtcaggagttcaagaccagcctggccaagttggtgaaacctcatctctactaaaaactagaaaaactaaccaggtgcagtggcaggcgcctgtaatcccagctacttcggaggctgaggcaggagaatcacttgagcctggtaggcggaggttgcagtgagccaagatcgtgccactgtactccagcctgggcgacagagtgcgatgctgtctcaaaaaaaaaaaaaaaaagttcaaaaacaaaaaaagttttagttttgaagggacctcaatttgtttctaattttttttttttttttttttttgagacagagtctcgccctgtcactcaggttggagtgcagtggtgcgaacttgggtgactgcaaccactacctcccgggtttgagcgattctcctgcttcagcctcccgagtagctgggattacacatgtgcatcaccacgcccagctaatttttgtatttttagtagatacgtggtttcaccgtgttggtcagtctggtcttgaactcccaacctcaggtgatccacggacctcagcctcccaaagtgctgggattacaggcgtgagctgccgcgtctggccttgtgtctgatttttaaagattaatcattttggggtatgatagaatttccagtttataagtacaaacagtccctgacttcatggttcaaccttcagttatttgactttttgatgggtttataggtacataacctcattgtaagttgaggagcatctgtgatttcgtacataacaagcaaaataaagcaaaacaagcagaagtaactaagctattcctagatatcaactacagatcattataatatcttttatgggttttttttttttttttttaccttttttgtttttcagggatggggtcttgctgtgttgcccaggctggccttgtattcctgggctcagggtgttctcacacttcagtctcctgagtagctagagatcattataacatctgttagatttaaataggattgtatagtgctttacttcttttcgtttgtttttgtgacggagtttcgctcttgtcacccaggctggctggagtgcagtggcacgatcttggctcactgcaacctcgacctcctgggttcaagtgattctcctgcctcagcctcccaagtagctgggattatagaagcccaccaccacatccagctgatttttttaattttcagtggagacggggtttcaccatgttggccaggctggtcttgaactcgtgacctcaggtgctccacctgtctcagcctcccaaagtgctgggattacaggtgtgagccactgtgcctggccagtgctttacttctgtctttagtacaggctaatggtttggagcctactggcgtgcatatgacagtcagataatgactaatattactcattcttaaaccatgtgaacagtgttgctaggcaagtctttttttaaggtaagacttgtaagtgaaattaccactaaactttgtgtgtgagaaagacaaaactttttttttttttttttttttttttgagacaaagtctgactttgtcacccaggctggagtgcagtggcgcaatctcagctcactgcaacctccgccctgccaggttcaagtgattctcccacctcagcctcccgagtagctgggactacaggcgcccaccaccatgcccggctaatttttttttgtatttttagtagagatggggttttgccatgttgggcaggctggtctcgaactcctgacctcaagtgatctgcctgccacggcctcccaaagtgctgggattacaggcatgagccaccgtgcctggctgaaagacaaagcttttacaactattcttaaattatcaacttttgatagataatatccttgttttctgtatcttgctttgatactgctttcaaggagataatctcattaaagcattttactaaaggccagtatagtgaatgtaatcacttttacacagaattgtgtcagcatgacaaatgtgactactgagacatcattctgttaacattaaaataagtttgtaggtggtaatggaatatgtggcagttacgatcatgagctaggagagtggaacacttgctgtctttttcatagctagtcataggtccttagcgtgtagtgatctttattatcttccaaggtgaagaaaggaaaaggctcgtatgttgagaagcataggaacttgagtcccgcaggtgttcaagtgggctaggctggtgtgggttttcagatgatcattgagtttttctcccaaatttgtataggcactagcacagtaatcctgtgcacttaaatctggcagcagctgtcaggggtgatgggctggtatggggaacccctcagtccccagaggagggtttacacaatattgcagggggctgttgccctggggttttcaagatgcaccattttatctcctagtgctgggctttgacaaacttcctctgtggggtaccatcctcatctcggtgggatgtgcagttttctgtgcccttatcgtctggttctttgtatgtcccaggatgaagagaaaaattgaacgtaagtaataactaaacagcagaaaagtttaactactaatgttgtgtttattttttatttggccacctgtaaaaatctattagaagagattggcaaaataagagattttaaagggaaatttgaggatatgggtttgttgtccaaac

SEQ ID NO: 8668 - DNA, 6000 bp, Homo sapiens
attcttctgatttctccccacctctagaattctctcttacccccaatttctgagtctgtttttatgtggcaggagttggcttgctgtgttttggcttctgttagcacataacaaagtagaggtggccatattttatgttagttgacacttgtctgtttgtcttagaactttcaaaatgttgtgtctcgtctgcttttgtctgctgctgttctctgtggatttatgccttgttttctccttaactctcattttagttgcatttcaggagggagtggcccaggctggagtgcagtggcgtgatctcagctcactgcaagctccgcctcctgggttcgcaccattctcctgcctcagcctcccgagtagctgggactacaggcgcccgcccccacgcccggctaatttttgtatttttagtagagacggggtttcatcgtgttagccaggatggtctccatctcctgacctcgtgatccaccctcctcagcctcccaaagtgctgggattacaggcgtgagccatggcccatccctgccctggagacattttgcccattgtcttggtgattaacattggacttcttgttacttatgcaaatttctgcagcaggcttgaatttctccccagaaaatgggtttttcttttctgttgcatcatcagttggcaaattttccaaacttttatgctctgcttcttcttgaaggctttgctgcttagaaatttcttttactagataccctaaatcatctctctcaagttcaaacttccacagatctctaggacagggacaaaataccaccagtctctttacataacaatagtgacctttactccagttcccaactagttcctcatctccatctgagaccagtgcagcctggaccttattgtccatatcactatcagcattttggtcaaagccactcagcaagtctctaggaagttccaaactttcccacatctttctgtcttcttctgagccctccaaactgttccaacctctgccttttacctgtttccaaagttgcttccacattttcagttatcttttcagtagcattccgctgtactggtaccagtttactgtattagtctgttctcacgctgctaataaagatatacccaagactgggtgatttataaaggaaggaggtttagttgactcacagttccacatggctggggagttctcacaatcatggtggaaggcaaatgaggaacaaagtcatgtcttacatggtggcaggcaagagaacttgtgcggggaactcccatttataaaactgtcagatcttgtgagacttattcactaccatgagaacagtatgggggaaactgtccccatgattcagttatctccacctggcctcactgttgacatgtggggattattacaattcaaggtgagatttgggtaggaataaagccaaaccattatcagaaagtatgtctttttttttttttttttttttttttttttttgagatggagtctggctcttttgccaggctagagtgcagtggcatgatcttgactcactgcagtctccgcctcccgggatcaagtgattcttctgcctcagcctcccgagtagctgggactacaggcatgcgccaccatgcccagctaatttttaatatttttagtagagacggggtttcaccatattggccaggatggtctcgatctcttgatctcgtgatccacctgcctcagtctcccaaaatgccgggattacaggcgtgagctactgcgccctccagaaggtatgtcttttctttaacacattctactgtaatatatctcattttaatcatcttatacccagggtacctttcagccttagttggttgtaatagactgtaatttttactttgaattttacacttgtgtcacaatttagccattagattctctttcttcagctgagtggcttcttgatgctttctgaaggcactcttgaaagcatctgtgctttttgataataagatatcctgcccctaaactgtaactagctcattttcaaagagtactggcttgttttagaggagactagtggtagagataaaaatctgctctgggaggtacatgagattgttccacagaatgaggagaggtagacaggatgacataagataagaagctacttgagtcagcagaggaattactcttttaaaaagtgaagagtttctgttgctaattccagtttaagttcttttctgtctcataatctgatttcccctttctctaatagttttattttatataggcacatgaaagatacgtttataatgtcctctagatgtagacatttccatttcttttttctttttgaatcttactcaagtggcccgagttgtttcccaagtctgctgttcagtttctccttgttgccatcccttgagactcaactgcctgaaaagtaagagaaacccaggctaacctcaaggaaacaccagagaaaacataggcacaacattcgttgtattagtctgttctcatactcctttaaagaactacctgagaccgggtaatttatgaagaaaagaggtttagtcgactcaagagttctgcagactgtacaggaggcatggctgtggaggcctcagaaagcttacaatcatggcagaaggcaaaggggaagcaggcatgtcttcatgtggcagtaggaaagagtgaacacacttataaacaagtagatctcctgagaactctatcacaagaccagcaacagggatagttgccaccgtgatccagtcacctcccaccaggcccctctgccaacactggggattacaattccacatgagattttgggtggggacacagagccaaaccatatcatctggcaaatcagatgttcacccacacaattagtacataatactccaagatatcaggaaatctcaggatccttaaggttttacctaaaagtctcttttaactctttatcggccaggcacagtggctcatgcctgtaatcccagcactttgggatgccaaagcaggcagatcacttgaggtcaggagtttgagaccatcctggccaacatggtgaaagcctgtctccactaaaaatataaaaattagctgggtgtggtgacacctgtaatcgcagctgcttgggaggctgaggcatgagaattgcttgaacctcagaggcggaggttgcagtgagcctagatagtgccattgcactccagtctgagtgacagctaaactccgtccaaaaaaaaagatagcaaatgtagccaaattaatatcaagaaccattagaaggctgggcatggtggctcacacctgtaatcccagcactttgagaagctgaggcgggtggattgcctggccaacgtggcgaaatcctgtctctacttaaaatacaaaaaattagctgggtgtgatggcacacgcccgtaattctagctacttgggaggctgaggcaggagaattgcttgaacctgggaggtggaggctgcagcgagcggagatcattgcactccagcctgggcgatggcacaaacaaagaaacaaacaaacccattagaaatgtaaagaaattgaccacagaagttcaggagactcctgttactccacgtttttatattcactgtgtcctgtaaccgcctgcgaagttgcatggctgtgtttcagtcaggttttgtatttgtcatgactacgtagttctcagtaccttttctagtaatttttagcctgttctcatttttttttgtatgaaatatactgggaattcacattatggatgcaggaagctgtagtatgaatataaatatctaggatttgacgtgaatgcgtacgtgctttgccctctcatttttttgtgttctgggttaataaccccactgcacagatgtgatactgtctacaacattccttcctttttgtttcgcctgtttcttctgctgtactaagctacatgagagtagcattttggcttggtcactgctgtatccttagtgtctaggacaaggctggacacaagtaaggtgttctaagaatatttaatgaaaatatgatgctggtagttctctgcttcaaatccttttggaagtaaaatgattgttttaggatattttaggctgtaagttgcaggaaaccaaattcaaccatcttaagtgataaacccatcatgctgcttagtagaaagtcttgggtaagggtgggtttgggggttggtgaagtaagtggctcagcagtgtgagctctgctgtctctgcgtcagctgcccccagccggttcctcatggtcagaaggtggctgccagcacagtgagcagcagtgtgcttccctgttaacatcatcttagagacagggagactggcttttgtttgctggggattgtatgtttgagaacctaaatgtggtagagaaagattggggaaaaatgaaaaacatttcgtttcttggtaaggacagatagcatgaattgaaaaaaactgcaaagagagcaagaagcttcagcgtgcatgattttggagatgccggagtatggggtgactgaggcttgtggcactctttttaaaggtttggagaaagatgagaagtcaaccatgcttagatatggggaaggagctacattagagactcatttgttcttctgaggtgcccacttgcgcttgtgctaaccttaccaaccttagtgccttaaagaaatagctaaaaaagctaaagcaaggccaggcgcggtggctcatgcctgtaatcccagcactttgggagaccgaggtgggcatatcacgaggtcaggagatcgagaccatcctggctaacatggtgaaaccccgtctttactgaaaatacaagaaaaaattagccgggcgtggtggcgggcacctgtagtcccagctacttgggaggctgacgcaggagaatggcgtgaacccaggaggcggagcttgcagtgagccgagattgcgccactgcactccagcctgggtgacagagcaagattccgtctcaaaaaaaaaaaaaaaaaaaaaaaaaaaaaaagctaaagcagaaaacaaaagtggcccatggtctcagcttccagataataactattgatttcaaaaaataaaatggcctgggtgcggtggctcatgcctgtaatcccagcactttgggaggccgaggcaggtgggtcacctgaggtcaggagttcgagaccagcctgaccaatatggtgaaaccccgtctttgctaaaaatacaaaaatcagccgggcatggtggcatgctcctgtagtcccagctactcggggaggctgagacaggaaaattgcttgaacgtggaaggtggaggttgcagtgagctgagatcgcgccactgcactccagcctggacatcgcagcaagaatccatctcacaaaaaaaaaagcatgcaagttgttaactgtttcaaacagtacagaaaggggtaatgggaccaatcaccctctttgttctgtgacacacacagaatcgcctcattttgtttccagagacacatctttcaaaggttttaggattcctcccaggaggcagcctgcagcacatgctgctccgccttgcctgcctggtgatctgtcctgtgtggaggtacccgctcagcagtcctccgtcgtggggcatgttggcgcgcttctgcagtatgtgtgatgttgccgcgagtgtttatatatatatctgtgttggtgaacctctgcacatatctcagtgaggcaaattcctagtcatggtgagattgctggggcaaagtatatgaactattaaagtttcaatagattttgtcaaatttccctttggaaaggttgcatcagttttctttctgccattgtgctttctccttgctgggtgtcttggaggttttcatttgtgcccacctgagaggtacagtagtttactgtacagttggaattgtatctgttgaattgagtgggaaattcagtgtctttttacgagtttgttgttcttttttctgtgtgttcttttttctgtgaactgctaaattattgcctttt

SEQ ID NO: 8669 - DNA, 6000 bp, Homo sapiens
cactgcagctctggttagactcaaaattgaactttactatttaattttcttccccttgtaagttcataaatttatgtatgtgtttctgagctgagttcatggtcatcaagaagtgtttgctttagataggtagacaggggatacattggaaaaagcagcttgccatgcattaaaaggaggataagaaaacaataaaattactttaaggtgttttaagagcaagatccctgtagtaggaatgattagatgtggtttatattcatatctgggttttttccttttcttagtcagatttttataaagtaacagtaaaatggttctgtgtgtctgtgtgcatgagagagaagagagaacaacatagttttcatcatcttgaaaagtatcctatatcctatgtaagtatcttagattgatcataactgtagagttagaaacactcgtaatatatttacttcaaaagtttaggaaaaatgcatatagcagtttgataataggacttttgaaatcaaaattatcttaatctcaaatccagtccaagatttacatactgaagcccagagaggtttagtgacttaatgtttgttacaagttagcattcggtagttatgttgagaaaagttcaacatttttcttattaaagaagacatacaatattttctttagtctaggagagaatagatagacagttgtttggtttctttatgatgatactagacaaagtttccagatttttttctcactttaatgtttcctctaacttcctagtttttaattagaaatcatatattgtatctttaggacagagatctaatccttttttatagttccatctttttctgttgagaactgtgtttttggaaacagaagtgtctgactaaagaacctagattgtgatttatggtttacaaaatagtttcccctacattctacttagtttctgaagtagccctgtgagatagatagaagaattattattatctcgttttgcagaggagagaagctatattgcttatgacgagaaacacagcaagaacttgaacccaggcctccttgttttacccattgccccaaacctgctctgaagtctgagcagtctacctgcattatgacccaaactgtgtacttagacagggcttagcaactgtgaggtgaacttggcagactgtactctcttgcagataaaacataccttagcagagagaaccagtcagagctgctcactctgtcttccctgcactcaggcacctgcccttgcctagccagatagacagtttcacttctaaatcgtttaaatgactgcattattcttttgttgctttaaggaaatgggtatcattgattgaggtcagcaaacatttattctcagcttattctaggtactgggatacaaagaagaatagtttctgccttcaaaaggctcacaatctagtttaaagatatgaaaatacgtaattatagtgataactgctatagcataagatgttaatcattttaccaagaatataatgccttatcagtactggtggtaacagcttattgcagttcagtttcacaagtattccaatttacgtaggcttatcaaggatatggaataattccttatatttcattttgcagtcttgttactatcaaaatgatattacaaaattattctaaatttttaatgggaaaaatgtattccatggaaactgagtctatagtggggtatttttcaaaccaagttgactttaatagattttaaattttatttaattatattatctggctctttttctatgtggttcatatcttaaatgaatatggttttggtaaacacactttatttagccttttgcttttgaagttctgcagaactttgctgtctcttgaagcttctgccttgatgaatgtaagaactgtacagtctctcccattgtggtagttgtagtgtggatagaatgtgaacatacttgctatgcttagttggcctttttacttatgtaaaacattatagatcatactaaccaggaattagaattttgaggcagaaaaataagcagaaagattttataagattaacaatattatgttgtagttgaacctatttggttgagttttatgtaatttttatgaaagaattgtttcataccttatacatttgcatcatttaaaacatcataaaacaccagagacatttaagtatgcttgcatttcagattatttaatttactggccttaattgtatttatttatttatttattttttttgagacggagtcttgctctgtcgcccaggctggagtgcagtggcacaatcttggctcactgcaacctccacctcccaggtttactccattctcctgcctcagcctctcgagtagctgggactacaggcacccgctaccacgcctggctaattttttgtatttttagtacagacgggcttttaccgtgttagccaggatggtctcgatctcctaacctcgtgatccgcccgcctcagcctcccaaagtgctgggattacaggcatgagccaccgcgcccagccctaactgtgttttttaaattgggaagataatagaaatctttacacactatgctctctatatgaacttctaaatttacctcctaaatatctttacatatttacataatggaaatggtttactttgggacttctgtttttattagagccatcttttacttcagttttcctccaaggataaaacattgattggatttaccaaaatagattataattagagcttaattaatgagcgaataccgagagattctaatagaagatctgatacagtttttgtttgaatttgagttacctcctgtactttgaagacataattttgcataagtaatgcatatttttctaagaagcagtcaaatattgtgtatcttatatctgctgggaatcatatctctgtagtaatattgctctcagtaatttcttatagccactttttttatttatagatcatctgtttcttatagccacatttttttattcatagatcatctgttacgtactgcaagtcagcattccgatagcagtggttttgctgaagattctacagactgcctatcccttaatcatcttcaggtaaaattttctgttctaataggcactatgattaacttcctcattttaaggtggtttttgtattactatatattttaatattgagtctgtataatctttatttttcaagtgacagaacaaaactcctggcatgtagatgttatctaagcatttgactataaattttagatttcattaattcttctctctgaatatgtttttaaaaatatctatcttccccttaatttttggaccaccagtaaacagagattattgtgatcattaacctgttttgtctgttgtttttcttatttttttaaccatcattatatttcattattttacagtaattgttttgcctatttaataactgacattaattgtggacctatagcttgctgagtgttatactgatttttacactaggttgtgtgagataacccagagaacaggcacatctttatccccaagaagcatatagtctatatgtagagtacacagaatgcacagaaaaagcatttgaaacattttttaagcaaattctaaagaaaattgggatgagaaaactcccaaagagcctttaggaacatagcatttaaggggtaaacagacaagaggcatatgtaagttcactgagaaagagtaattaagtgaacagaaacactgggagatggaggagaaactttcagaaggtatggaagaaaagataggaatgttgactggttttcaaatatgaatgatagcttaagagtgaggggtctttttgtccttttataataacatgaaatgacttggggaaagtgttcagctaagggaaataaccgtaagagaagaactgattcagaaaaatccgggctgaaactggagagataccctggtcttggagaggatatgatcaggaacccaggttggagggattcgctttgagtttcctttcagaatggagagaaggagggaatgatggggagagatacaaggaagtttttagatgttggggaagaatgttaggaagtgtttgtccattttctctatgagtcagtgtgttgtattgaaaggaaagggggaggttgttggaaagggaattttaggaaaacagtgaagttctgaaataatctttgtgagaaagtgagaggaaggagggatgtggttgctgctcaggagcaataaaacaattttgagcaacagcagggccacaactgcagtggagacagtgaaattatagaagcaccatgttggtttggtattttgttagtgactcttcttacatatattcttcatctttccacctattttcttttcacaggttcaggagtccttgcaggctatggggagtagtgctgatagttgtgacagtgagacaacagttacgtcacttggtgaagaccttgccacaccaacagcacaagaccagccttattttaatgaatcagaggaggagtctcttgtccctcttcagaagggactagagaaggcagcagcagttgcagacaaaagaaaatcaggtagccaggatttccctcagtgcaacaccattgagaatacaggaactaaacagtccacctgtagtccaggggatcatatcattgaaattactgaagtggaagaggatttgtttccagcagagacagtagagctactgagggaagcaagtgctgaaagtgatgtgggtaaaagcagtgaaagtgaatttactcagtataccacacaccatattctgaaatcattggcttctattgaagctaaatgcagtgatatgagctctgaaaatacaactgggcctccctcttccatggacagagttaatacagctttgcaaagagctcaaatgaaggtttgcagtctgtctaatcaaaggatggggcgtagcctgctaaaatcaaaagatttgttaaaacaaaggtacttatttgcaaaagctggctatcctctaagaaggtctcagtctttaccaaccaccttattgagcccagtaagggttgtgtcctctgtcaatgttcgattatctccaggaaaagagaccagatgcagcccaccttccttcacctataagtacacacctgaagaggagcaggaattggaaaagcgggtgatggaacatgatggtcagtctttagttaaatcgaccattttcatctctccatcatctgtgaagaaagaagaagccccccagagtgaggcgccgcgggtggaggaatgccatcatggaaggactcctacctgttcacggcttgctccaccaccaatgtctcagtctacctgttcccttcattccatccactctgagtggcaagaaaggcccctgtgtgagcacacaagaactctgagcactcacagtgttcccaacatatcaggggctacttgtagtgccttcgcttcccctttcgggtgtccttactcacatagacatgccacctacccttaccgagtgtgctctgtgaatcctccttcagccatagaaatgcagttgcgaagagtattacatgatattagaaactcactgcagaatctttcacaggtatgagaaaaagtatgttatcattagcttttttcttttactgctctgagcactttttaattcacagagaagctaaggcacatcaagtatgaactacctcagctttattttctgacatgtctaaacttaatctgcatctgccttcgttttctatcttccctcctgtttcaagggagaagctgtaactaaccctgatcaaagtcgatttctctgctcacaagtctgtctcctttccaagaggagagatttttctcgttaagtatcctcccatttttagtctatcatccactgtctttgttttagtctagaatcttttgtcatttctattattaaaaaatcttccctcttaaagttctttctctctttctctctgctatttgaacatgttgactaccttttccttttccaagt

SEQ ID NO: 8670 - DNA, 6000 bp, Homo sapiens
cacaactaggcaccaccattcccagctaatttttaagtgtttgtagagatgtggtatggctgcgttgcccaggcaggtctcaaattcctgggctcaagtgatcctcctgctttggcttcccaacgtgctgggattctaggcgtgagccaccgtgcccagccatattattttttaaacctaaaacaatatatttggtatagacaaaaatgaaaccttactcttgctttaataattcttcgattagctgggtgcagtggctcacacctgtaatcccagcactttgggaggccgaggcaggcagatcacctgagctcaggagtttgagaccggcctgaccaacatggagaaaccccatctctactaaaaatacaaaattagccgggcatggtggtggcacatgcctgtaatcccagctactcgggaggctaaggtaggagaatcgcttgaacccgggaggtggagattgcagtgagctgagatcgtgccattgcactctagcctgggcaacaagagtgaaactccgcctcaataaataaataaataattcttagattaatcatgcagttaaaccttttttggtggccttttcccccccatgaaatgtctttggtatcctttaccatttttctgtttcttaaaaatatgtttcctgttgatttgcaaaactgtttcatagcttacacgtactctcacatttattgaaattactgcttagtttgttgtttttctcttagttttctttatcatattgtctccttttttgtattcatattgatttataggatgttggtctcacattggagatccccaagagtgtcactatgaagaatgtgtagtaactaccactcctccctcaattcagaatggaacataccgtttctgctgttgtagcacagatttatgtaatgtcaactttactgagaattttccacctcctgacacaacaccactcagtaagtaaagtaaccaacttttctttgtatttcctttctccaaagatttgcaaaatataaaaaaacttaaaaaacattcaaggttgaagccaggcgtgatggctcatgcctgtaatgccagcactttgggaggccgaggtggatggatcacctgaggtcagagtttgagaccagcctggtgaaatcccgtctctgccaaaagtaaaaaattagccgggcgtagtggtaggcgcctgtaatcccgctactcaggaggctgagacaggagaattgattgaacccgggaggcagaggttgcagtgagccaagattgcaccattgcactccagcctgggcaacaagagtgaacctaaaagaaaaaaaaaattcaaagttgttgggagtgagaggtagagttccagcatcataagattacatctggcaaacacctgaaatccgaaagcgatgcaccaggacttccaaggcatcaatatattactaaataactttggtaaaatatagtactggccaggcacagtggctcatgcctgtaatttcagcactttaggaggccagagcaggaggagcacttgagcccaggaactgaagaccagcctgggcaacatagtgagatcccatctctaccaaaacaataaataaattagccaggcgtggtggtgcgcatgtgtagttcagctatttgggaggctgaggttggagatttgcttgagcctaggaagttgaagctgcagctattgtgccactgccctctaacctaggtgacacagcgagactctgtctcaaaataaaataaaatgtagtactttacaacctgtatggagggaaatttggttaagacaactacatgtgtgcttactctttcacctagctttcatatttcttggaatttatctggaagatacatcttcaatagtacgaatatacatagacattgagttgtttactgcagtgttatttgtaactgcacaatattaggaagtaaatgtccaagaataggagattagttgaaatatactatggtacatacatgtaatggagtaccaactatacagctataagaaaaaaataagatctctatgaactagcacagagtgattttcaccggtaatattagatgcaaaaagtacatatagtaggctgtcttgtataggactggaaggaaaataaaaaagcctatctattattgacttacctttaaaaaaagaaacaaagaataaatagaaaataatgaacttggttatttataagggatccaaggaatgagacagaaagaatatggaagggagtgaatgttctctgagtgtagctttttttttggtttttgtttattttttggttttgttttgttttgtttttttgagatggagtttcgctcttgttgccgaggctggagtgcaatggcacgatctcggctcaccacaacctctgcctcccaggttcaagcgattctcctgcctcagcctccctagtagctgggatcaggcatgtgccaccacgcccggctaattttgtatttttagtagagacggggtttctccatgttggtcaggctggtctcgaagtcccgacctcaggtgatccacctgcctcagcctcccaaagtgctgggattacaggtgtgagccaccgtactcggcctgagtgtagctttttgtatgtagtttttactgttggcatcgtgtcactattctacgtaagcaaacaaaattaagtacctaacaatggaaaggagaaaaattcttcacagtatacgcaaactgaaataaatgaacccaattttatttttattttatttatttatttttttgagacagaatcttgcttttgtcaccctggctagagtacagtggcacgatcccggctcactgcaacgtccacctcccaggttcaagtgatctcctgtctcagcctcccaagtagccaggataacaggtgtctgccaccacacccagctaattgttgtatatttagtagagatggggtttcgctatgttggccaggctggtctcaaattcccgacctcagatggatgatccgcccacctcggcctcccaaagtgctgagactacaggcctgagccaccgcgcccggccccaattgtatttcatattactataataactaccctgataccaaagttattgaaagataagggggggaaaaaaagccctgaagagaaaaagaactaattcaagtgatttataagcacagtatttgactatatacactcttgtgcaagacgtgatataaaggatggaggagaattgcaaacaaatactgaactcttttgagaagatttgtcttttagtagtgtgggcaaagcaattctgaaaccatcgtagatgcattataggattaagaaaataagttgaggctgggtgcaggggctcatacctgtaatcccagcactttgggagactgaggcgggcagatcacgaggtaaagagatcaagaccatcctggccaacatggtgaaaccccatctctactaaaaatacaaaaattagctgggtgtgctggtgcatgcctgtaatcccatctacccaggaggctgagacaggagaatcacttgaacctgggaggcggaggttgcagtgagccgagatcatgccattgcactccagcctgggcagcaagagtgaaacgctgtctcaaaagataaaaataaaaaaaaggaacgaagccttcttagaaaaatgatttatcccaagactggagcaggatagatacaagataagcctgggacatcttgtaatgttttaataatttttgtaagaaagtaaggaaagaggccgggcgcggtggctcacgcctgtaatcccagcactttgggaggccgaggcagctggatcatgaggtcaggagatcgagaccatcctggctaacaaggtgaaaccccgtctctactaaaaatacaaaaaaaaattagccgggcgcggtggcgggcgcctgtagtcccagctactcgggaggctgaggcaggagaatggcgtgaacccgggaagcggagcttgcagtgagccgagattgcgccactgcagtccgcagtccggcctgggcgacagagcgagactccgtctcaaaaaaaaaaaaaaaaaaagaaagtaaggaaagagcctgtaatcccagcactttggcaggccaaggcaagaggactgcttgatcccagaatttcacaaccagcctgggcaacatagaccttatctcaaaaaaaaattaaaaagtagccaggtgtggcacacgcctgtagtcccagctacttgagaggctgaggtgggaggatcacttgaacttgggaagtcaaggctgcattgagctgtgatcaggcccctgtactccagcctgggtgacagtgagaccctgtctcaaaaacaaaacaaagcaaaaaaaggaaggaaaagtacctaaaaatatcatggagacttgtcataaggacacaggagccagctggaaggaactcccactggctaaatctgggtcaatttgagtgctaaacaagtacattaatgaactgtgaaccactggaaggaaaatgaatcatgagtagaatgtcaagtgccaactggtaaatgtaggattgctggagttggcagcttatcattctgcaaccattgtgttaaggattggatcaggcaagaatcatcaaaggatcctaaatctaggggcagtttcaatgaggagccaggatatttgcatgccttccacatatctcaagggaaaagttagtaattataaaatgggaaaaatggacaccttgaccaggtaataaaagttaacattattaaagaaggacacatggaaatccatgatacctagagaaggacacataactaatatagtactatattccagtcaagaatgcataacctgaatttaatcatgaggtaatatcacacaaaccccaaattaggaatgttctgttacaaaaagggggatcgcatttttcaaaaatgcgaatgtcatataaaacagactgtgggaaaggtctaggtcaaaggaagcaaaaaagactggacgactaggcagtgcctgtcttttactggatgagaagaatgtgataaaggacatgatgattagagaaaaatgttgtttcaatgttaaatgtgctgaagctgataatactgtggttttataagagaataaccatattcttaggaaataatctaagaagtgtttaagaataaaggaccatgattctactgtgtattggttcaaaaaaagattgtgtgtgtgtgtgtgtgtgtgtgtgtagaaagaggtaataaaagcaaacagtaaaatggtatcagtaggtgaataggtaaatctgggtaaaagtatatggtgtattctttgtactattcttgtgactgttgtgtaaggtttaaattatttccaaataaaaattttaaacaatttttaaagtttaaaaagttaaaatatagcacatctcaagaattttcttagtcaaccaattataacagaccatactctaggatcatcagttttggattatttcctttgatttgttgatgaagcactaaactgaaagcaataggaaattttctttatagctgtagtttctacctattgaaggccattagcttctattaggagattgtattgaattggatacatttatttttcacaaacaaaacaaagtctctaattttcacttgtacttctagctagatgaaagagagaaagtggccatgtgcggtggctcacacctgtaatcccagcactttgggaggccaaggtgggtggatcacctgaggtccggagttccatgccagcctggctaccaaggtgaaaccccatctctactaaaaatacaaaaattagccgggcatggtggcgcatgcctgtaatcccagctacttgggaggctgaggcagaagaatcacttgaacccaggaagcagagattgcagtgagccgagattgcaccactgccctctagcctgggcaacagagactccgtctcaaaaagaaaaagaaagagagaaagtgaatttgttcatacatatcctcaaagatctttacagctgccttacatttcagattgt

SEQ ID NO: 8671 - DNA, 6000 bp, Homo sapiens
ttcacaccataggtaatgaagagatgggagtgtgcaagctgagtgctgaagcgctactcacatgagaggtggtgcacgtgaagagagactgtttttgtaccccaaagggcccgcctcatttgggaagggtgaaacagccagccgtgtctctcctccaaggagctcaaagacttggacagaatcttcatcttaggccccagaggcaggcatgatgacaggtagcatctacactgtcctgggcacatgggtattgatagcaaagatgaatggtatataagaaaaggctttaggctgggcagaaaaattcctctgcctagaggcctagaaggtaggaaggctgcaaagctcactgtcctcagctatgtcagtcactgcatattcttcaaagacaacttaaggaggggtcagcaaagaagaggtgactgtgactagaaatggggtgggaagcagagaaaatgttctgagatggcctcagaaaccatcagtaatgcgttctggctggatgcttcttattagattttatatatatatataattatatatataatgtatattatagaatatattctatataatatatagaatgaatatattctataatatatattacattgaattatattgtccatgccttgtggactcacaggaatggtcaaaatgcactgattttctttgcctgggagtgtagataacaaccaaactgggatgctggatagcagctgatttaattggcaggtcccccactcccctagaggtgcaaatcagaaaatccaggaaatgctgatggttttcaggttctgggctactgaaaacaaatcagaggtctcaagaatcaattgaaaaatgctggattatattcagaattcagagaggcacccaatagattatccagaccactttgtgccctgaatcgctttttaaacttggtttgcagagatgcacttgaagaaatctttatgttcaacttagctctttttaaatacgcacacacatatatttttaataattacaacataatcaacactagcatcagaaagctagggtcaccttgaacatacttgtgattttcctttgggtagtaaacaaccatactaagatctttcttttaaaacaaataaaaagtgggccaggcatggtggctcacacctgtaatcccagcactttgagaggtcaaggcaggtgtatcacttgaggtcaggagttcaagaccagcctggccaacgtggtgaaaccctgtctctactaaaaatataaaaattagccaggcttggtggcgcatacctgtaatcccagctactagggaggctgaggcaggagaattgcttgaaaccgggaggcagaggttgcagtgagccaagattgtgccactgcactccagcctgggtgacagagcaaaaccccatctcaaaaataaataaattaaattaaataaataaaaaatatatgtcctctgtgacatccagcttctaaagcagatgttaacattcctatctgagtataacatacaaggcaacccaccgatttttctcagatacctcactgcaaagttgtcatctgaaaattgttggcctgaaggtgggacttgggagtagtcgtggcttttggaacttaaactctcccacctgtgcaaagacccacttgttacttgtgacctggcttacacgctaacatttgtcctgggtgctatgcaagccttggagggagggccagtaaacttaagtgtctatctgcaagcctattatcgactttattttcctgaaggagaaaccaaggtatctaaggtttattgatttgcctataatgattcagtgagttgtcagggaatagggaataaaaccaatttcctggcgtcatttcccatgcacacaaccccttaccttgcaatgcctagactggaagccaagaatccatctcagtgaatttgatcagaaaacatatgaagggtgattctaaaaccacagaagcattgagaaagtcataaagatgtataatatatgatagcatttactagctataaataggggagatgcagggagaaaaatagagaccttgtaaaaccattgggtcaggataaatagaaactgcttaatatttcattaaaaatggattttcataaattgcactttgatatctttgggcaaaagacaatatgtaaggactaaggcgttgttattcattactctttgttattaataatttgaactggtattgaaccaacacatcaacaaggtatagtcgccctgtgaatggggcactccccatgtgttctgggcactattcaaagtgtataaaaagtccacagccaccgtctgcaaaagcacttaggctgtaagggacaacgggtaactaaagtgccctgttgcaaaatggacactgttagagcagttcaaaccacaaaaagtcatgcgaagaaaggtttagaagcaggggaccagagagaaccctacaaatcaactcatacaatcccctcatttaacagaggaggaaattggggcccgagggaggtagagatatttgcccacacttatgagctaattagccgcagagcacagctcctggcttctgattcagtagtgttttgtgtgtgtgtgttgtttttcccactataccacactcagagtgagaggtgtgttaaaaaatctaataagatggtgttccttcaccatccaaagaacagaaggcagatgtgaacacaaagtcaagagcagacaagaaaacagttcaggaactaggcttggaaacgtgaagggtaatttgaagctaagttgaaaagatccttcatttgattcaagggtgggagaagagtgggcaaaatgaaagggcagactgaagttcaattgaagcagtcaggtagatggcctaggggacacaaactgtgtgcttgcctcccttcctgagtggtgctactgtaagcagagattagggggttcacccagagcctgtggccacatgtatccatgggaagactgaccccctccctcagctcatacatgcgagtgcgtgcagcccatgcccatgtgagccacactcatgcacacaccgccatcccaaagacagtccaaatacacaatcatttactcattgaggaaagaaaaggtctcttagcgttgcctgccaaggctgagaaatgcaggggtcggataagataaaattggatattaacaacacataagacatgctgtgtttctaaacggtaccagcgtggtgtgtatgctgtggattagcggcagtgttaaagttcagatccactcaactttccaattatgcattcacgtgacaagtaaagcttttttcacccaatgtgaactccttagcgtctcctgatggcgaccacacacacagtccccatcaccatcttcagagagcaagccagtggaggcccccctgctgctgctcacaacacccatccgaaataagcaaagtgctgcatttgcttcttcctttccaaaacaaaacaaagcaaagcaaaacaaaacaaaacagaaagcctctgcctcatgctgaattctcagagaactgatgaatctcttttctttggatccagttccccatccctttcctgagagctgtggagccctttttcagtacgaaggaagtagggtcagtcaccactccccttgggccttctccagggtgtctggccctaaccttctttccttccctttgcttggcttttctccttccctcgctaacttggtcttctcactccttctcatccacaatcgctatacaggaagcagcaaaatcaaacctgggagagaggcatgactaacaagttctttcccggtgctccctgctgtcaaccttaggacccgggtgggaggacttcccaggggaggagagggagcagcaggctgggtgcgcagggggcacccccagatttggtggacttcgcaccagatcaatggtttaaactgaatatggtggaccagcgaaaatctgcttccctgtttgtcttcagccagccacttcccttcatttacttgcaaaaggtatggtgtcttcagtggtgtgttattaaatggctctaacttttaaccttagcaagcaggaaatagggctgttaaatgatggagttcacagttcatggggaagaaaggactgtgttgtcaattggctgtagacttctgtgctgctctttgccattactcaaagccattctaaggtgggattataaactcacactggaaacacatcactggacagtgactctacctccattcagcccatgcctggagactttaagggccccatgactcccagccaccagcataaacactgcaaatgtgttagaagaaactacaagcttaaaacctaaaaacttggcaaggatgttggatccagacaggcatctctgagcctcagtttccttatccaatgaagtggagataagaatatctaccttctggggtactatagatataattgtttatactcaaagatattttgttgcatctggctgaaaagtcttcaaatataccagtttccccagttctcttgtcccagccctgttggtgcccccaaacacttggcatggtctgaatatcaggagccgaaacatctagttctcctaagcaggagaagtcgctgatggttgcagagttggctgtaagtagatttacagagtcccttggttgttacagctatgacagaaatgatttagaagtgatggttggttagttggtttttccctctacccttattcaggaaaaccaagggaaactcacatatactttgctctagttacttttttttttttttttttttgagcagagagcacaaaaaagcataaggtccatatggcagttattgatctgggccatctggaaagccaggacttgctcccaccatgtaggatcagaagctgttccaaaaagccttccctcccataagagatgtattggtcagatggggacagggatggatttcattacagggcaggactacagtgagaggaagctggagcaggactctgaaggactgtctgcaaccctgaccctgccacaaagatcagagagaaccaagaaagtgttgattgacacagggccattgtaggtagagggtgcccctcatcatcttgtccgctcatgggtgggatggcatcaagtaactaacaaaaacaaccgtgaagcactttgcaattagaaaatgctctgcaaatattcctaggtgcctgcaacatgaggaagagggagtgtcaagttcaagctagtgagtgaggtctggtagccctaaaagatgatatttttacttcattttaaacagatattctacttttctctttcttccttagcttctcaagtgttttccttcttctgcctgctctcagcctggaggcaaaattttccttccctctaaaagtttctgggaagaccactgataattttcaagtagaacagtgtgagaaattaattttttttacagtgtttctttaaaaagcccaaaacaacatacccactgattatttttaagcttgagggaaagaaaatttgacagaactttcccatccccttcaaagactgctcaagtggctgaactacaaacaggggtttcaataacatggttttgcatcttacgctacaggtatttcaagccaacaacgatgcaactgaggtggttctgaacaagctccacgctccactgctgacaaggtttgttagaatccgccctcagacctggcactcaggtatcgccctccggctggagctcttcggctgccgggtcacaggtgaggtgggggctccaatgaggttggggtgctgattgagccctaggctctgctccctttcaactctctgcaaacagcatgactgcaccacatgaccttcccagaaagactggctcaaggactcaagtcctaccagagtttgtcttttcattcattcattcagtatacatttattaagcatctacgatttctattaatagctaacatttatggaatgctaactaggtacagatgccattctaagcacctaagatgtaacatattttattatc

SEQ ID NO: 8672 - DNA, 6000 bp, Homo sapiens
attcagtggttttctgtgtgctcccagatacaatcaaccatcaccaatatctaattccagatcattttcctcactccaaaaagaaaccccatgcccactggcagtcactccttatttctcccccttcttctacccctcagcactaatttactttctgtctgtatggatttgcctattctgggcatttcatggaaatggaagcctttatgaccggcttctttcacttagttttgtggcttatccatgttgtagcatgaatcagtatttcattcctttacatggccgaatattccattgtatggatttaccgcattttttttatccattcatcagttggtggacatttgggttgtttcccattttcagccatgaaaaataatgttgttgtgaacatttgtatacgataaaccctgatgttctaattttcgagcccatgtgcctaacctctatacctgactgcctccctgtgttgacaggaaacttcttgggaaatgtcctatctccatccttttgggaatgtcacatgcagtgaaatgcgcctagagtgggtttgacttacatcacatggtctctaatccctcagcaaacatgagttcatcttgttttggttggtgttacagaataacaccctcagcaaacatgagttcgtcttgtttttgttggtgttacagaataacatgcagctggctcttttttaaaaaatttaatattaaacgtccttcattgaacaaatatctgttgagagtctttgagtgactgggatatggccataatcaaatgaacatggctttgccattctaatggagaggaaggcattgattagctacaaactgtgaaacatactttgaaagaaaaggatgtaaagagagctgatcatagggggccttgcaggataaggagtggcaatcttgggagaagttggggggatggtgtgccaagcagggaagatggcaggtgcagcatgaagccaaatgtttggaatcatagcatgttctttcccttcatccctatgtcccagggtctctttacttcataaacatggccaagtggaaatcctactttatgtctcttctgtataatccctttgtcatggcttaacttagtggcctgtgcccctccccactgctcctggaaccacaacccacattgttacaagcccctgaaggaagttataaacaccttatcttctactaggacaggtgcccctggaactgtctggctgggcaagccatacttacctgcacttccctattccatctgtgagtgattcagacttgactattgttatcatactaaactaaactggggttcactcacccagcacagtaagaccaaacatctacactgagatttgcaatgggagaaaggaaggcatttatgtgcagggcacaaagcaaggagtgttaggaggcttatacttgagacccaatctctctaatggcttgcaagtaaaggtttttaagagcaaggatacattttaggaaaacagaagttacaagaagaaatcgcaaatcaatacgcagaggttacacattggtttggtcatgagaagtgagggcttgcaggtcataggtgaattcagagattttctgatttgcaattagctaaggaagagaagcttggtttaaaattcggggttagcagaaaagaatgtttgctcttgctcatgagtgtgacttcctccaagaacaaagaatggctgtcagagttcagtcgttatttccccttatctgaggtctgcctgccaaagaatccatttggtgggagtccaggtttctgaaaaacaactcggggacatatgttatgatgtgatctgtagtttctataggaaaccaaacatctctggactctaactttcttggatattgttttaggctactattaccttcttgcttatcaagtgccttatttatttctcagggccaggtaggtgcctggaatttccttcgaaagaacccaagattttcctttatttccatgcttggaggaacccacaggcccctaaaagggattctcacttcatctcaccattttggaccttcctcaagatctgggcccagagcattctgacttctgcagccccacctcacagcctatcaaatagattaaattgctcctgcatcttatgtcacatatgtctttgtaacttggtgagctaatctgtagtggattcattgacatgtagttatgtttttatagccatttcataaaatattcataaattcaatgtttgccattttagtattctagattcagcaaatttcttattttaagtctcaaacattttgcaggtcctttgaaatcttgcaggtgggtcctggctccattacttatgggtcgtaggtcatacaagggtctgaaagagttagcaccttagaagcaaacctctccatagggtccacgtttccagaccttcctattcccaacatgaaattaccttcatgcacatctttgggtctctcctctattcaaaatgccagctatcctccatttactttttgggaaatctgctcttgccaacagagatttgttttatcttaggatctacttctttcaccccactggaatatgtcccaagcctgagtcattcagcctgcagcaatccctgagaaaaaaaaaaaatcggcctttgcctggacactcaagtgatacctgaggacaccttgactcctacagcaccaaccagggcaggcctgggtctccagcggagctactctttagggatcgtcattatgacgaacagacatgccagattcctctggctagtgtccagtgcagacatacacacacacacacatacacacacacacacacacacacaccattcttagtacagtcaaagctcacaggagaaagaaaaatgttttctaataccttcttaatttgcaagaaggtgttaggaattcaagggatggtatgcatagtgatgttagtttcatttcttcagctccttcctccaactcatgttctgtagggacttctgggactaagaacaggacccacatatgagcaacaggattttcagagcaaggctgtggttggaagggctcagaccaacgtccacagcagagtggaggtctagtataaagaatgtgaagtttgtagcatctcttgatcccgctattcctacatgcttgcttaagccattcttcctctagatgaactgttctttgaaggaaacctgcctaatgtctgcctgctcaagaaggtggacctgagctctgttccctttgcaaccttcctggagtcttattgctatctagatgaactcaaagcaagatgctgccgcccccatgactttgatcattgtaagctgccaatcctcttgggaggctgctcccagcttggactgagctgagtcttcgcatgccttgaacaatgaatttgcatcctggttatgttccccatgggggccagccctgtccttggagtggcccctctaatcatgttgctcaggcttcttctcccttcctgggccccagaacacctccggtgccaaacttgtgggtgggaacaggaactcgcgtgccagccaggtgtgcatgactagctctgggcaagtctgttctagtaattcaaggtaccacctctcactgggacagcctagtttctacacaggtcttgctctgggaccgccctcagcagtgtggttagcaggcagggccagtgtgaccctccctttctgggcctcagttgagaaacctgaagctcaggagaggagtcactcccctggcagatgggtggctgggccagaagcagataccaggctttctgactcctgctctaggattctcaccacgtactggctagacttatacttctcaaatcttaatttcctaaaggcaagtaacagtttgaatgttgttatattgtgatgtataataagaaatatatgtttgtctttgtttcctggacacagctcctgaaaccataagtggtgggagcgataaacgtgaacaaagaatcttttgttattcaaaacagatccctttcgatcacacctaagtttatgtaaaggagatgtaaagtctctaaggatgagggctagttgccagggaacaaaacccttgcgattagagggaagaaaggagagagagattgaagattgatttgatcaccgatgggcaacaatctaatcaatcatgcctactatgtatggaagcctacataaaaactcagaagggcagggttcagagagctttcaggttgctgaaggtgtggagggtggggcacccagagatggcagatggggctccatggccatacccccatatcttgttctttgtactttttcctctggctattcatccgtattgtttgcaatatcctttgtaataaaccaaacctagtaaataaactgttttcttcagttctgtgagccattctagcaaatgattgactccaagaaagagggtgtgtgaacctctgatttttgccaagtcagacagaagttgtgggtaacctggggacctactacttgcaattggtgtctgaagtgagggcagtcttgtaggactgagcccttaacctgtggggtccgtgctaactcagaattcagttcagaatggaattgaattgtaggatacccagctggtgttagagaataggtccgtgtgcaagaaaaattcccgcacatcatggacataacagacaacgtcaatgatgaggaatccagcaagttcgggatagagaattggcagggggtcctcaggggtctctccaagtcatcttcaaagtgttgctataacttttcagagagggagaagcagacttgtggagctgaagagaaacacccagaagctcaggtgaaagctgacacggccatagttggttcatattaaccatgtgattaaaatggttaaatattaatttgggttcttacatatcaaagggtaaaattcagagcaagggagaggtagacaggacctgtgaaaagcagtggttagtttagggaaaatacctaggagccctgtgatttggagagtgaaaactctttattaccgttgttactttaactctttccaggatggcctgcctccttcgctcatttcagagaatttctgcaggggttttcttcttagcactttggggcatggttgtaggtgacaagctgctggtggtccctcaggacggaagccactggcttagtatgaaggatatagttgaggttctcagtgaccggggtcatgagattgtagtggtggtgcctgaagttaatttgcttttgaaagaatccaaatactacacaagaaaaatctatccagtgccgtatgaccaagaagagctgaagaaccgttaccaatcatttggaaacaatcactttgctgagcgatcattcctaactgctcctcagacagagtacaggaataacatgattgttattggcctgtacttcatcaactgccagagcctcctgcaggacagggacaccctgaacttctttaaggagagcaagtttgatgctcttttcacagacccagccttaccctgtggggtgatcctggctgagtatttgggcctaccatctgtgtacctcttcaggggttttccgtgttccctggagcatacattcagcagaagcccagaccctgtgtcctacattcccaggtgctacacaaagttttcagaccacatgactttttcccaacgagtggccaacttccttgttaatttgttggagccctatctattttattgtctgttttcaaagtatgaagaactcgcatcagctgtcctcaagagagatgtggatataatcaccttatatcagaaggtctctgtttggctgttaagatatgactttgtgcttgaatatcctaggccggtcatgcccaacatggtcttcattggaggtatcaactgtaagaagaggaaagacttgtctcaggttggtgggtttatttcttttggactgccttgtttcttccaggctctgtcctccctcactcatttggctccttgagccgactgtcccttggaggatttcctggagaaacggtg

SEQ ID NO: 8673 - DNA, 6000 bp, Homo sapiens
cccagggagagtggagtgcccgcccctcccctcccccaggacggctggcccctgggagagcccctgggggagccagtttcctgtaagcagaagggcaagtggttgggacccagaggtgtctgacagttgtggacttagagcccagaggaagggtttggggtttggggctcctgggacgccgcaggcccctgaggacgtccatcaggatcctggcagtgtggaggtgtagggtccagccctacggggcttagcgggtgttttccctgtgtgtggagatgagggattgtaataaataaagacacaagataaagagagaaagagaaagcagctgggctctggggaccactaccatcaagacgcggggaccagtagtggtcccagagggctaggcccactgatatttattgcatacaagacaagggggcagggtaaggagggtgaatcttctcagtgattgacaaggtgaagtaagtcatgtgattacaggatagggggcccttcccttttaggtagccgaagcagagacggaaggcagcaaacgtcagcattttcttctctgcacttataagaaagatcaaagactttaagactttcactatttgttttaccgctatctgctacgaacttcaaagaggaaccaggagtacaggaggagtatgaaatgcaacaaagagtaatattaaaagctaatgattaataatgtttataataatgattgataattgtccatgatcatctctatatctaatttgtattatgactaatcttattccaactattttctttattatactgaaacagtttgtgccttcagtctcttgcctcggcacctaggtactttcgcccacatggaggcagaggtgacaggcgtacagggcagtgtgtctggacccagatggcaggcacgttaacgaccagtgaccagggctctgcccacctggcccggcgcgttggccccccagcgatgtggcttcacgccggctgctttcctgagcgctcggggtttaggtcctgttctgctgcctctgagcacctgtgacctgaaaaggccctaccctcggcctgggtcccttggggtgccactgaccttctgggaccctgaagctgcctgtgtggtaggcgtgtccacccccacacccacccaaacgatgcagaggagtgaaaaatgattcctcgaggagctggtccagggccgggcgcggtggctcacacctggaatcccagcactttgagaggccgaggtgggaggattgcttgagcccaggagtttgagaagagcttgggcacacatggtgagactctgcctctacaaaaaattaaacatagccaggcgtggtggcatgcacctagagttccagctacaggaggctcttacaggggaggagggacaagcctgagctcaggaggtcgaggctgtggggagccccacgtgactacaccactgcactccagcctgggtgacagagcgagaccctctctggaaaaataaaaaggagctggtcagggaggccgagagcaaatagctgctagaatgtggcgctgcctgggacggggagggctgggggcccttggggtggaccaggagcctgagttgagggttaggggcaggtggaggggctgggaagctcggggctgtcttaggagagccctcctgacacctaggccctgggccgggttcctcctggtggaacatcacagacctgagccctcccactcacttttccttggaccccacaggcaaggagctggggcggctgtctgctcccaggctgaggccccgggacgggcccctcctcgctttgttagccggttagacccagggcgggcgcaagcccttggcagtgctccccagcactgccccttggacctcaggggtgtggggaggacagaccagggcaggacccaggaggccacaagggctggtgggggtcatggtcctggcagccccagtcaaaggctctgccctcctgcacccacccccagagggggatcctctcgagggagcatgggccctgtctccccacctgcccttctgggagatcaagagttgctgtgaagtttctagaacagtgcccggcctggcggacgggcacggaggtgcctcctgggtgtgcccgggtgcggcctgacagggctggggtcctgttgggttgtgggcaggtcctcagacggcctcctggctcctgcctcgcccctccccacaggccctgtgccagcggctgtgcaaacagaggccaggaagcgaggtgatgctccctttgtttctggcagagtgtgtggcacctggagctaccttccgggttccatggccctggggccctggggccctggggacagggagggaatgggatgcacagcggccaggggtgttcagcgtcaccggtggaaggggtgaaacctgttcttcctggtggtgagggtttgccccttgactccggaaagcagagaccgtggagcagggcccacttcaaagcacagtgctgggggctgtggcctcggccctctgtggacgtgggcggatgggtggccctggactggtgaaggactggccgggagttctgtagggcccccacctcctgccagcgcccagcccacagtcgaccactgcctgcccggggcaggagacttccttcctgcagccccggacccgggatctgagacctagaagctgactccatcctttgactgctctgttctgagctaggccacccctgcccctgccccgaggtggccctgggcttgcccgcccgcctgcagtgtcggctgaagagggtaacgtgcgtgcgccccggctgctcccggctgctcccggctgctccccggctgctccccgctgctcccggctgctccccggctgctccccggctgctccccgctgctcccggctgctctcggctgctcccggctgctccccagctgctccccaccggccttgggtctggtgggtgtggccctcctagtgggaccaggccacacactggagcacatgggcacggcaatgccaatgccgatggaggcgggttcctgggcatgtggacctgtcccttactcgaagcagctgaggggcctccagccagccccgtccgcaccccaggggttagggctctgccatgggggcgtgggcatctgctctgacaaacaacgtgtgcatttgattggtgttcctgagtcaccgtggaccaggcaggctgccagagcggctgattcttagcggggagctggggccgggcagacaccctgactccctggggctcccagcagggccccactggcaacaggcagcctcctccctctggccgccgggcctccgtccctttcccagcctggggctgggaccaccgctccacaccacactgcactgcccttgtctgccccagcagggggtgaaggtggctggtggctgaggaccccctgcccaggcccacacttcttgctcaggccccataagtcacttgggatctggagagctggggactttgacctgggagggaggcatctggtcgtgaccctcaggcgtgtgtagggaggtgcctggccgtgaccctcaggcgtgtgtccctggcaggttgctctccaccggccccaccgtttgtaacacatggctcggccaaggtgattctggggtaaggacccatgaggcgccatcttctttgttcctaggctgagcctgtggtgccctgggcagggtgggtggaggaagcagcagggaggctccttaatggtggagtgaacacccacacggatgtctctggatagtggaatgcggaggatgcagggcacgccggtggagagctgcccagccgtgccagcaaggccccggcatccctcccacctgccgttagcaccgggagctgctctgctggcccctcccacagactcgggctctggaggtctacagagcagctgggagggtgatgcctaggcgggggcggagatgccaggcccctgggctgcaggtggaggtaaatggggaagggaggctgggggtctctgggcctttcgccagcagccgcccagcccagggtctctgatgccagggaggtccatgtgtgctcggcccctcctctgagcccctcagcccagccttgtttctgcctccatggctatggggcctgcacccatccgagccaggcactggctagggcagggaggctgccttgggctggggccagtcccggaatccaggctcagctggcaccgacagggaggggttgtgggaaggtgaccagccgtgtggagagcttggcgtcggagggcatggtgggcaccagcgctggtgggatgtggcgagggtggtggtgactcatggcgcgtggcccgtagctctgaggagcatttgcgttttcctgtggattcactgtagcgcctggtcacaatgttgcagcatttccctggctgcttgtctcggaattaatatctatttcctgaaaagagaaatgaactttcttgcagtaaaatctaaacaaatatttatatttattttccacctccatgtcctgtttcaaacttattgtccagcccaagattttaaaaagtcagattttcttttggtgtgaagcaggctcaggaggaggaggagggggaggaagaagaggaggacgaggagggggaggaagctgggaattgggctgagctttcctcgctcatccttgcagtggccacagggccctctgccctctcgtctgcgtcaggtcctgagttctgagtccagaagccgtcgctgtgctgttggagcccaccaagcccgtcccttgtggggacagctccctccaagccccccggggggatggacactgagggtggggcaggggagcaggggtaggccccaggcaggtcctcccagggcctggggaacacaggggcccatcgagggctccccagactccctcagccagttcttcccgagaacagaacagttaaaaccaagccctccgatggaggtgcggggagagggcgtggctcccgtcccaggaggcaggtgagcttctggggattccagttcacctgccccacagccgcaccctgcctgtgcctgcaccctggggagcccagagccggcaggggccgaggcggtgggacctcgggggagctcaagcctcgactgtcccctcgctggaggccagaggccaagatgatgtccatgctgggcggcttgcagaggtaaggggggcagttggaccccccaggtggacaaagcgcttcatctgtggctattctgagagacggacaggagtgggttttgtttgtctttcgaaggaagtgacttggatttggaggctgttcctactcaggcttccctgaattcacctgtcttggcttcgtttcggaagtagggggcccctcctgcccaggcctggtgctgcttctgggtgtttgggggttctgggatgtggggcccagtgagaaagctgccccccaacactgtggcgtggagacgctcgagtgtccgcgtgacggctggggagggtgagacctgctgggcttgggacctcccagcctcggtctgcggctcaggcccatggctgggccgtgttggtgggagtgccaggcgcttgctggagcgttggtcatgcgtgcgcttcaggatgctcccggggctctgggtggtgacggggaggctgggctctgctgtgctgtctcccttctgtaaacagaggggaggtggatttcttcccagttaggtttggaggggtggtgggtgtggctaaggatgccttgcgttttccttctcctgctcgccatcctgtttggggtgattccagggcagtttgaagccgtccctgcgctggcaggtccctgcctccccggggcgtgtgccgccatgaattcagttaccttcctttaaggggtgacttaagaccagctgccaggacactggctgaggacaccccgtcacagggctgagaggtgtggggccggctgcctggcctggaccatcctagatgccccctcctgtggacattgtgaccatattgtgaagaagaggcccaggggctgggg

SEQ ID NO: 8674 - DNA, 6000 bp, Homo sapiens
tcttaaattcttgctctatagggcctggaggccaaaaatagtcttgccttacagtatttgaggttcagactattaggtctgtggcgttgcaataaaaatgtctgtatctgctccaaaactaacccaggctaggaatatacaggaataggaatttaaatgtccatagggtgcaaaccataatttaaagccacagaccccgaactcctctaccacctaatctgtaagctcccttagatttaacccctttctcaccaaacccagcaatgcctattgggcatgcccagttgcatggttagagcctcacacccagttttactttcaccaggttttaccagctgcaaaagggaggaggagacggagggaagagttaaacaggtagaaaacttggttcaagacagagcacagaaggctggagaatgacgacaggctgcagtaaaaagcaccttgtcagacacagttgatcgtcgtctgcaagttggcatcttaccctggtgggttccttttacatctttttggcacagcctaggcaagtcatgaagatttgttgtgattacccaaggcagagccacagtaaggggtggggcaagggacatcggatctagaagaatgccagtgcctgtgtgagtcttgcttgcccctgcattcctcgaaaagctgcagcttcttttcaagggttccgagcaggagaccaaggtgcacaagtaaagccagagctcatcataattatcgactccttggccccttctctttgactgctggaccctttcctggcaccctctcaggtatccccgcccaatcactaccaaaccccggagaagtggaatctccatacagctttccatgggtctagcaggggcctgggcatgctcagtaggctacgtggttctctggttcgtgttcgttcgttctctctctctctctctctctctctctctctctctctctctctttctttctttccgatggggaagagagggtggtgacaagttagaagcgcttgcggaaggtccccgcccccaggatcaggctccccctgcaaggggacgatgcaaaggtaaaagcacctcgctccgcagcatccagacctggaggggctgcgaccacgggccgagcccacccattccccagccaaaggacgggcccgccgctctccatggtactgcggagagctcagctccgcccttctctttcagaaggacagcacccggcgtcacgtaacccagccttctcaggctccaccaccgccttttccttcccagctctttccctctcctccccctcctcctccttctcctcctcctcctcctcctgctcccctccgttgcctgttctcccctcccgcactcctggagatagacgctcaagcctgacgcctctgaaaaggcagcagcagtcgccttatccatagacctcaggaaattcgctttgaccgatgcatgcttcaggctctggctcgagctgaggggaataaccgggcaggtaaagaagctcaatttgggttggggggaggggatggggcgaggcaagctgaagaaggatatctttccccattgtaactgagccaggatctgccacaaatacacagggaaagatgggtggtgggagggtggaggagtgtagatcttggttgttttgcatgaagccttttaaatagatggcaagaagagatggtggaactggggtagtaacttaaaggctgaatgcagtgatgtattagcaaaagaaagaaaataagagacaggctagatatcaaagcaataaaatatctctccatatatttccttccctacctcatcagccccacactgtgcccatcgttaatttgtgcagtagaccccgagctccaagaaactgcactggtattagagatggagcttagagactgggcgggaaagccagagagaattttggctgtgcattggtattgagagactttgcaaaagccaggggtgaaataataagcacttctaaaatttctctcagagatttcatgttctttatgaagatatatatatatattgaagggtgcatggaaaggtgtaggtgtgtatgtgtgtgtgatatcagaaacattaaaatatgcaactgcagccgatgagcgtactgtattgatcctcctagtgacttgggatgaatttgattctagaaatgaaagaaaagattaatgatgctgttagtctgcttttgaattagagcgcttcttcttttggctgcagtaaggatgtttttcagatccctttatttcatcctctaatttgtgaactggccaggtctttctggcacctagagagaatcctcttttctccatataaatacagatactcgctcacatacaatgagcttcctccaagaactgggaaaaccagttaacctccctgtgataagaatgtatatatatctatatgtacatatatattgctctacggtttttctctcttccaccatcccttaaaattgtcaaggtgtgcattagtggaggagggcaggagggacgggagaaaaaaggttatgtgatcaatgtaacattaattaatacaataattggctccaacagagttacacacacaagaaaaaaaaaaaggttttctaacacatgagcttgagaaagggttcaaagcactactcttgatcatgatattccagatttattttgcaaatgactgaaaatttagcagattcctgagtccacttaaaatatgaaagtatactgaataatatgctatttcagatgatttgacgagcctctttcctcgggtttgatataggagaagacaagatatgactggtgattgctgatggtgtggaatgtatcagccataataaataagcaactgagatttttatttccttttgctagtgggcagtgtgtatgtgcgcacacccacactgtgtgtgtgtgtgtgtgtgtgtgtgtgtgtgtgtgttgaaagagagagaaccagtcatcaatttcatctgggaggaacttgaagtgggataccctagcttggtggctctcagctgacacctgtggggattgctctgtactgaagagaaatgctctcagctccccccatggagaagcagcagcacaatgcggtgccataaattactgctagtttcagcttgtaagggaaaaaaagtgttaattgggtagtgagcttctacatccagacaataaatttggggtgtgtgtgtgcatgtgtgtatggtgtatatatattgcagtgtgtgtgtttgcaagaggtggggaatataagaaatagtgagaaaaataatgcacttccttgacatgaacagattatacatttgtaatttttttcaaaaggtaagagtaattttttggttaaaaaatgacttaggaaaaaaatcagtgattatgatttctgtaccatttcaagaacctgtcagattagagttgaataaagagaagtgatttaatagtatagtgagtgattcaaaggtacggttttaaattctagcatcctggagccactgcagctgagatgacatacatgccaacagctcttctgaccacacaaattgtgagggctgacagcaagatacagacttcaggaggagttagatctacacttttaggcaaaatattaaatactttatgcacctttagagaagttaatattagggcaattgagacaatgccaaaaacataaatctggctccaattagtggttttcttttacaacagattattcattaatataaaggagaactatacttgtgtgaaattttgcaagagactatcaagaaaccatcaatattccttctaagaaaaataaaatggcaggaatgctatacaagtctaagctggcagcttcctgccaacagtttaatctaatttgccaattgtaaaatctcttaactgagatttgaataggttgtatttttactgtccacagaacaagcacacaacataggtagaaatccttaaaagcatttgttctcccctcacatattttaaaaattaaactatcttgcgaaaagaaaaagataaccataatcaaatttctctttaaaacttcgggttaccaactaacagttataataaactacaagggtgtcatggctgactgtaaaagtgtcatattaactattagaaaatgttaggacttacttgtagtgaggataacaaaagctccatacaagaaggttaactctttgccttactaataggaccaggtctacacttgtgttatgagctgaataatgatttatataatactatattgactttagaccttaattttgactttaattctctgcagatgtctgagtccttaaaaaagacaagataaaaccaaaatgcatcaccaacacacaaccaattgatgtgctggcatcttagcttggccctgcagaggcagagagaaaagaagaggagctgttgcgatttccacatctaacagcttctggctatttcgcaactgctgggtttgagtcctactgttgccgtggctgaaaagagaagtaaaatccaacttgtgagaccacgcacaaggaattaggctttggctgcagcggtgctgaagcccatgctatgacagaagaagcaggcctttgaagctatcctcgggttaagaaatggtgccctaaagaggcaagcatccctttctccgttctgctgtaagacaccacatctgaaggagacagacttgaggcattcacaagcatccaaggatactggctcactgctggcttcctgtactttcttgagaaaagtgttttctttttactgactctcactgcttccttttggcctggtaccactggtggaacctggcagataatgggatttgaggagttaagtatctgttgacactgcagatactcttaaattagttaatcagactcaaatgggtcagtgctttcccttgatcttttgttgaagccttttccagaacgttgtctccaaagtgcatcctccctttggtctggaagttctgtggctaccctgtaccactggggtcaacgttttccagttggaagaggactacagggagagagggcggggttattggaagaagaagaagaaaaaaagaactagataaaggagggcacatccctctcactcccgcctttccccttacctttctgtctctcgggacccttatttcttcgtcacggtgtccaggaccattttgaccctgtcggccccggcacccccccgccgcaccccagccccgagcatggggacggcgctgctccagcgcgggggctgttttcttctgtgcctctcgctgctgctcctgggctgctgggcggagctgggcagcgggctggagtttccgggcgccgagggccaatggacgcgcttccccaagtggaacgcctgctgcgagagcgagatgagcttccagctcaagactcgcagcgcccgcggcctcgtgctctacttcgacgacgagggcttctgcgacttcctggagctgattctgacgcgcggcggccgcctgcagctcagcttctccatcttctgcgctgagcctgcgacgctcctggccgacacgccggttaacgacggcgcctggcacagcgtgcgcatccgccgccagttccgcaacaccacgctcttcatcgaccaggtggaggccaagtgggtggaggtcaagtccaagcgcagggacatgacggtgttcagcggccttttcgtcggggggctgcccccggaactgcgcgccgcggcgctcaagctcaccctggcctcggtgagggagcgggagcccttcaaggggtggattcgtgacgtgagggtcaactcctcgcaggtcctgcccgtggacagcggcgaggtgaagctggacgatgagccgcccaacagcggcgggggaagcccgtgcgaggcgggcgaggagggcgagggcggggtgtgcctcaacggaggtgtgtgctccgtggtggacgaccaggccgtgtgcgactgctcgcgaaccggcttccgcggcaaggactgcagccaaggtaaggcccgacgcccgacccacgggggccggggcctgggcg

SEQ ID NO: 8675 - DNA, 6000 bp, Homo sapiens; identical to SEQ ID NO: 873

SEQ ID NO: 8676 - DNA, 6000 bp, Homo sapiens
ctgctgcagaagttccagccggccccgtgcacgttcccaagtacctcctggacattttttttttttttttgagatggagcttttctttctgttgcccaggctgcagtgcagtggcacaatctcggctcactgcaacctccacctcctgggttcaagcgattcttctgcctcagcctcccaagtagctgggattacaagcgtgcgccaccatgcccagctaatttttgtatttttagtagagatggggtttcaccatgttggccaggctgatctcgaactcctgacctcaggtgatccgcctgcctcgcctcgtggacagtttcatgtggtaatttatcatctcaaattcatcatctcccctcaaggacaacaattgacttccattcctatttctttctctgattgggaccgaggtttgtccctgttctgcttctgttcatcaccactcttgcttttgtttgtcttctgttcgtcatcagtcttgcctttgttctggctcagagacctctgtccccattccttccccgtccccctcaccagggtaggcctcgggctcccctcctgcctggacaccacagtagggagggcccaggatcctgccttgtcgcccacccagcatgcagcagactaggcttgtctcctgctgtgctgggaagtccttctgctcttggaatcctcccaccccacagagtgtgctctgctggccatattagcctataagctgcacctgcttgccttcccacacagtccactgcagctatgttggtttattctctgctttcccaacttcagatttttgtttataaccgtctgtgccctggtgtgacttcactattttagaaagcagccccctcccgacattacaaataccctcctcttgttccaggtcctccccattctgaccaccctgctgctggaaaagtatgggtgtggaggtgcatagatgtgggctggagttctcagctctgtgtctacccatgtgtgtcctctggcaggttaaatgcagacagcaatccagtgatataagtttttttaggttcactagatcatatgtcggcttatccctctcaataaatatcagtgccttactcatgcaccagtaattatctgtatagttaatttggcaattcatcatgtactgctttatggcatttattctactcttacattaaatggttaattcttaattttgaagaagttaaatgtcttacaaattgactgaaagcccaaatttgcccttatatttcttcattagggccttaagaattattgaaaatacagaaataagttctagtgtttgatagcatagtagggtgcctatagtaaacagtaatttgttgtgtaattcaaagtaactagaagagaagatttgaaatattcccaacacaaagaaatgataaatgagccttggcagcatagtgagacctcgtctctactaaaaattaaaaaaatcagctgggtatggtggtgcacacctatagttccagctacttggagggctaaggtgggaaaattgcttgagccgggaggtcaaggctgcggtgagccatgattgcaccactgcactctagcctgggcaaaagagtaagaccttgtctcaaaaaaaaaaaaaaaaagataaatggttgaggtgatggatatcctaattaccctgatttgatcattgtaaattgtatgcatgtatccaaatatcacatgtattccataaacatgtaggattccagcactttgggcggccaaggcgggcggatcacctgaggtcaggagtttgagaccatggtgaaaccctgtctctactgaaaatacaaaaattagctgggcatggtggcgggcacctgtaatcccagctacgtgggaggtttaggcaagagaatcacttgaacccaggaggcagaggttgtagtgagccaagatggtgccattgcacttcagcccgggcaacaagagcgaaactccgtctcaaaaaaaaaaaaaaagtgtacgattatttatcattttaaaaagcacacaaaaaagaattatttcttcatatgggctctttaagaagaatctgttacattttaatatgtgggtagagaaatataattttgaaagtcaggccttttctgcataaaggtggttgctgaagccatgatgcggaggctgttcctggcagcctgagtgagaagagtatcaaattgttaagccctggggatcctaactcttaggagatgaaaaaggagaacgaggagggagccacaggacagaagaagacaggccagccttgtgatggcctgccaacaaaagccttggaggaaggcctataaccaccatcgcctccgaaaccctcataagaaactgcgtatttattcagtaaacagatatggatgccctttatatgcctcttcccttcctaggcactgtgaagacagtggtgtgcaaagcagagacccctgcttgcatggaatctgcattctagtgggggagacaagacaaacgtgtaattcaaaagtaaaaaacttatgaagaatcacatgtctcatgattagtgttataaagaaaaaagaaagcatgcatacaggaatatccacataagcaattttggtaagtagggcatgtctgtagttttattattctaacacaagcattcacattatgtaagttaattgaattaaggagagggtctcgtttgcttaactgaacggaggctatgtgtgcgtgtgtgtgcgcgctcaccattggctgggtggcttcagtgtggggagctatttgtgacaccctgtgtctctagctgaagctgcagtgccagaacagatcaggtgagaaagtgtgagccttctgaagggaggggcctctgtcatcctttgtccgttgggattcactcaccatctctttggaagcccagtgaggcttccacagaaagggagcaacccagttcctgcccgctgaggcaaactggacttgctgagtgctgacatcctttattttgcacctccataaatctgtttttttccagttcagcaaacgtgtggtcctttcttagtgaagttcctcatgatttgtttctgctttttaagcctaaatgcttaattttggggatatttttgtcccatactaaagagatgatcaagggatcctaaaaatattttatttgggtgattttcaaatgtcttttcatagcttaaatttcaatcgtagcttaaggatttcctccctaagtgaaaatagtttcagtttttcaaaaatagaactggtaatgtatggaattcaggtagtaaaaaaaaaaaaaggaatgcaaaaagaaataaactcactcacaattgcaccaccaggccatgcatggtggctcacgcccttaaccccaacactttgggaggtgaggcgggaggatcgcttgaggccaggagtttgggaccagcctgggcaacagagagagaccccatctctacaaataaacagatagctgggtgcaatggcacatgcctatagttccagctactgagaagaccaaagtgggagtatcgcttgagcccaggagtttgaaggtgcagtgagttatgatcacaccactgcactgttgccttggcaacagagcaagaccctatctctaaaaaaacaaagacaaaacaattgtactaactgttgatgacaggtgtactttcttccagatgcctctacgcctataattacctatggctacgtgaacactcttcccctgcagtctgatcgttttttgttggttaaaagtataattgccggctgggtgcggtggctcacgcctgtaatcccagcacttcgggaggctgagacgggtggatcacctgaggtcaggagtttgagaccagcctggccaacatgatgaaaccttgtctgtactaaaaatacaaaaattagccaggtgtggtggcgcatgcctgtagtcccagctactcgggaggctgaggcaggagaattgcttgaacccgggaggcagaggttgcagtgagccaagatcacgccactgcactccagcctgggcgacagagtgagactccatctcaaaaaaaaaaaaaaagtttaattgccagctgggcatgatggctcacaactgtaatcccagcactttgggaggccaaggctggtgggtggcttgagcccaggagttagagaccagcctgggcaacatggcaaaaccccgtctatacaaaaaaaaaaaaaaatacaaaaattaactcggcatggtggtgtgtgcctgtagtcccagctactcaggaggctgaggtgggaagatggcctgagcctaggaggttgaggccgcagtgagctgtgatcacaccactgtactccagccagggtgacagagcaagatcccatctcaaaccaaaaagcaaaagtataattgctattgaaatttatgacacagttattctagcaattaacaaagcatgcccctgattcaatgttcatgtaatccaaccttcaactgccaccttttcaccgaacagaaaatcgcaaacaaaagaaatgagtgaaaacagtccagatggtgtcaaggtgatcatgactttcagctgataagccctggcttctccaagggatcatggagaggccactctgccgtttgtctgttgttcccagcttggcccttctcttgtgatgttgagggacgtggaatccacatggtcccttgcaaatcagaagaagtaatgcctgctgagctgaagtagagggatttgatgaaacttcttgggaagtcaaactcttatactgtggaggctaaagcaatgccatcttggatgctaatctgccatgttgacttctgactaaccccagtcccaggaaggcttctaaggtttctactttcatatacttactgtaaatcttgcccttaggtcaaaacagtcttgccgttataccataagtcctgcccttcggcaaattcttgcattttcctgagggttggatgtcaatgtcctatacattccttcagtatggtatttaagacctgggtgtatacaccctcagtctggggagtaatagcatgggcaaccattatcctgtctcgccgccacccaggacatggcttctgttcgtaagtccccatcacacgtttctttctgagaaactggattcgtcagcctcttccttggcctttgggggtgggtttgcatatgcctgcccaccacagagcacatacctttaatagatatatcccaggaggtaactacatgtgtagatgcatagatttttataaaactgcctttttcttatatttttcagtgtcaataaatgtgaagtactgagtactttaagctagtgcttctcaaactttaatatgcatatgaatgtcccaggatctcattaaaatgctgagtcagcaagactggggcgggcctgagactctgcatttctaacccacttccaggttacactgatgctgtcagtcagagaccctgctgtgtagcaagatcttaaggactgtagagtattcatgtagtttgtgctgtaatttaccaacaaatttcctgctgttggacatttttgatgtttcatttattattatttttttgtagaggcagggtctcactgtgttgcccaggctggtctcaaactcctggcctcaagtgatcatcccatccccgtctcccaaaggtgtgagctaccacacccagccattttagatgtttcaatagagtttatgctttattcttgccattataatttctgttaacattcagttttagttttactcttaatcagtattgagaaaatgcttttcttggaagtttatcttgtttgatgacaggctacaaacatgtaatgcacatttcattccattcgagatgtttcttaaggggctgctgtgtgccaatctctgtcctaggttttagggatacaaaggtgaacagagttctggctctgcagctcattcctccaggagtctgcaaaagaaaattcagttcattgtggtaaacagagatagggacgtgcccagggatggatgtggtggtgaaaaatgacctcagagataaggaaagagat

SEQ ID NO: 8677 - DNA, 6000 bp, Homo sapiens
gcgcggggagccgcggcggcggagacggctgtacgcggggatccttcctgcgacccccgcggctgcttcgcagggtctcgggagtggggcgcacagcacctgcagccccgcagccccggggccggaggggcgcgccagcgagggttcctcgcgcggtccggtccgcggccgggatcctcgccaggctcctggactgccctcggcgctcccacccccgatggaaagtttggggcgggcttggagggaggccgatgttgtgggatcggatttccctgccgcggccccccgcccgcccgcccattccgctggggaggcgggttgtcccggaaagccaggcccccgggccgagccgggccgcgccgtccccggctggagcgctcgccctgcagggagggccgcggtccacggctggccgctcggggtgggcgagggtgtggggtgccccgcctggatcccgcacccctccccccaacccctcctcccggctgcccgtttcctcgccctggggggagctgcgggtgggagcaccgctgccgggcggatcctcggagcacgccacggggtgcggcccgatcctcgggtaaggagccgagatgaggccgcgggcgttttggggggctggtctggggcgcagcccccgctctcccgcgccggggctctgggccgacagggggcgtccgcaggccgggctcgccacgctccccgcgccgccgctttgtttgcgttcaaatccctggagctgggggaggggagaacccggggggacccgggacggggtcttggcggggaccctttgtttgggggtgagcaggtccccagcttctgcgtctccgcccctggcacgggaaggctggagcaggggaagccaatcccgctggcccgcccaggccagggtccctggggcgcagtccccgagttgggaaggttcgtcagagtcgcgggagcgcagcgggtgccggccgtgcgcggcgcgttgccagcggcccgggaggaaccccctcgcgtccccgcccctacctccccccgtcgcctgcgcgcgccgccggagtccccgactcgacccgagctcggtccccccaccgcccctccgccagagggctggtgtttcggaggaggcagtgcgaggaacaggatgaggccctggtcatttccacgcccatcccacccacttcctgcctccctcttgggcaacaaaggggcctcgggaagctgggccccttcgctcccggcccttctcacactcctgccctgctgatgtggaacggggtttggggttctgcagggctattgtctgcgctggggaaggggacaggccgggaccgggacctccgctcgcagccggccgcaccaggtttcccctttggggctttcccgaccgcctaccccaccgcatgccctcgtcgccctaaggagtcttcctcccagaattaggtgttggcagggtccggagccccagtggctgcaaggcctgctgcctgaggttctttcaagaaactcaaacctcttaggcctgagtgtgtatgttgggcgggggtcccctttttatttctcaaatgatttcctgttgcgcagaggtagtggtgggtctggaggccagggagggcttcccggagcctgtttagccttcagccaactcaactcctccccgcttcccagggagacctgtggtcttttaggcagaggccaagtgtggggacttaggtccacctccaaagagaaggggaaggagggcaccggggctcctggaaggcctgatgaggagtcctgtggcctctcctgctgcgggcccctctggtttgctttctctggctgtgatttctgaccatgtcttttccctcagcaggacagctggcctgaagctcagagccggggcgtgcgccatggccccacactgggctgtctggctgctggcagcaaggctgtggggcctgggcattggggctgaggtgtggtggaaccttgtgccgcgtaagacagtgtcttctgggggtgagtgcctggaggggtgaggaggaagtcagggacaggctgctgaggagttgcccccatagtgtgctggctttattctcacgtgtgtggcacagctttctaagaaactcgagttggaagaacgggcagtgtgggttgggacctgggattagcctcctctgggggagctctgtccaactccccaccccagactgcctgcccaggtgtgggagggggagagccttctgcctcgccctctccacgcctcgcttcttgaattgtcactggcgctgggagcctaaagagaaactggaaccgggataaatataaactggaggctctctcccctggctccccaggcccccctaagacctcctactgccctgtacacatcatacactctggtggccctggaagtgtgtgtgtatgtgcacatgctcgcatggttgccggggcacagcggggacccagcagtgctccctgtgcacacacccgtgtgaaaggtgatgtcaggtgtttgtatcagccgtgcgctctggggacctgggatgagctcacctcccacaggctccactcgggtgccagtgaagccctgccatgccggtctgtgtctggatccattgttgcctgcaaagactaaggctggtttggggggaccctgaggacaggtcggcagccatatttggcagctgatgtaggaatcacgtgactgtataaatgtcgtagtgccctgcatgccgggtggcagcaagacttcccaggccccagccccatctccgctctctgagcctctggtttctccggacctccctggcctggctcacagcccagctcccctcctgccatccccacctgtcctagtggcctgctgtgctcgcatctctggcagcctggattggggtcctgctggagtgaagggtttcctgaggcagggagtactcatagccgtctgtgcctcctgctctgctggactctgatagaggcagtgggcagcagggcaaagaaggaagcagccgccgaggaagcgaaggtggggtgggggtgcccagccctgcggccggaggtgccattgaccctgagagcaagagccatcagtctgatggcttcctctggccggaagctgtggctgagatatccttccttcctcccagcagcctggatttgcctcctcccaggctgggaaaggctagggaggcccaggtggggctgtcagggccaaaggctgtttcaaaagtgtcctttattgccaatcagggggtttggctggcatctgcttgtggcatggggtgctggctctcgtggagcaagactgagggctgtcgagccccaggggtcctgcccatcagcagccatgcttacccctgcagagctggccacggtagtacggcggttctcccagaccggcatccaggacttcctgacactgacgctgacggagcccactgggcttctgtacgtgggcgcccgagaggccctgtttgccttcagcatggaggccctggagctgcaaggagcggtgagaggtggggcagtgggaggcagtcgggcctgccagagggcaaggcccagaggggctgtgcttggctaggtggtccctcagcctggctgcccccacagaagtgctgctgggcatccggggcctgccctctggttggggtcagcatgcggcattcctctcctctctggcacttactgaattctgtgtagtggggtggtttggggcttccattctgtactaaaggaagtccccagagaatagggaccatgcctctgcactgggcgtccctgtgttgctgctgcaggctgtgcttgtgacacgtgctcagtccgtacctgtaacgtggctgacatccccttccctttccccagatctcctgggaggcccccgtggagaagaagactgagtgtatccagaaagggaagaacaaccaggtgggtgcttggacgctgctcctggtgctgccttcaccccaggacgtctcctcccattctggccctcgcgctctcactaaccggacacctttctgcccccagaccgagtgcttcaacttcatccgcttcctgcagccctacaatgcctcccacctgtacgtctgtggcacctacgccttccagcccaagtgcacctacgtcgtgagtgctgccctcctacctcggtgtccccagccccccgccctcctcacccttctctggactcgtggatgtggcccacagagccctgcccttaagcatctcctcatcacctctctctctgtccttagaacatgctcaccttcactttggagcatggagagtttgaagatgggaagggcaagtgtccctatgacccagctaagggccatgctggccttcttgtgggtgagtggctgccccccatgcaggctgggtgagtccttggggcttggttccacttgggtctgtgttggccggatgtgtccatacctcatgtgtggcctagctgacctctgtctcccatagatggtgagctgtactcggccacactcaacaacttcctgggcacggaacccattatcctgcgtaacatggggccccaccactccatgaagacagagtacctggccttttggctcaacggtgagccaccggggggcctgtgggagccatgggtgggaggtcccccggggcccagcccctccctgctgacctcctccccttcccacagaacctcactttgtaggctctgcctatgtacctgagagtgtgggcagcttcacgggggacgacgacaaggtctacttcttcttcagggagcgggcagtggagtccgactgctatgccgagcaggtggtggctcgtgtggcccgtgtctgcaaggtaccgagtctcacagcggtgggccctgggagccctgctggcccagcggggctgaccggcagtgtccccttgccgtctgccagggcgatatggggggcgcacggaccctgcagaggaagtggaccacgttcctgaaggcgcggctggcatgctctgccccgaactggcagctctacttcaaccagctgcaggcgatgcacaccctgcaggacacctcctggcacaacaccaccttctttggggtttttcaagcacagtggtgagttggccagggctcccacagagtggggaggagctggggttcaggtcagggacggtgcatgggtgggagcctggaccaggcctcagaggcagtcccggaagccaggtgtccagaagccaaggagaatgctggcacctgcccctttcagagctgcctgtgaaggggcagggccccatgccaggtggcacttgagctgccagggcattctggtacccatggccagtttgtgccaggccctgccttcctgctgcttgcccttagctggggtgggaagagataaggtgggtacctgaccctgggctccctctcgctgtgacaggggtgacatgtacctgtcggccatctgtgagtaccagttggaagagatccagcgggtgtttgagggcccctataaggagtaccatgaggaagcccagaagtgggaccgctacactgaccctgtacccagccctcggcctggctcggtgagtgctagggcagggatgcatctccccacccagctgcggtgccatcccaccctgctgatggcctgccccccacaccctgcccccagtgcattaacaactggcatcggcgccacggctacaccagctccctggagctacccgacaacatcctcaacttcgtcaagaagcacccgctgatggaggagcaggtggggcctcggtggagccgccccctgctcgtgaagaagggcaccaacttcacccacctggtggccgaccgggttacaggacttgatggagccacctatacagtgctgttcattggcacaggtgggtgcatgggtatgcaggcatggctgctcaaggctgggcagaagcccgtgtgcccagggcagggagatttggagctgccccacggccttgtgccctctcatttacaccttctcctctgcaccccccaggagacggctggctgctcaaggctgtgag

SEQ ID NO: 8678 - DNA, 6000 bp, Homo sapiens; identical to SEQ ID NO: 911

SEQ ID NO: 8679 - DNA, 6000 bp, Homo sapiens
tgaggcaggcagatcacaaggtcagtagtttgagaccagcctggacaatatggtgaaaccccatctctaccaaaaaatacaaaaattagccaggtgtggtggcgtgtgcctgtagtctcagctactcaggaggctgaggcaggagaattgctggaacctgggaggcggaggtttcagtgagccgagatcactccactacactgcagcctgggtgacagagcgagactccatctcaaaagcaaacaaacaaacaaacaaacaaacaaaaaacaaagtatttggggttgagggcttcggattcaaaatgggaggccaagaactcattttgtccctccatagatgcctgtgaaataggtgacagatgttcaacagtaaacaagaaacactccaaactgaagtagcagtagaggctcaggtgggctggaggagaaagggcactcactttcctgtggatggttgaaataggcagaaaaggctgcaatccaaagcagggagtgaagggggagagaaacagacctgtaaacaaggacattaactgcaaggctgcctgtaccacagctgtgcccctttttatttctccattcttgtgtacatgggcagcttcctgtttatagtgggcaaaaccccaactactatcctcaaaagaaatggattccactgtctttggccgggcgtggtggctcatgcctgtaattccagcactttgggaggccggggcaggcggatcacctgaggttgggagttcgagaccagcctgaccaacctggagaaaccccgtctctactaaaaatacaaaattagtcgggtgtcgtggtgggtgcttgtagtatcagctgcttgggaggccgaggcaggagaatcgcttgaacctgggaggcggaggttgtggtgagccaagatcgagccattgcactccagcctgggcaacaagagtgaaactccgtctcaaaaaaataaaaaaaagaaagaaagaaatggattccactgtctgaagaaagccatggcttcttagtagatgttgagggcaaaatgaagtaaaatttaggcatgcaaaaactcattgtttcccaccccaaaaagcagttacaaagtttccgtataggagaagcaaaggtgcagccagcatgctggaacggcttcctgcgctgcactctgcattgcttgcccctgctcttctccctagtgctgtgtgtctgtttgggatggacctgggtgttggtaaacattgtggggcagctgaaatcctactgttccaccctggctacttttatacatataaaaaatttcggccgggcgctgtggctcacgcctgtaatcacagcaatttgggaggctgaggcgggcggatcacgaggtcaggagatggagaccatcctggctaacatggtgaaactccgtctctactaaaaatacaaaaaattagccgggcgtggtggcgggtgcctgtagtcccagctacttgggaggctgaggcaggagaatggcgtgatcctgggaggtggggcttgcagtgagccgagatcccgccactgccctccagcctgggcgacagagcgagactccgtctcaaaaaaaaaaaaaaaaaacacaaagaaagaaaaagtaaaggaagagtgcctgttatctcctattccttggaagctccacattcccaattatgtggggtgtagcaggggagacatggtattttacttcatgttctatttggagttttttttttaaatttacttatgtttttgtatattttgttttactatgttgtccaggttggtcttgaacttttggcctcaagtgatcctcctgcctcggccttccaaatgttgggatttcaggtgtgagctaatgtgcctggcctggaatttcttttttaaccaccagaacttctcactttattttcttcaataaagaaacgcatactagtaactgggcaagaaatggagtggggcttagcagcaggtaatttggtttgagccagttgagggccacagagacaggtgactgatgggtacagagtcccaatgcaactctttgaactcttggacttctccctctcagtttcagacaagaggctgcacattcagatagggggctggaaagcaggcgtcctcacctgcacccagccttctttcccctggcctcttctcaataaacatgaacaggaagccagtttttcttttctttcttttttttttttttttttctgagttggagtttcactcagtcgcccaggctggagtgcagtggcacaatctcagctcactgcaacctccgcctcctgggttcaagctattctcctgcctcagcctcccaagtagctgggattacaggtgcccgccaccacgcctggctaattattttgtatttttagtagagatggggtttcaccacgttggccaggctggtctcgaactctggacctcgagcgatctgcatgcctcgacctcccaaagtgctaggattacaggcgtgagccaccacgcccagcccagaaagccagttttactgaatcagaaaacttgttatgggacactccctcctccaggtactggaacgcctacttaaactgaactttattaaaatattactttttttttgtctgggtgcagtggcttacgcctgtaatcccagcattttgggaggccgaggcaggtggatcacgaggtcgggagtttgagaccagcctggccaacatgatgaaaccctgtctctactaaaaatacaaaataaatagctgggtgtgggggcgcacacctgtattcccagctactcaggaggctgaggcagaataattgcttgaacccaggaggcggaggttgcagtgagcctagatggtgccactgtccaccagcctgggtgacagtgagactccatctcaaaaaaaaaattattattattttgaggcagggtctcattcttttgctcaacctggagtgcagtgacacaatcatggctcactgcacccttgacctcccggattctagtgaagcttccctctcagcctctcaagtagctgggactacagatgcatgccaccatgccagtctaatttttttatttttatttttttgtagagaaagtgtcccactgtgttgcccaagctggtcttgaactcctgggctcaagtaattctcctgtcttggcctcccaaagtgctgggattatagacgtgagccatcacacccagccttaaatattactttttcctgttgttgaagtgatacatattcatgaaagaaaacttggaaaatgcagaaaagtagaaaaaagaaatgtcatccacagtcccatcactcagagagaatgtgttagtgtatttttggatactccaaactcagaccctgaaaggtccctaagactgaccctgaaggtggtcagggctagtatagccttaatgagggctggtcaagaagcttgttgatgtcaggcaatttacccgagctcatccagaagcagcggaaccaggaagaaccccatgtcacacaaatctctgaactcttgtgttgactaagctataatatcttgcaaaagatgggattgcaggcatcataggactccctaccctgcattttttaaattttccccagagaggagctgggttaagacaggggccctgattggcagagtttggggttttgaagaccaataataatagggctcttccaatattttttttaagagtttttcccttttaaatttagatataatttatacacagaaaaatgtacaaatcttttttttttttttttttttttttagatggagtctctctgtcgcctaggctggagtgcagtggcgtgatctcggctcagtgcaacgtctgcctcccgggttcacaccattttcctgcctcagcctcccaagtagctgggactaccggcgcccgccaccacgcctggctaatttttgtatttttagtctctgagtatctgggattacaagcgcaccaccaggcctgactaatttttttttgtatttttagtatggacggtgtttcaccacgttggtcaggctggtctcaaactcctgacctcgtgatctgcctgcctcggcctcccaaagtgctgggattacaggcgtgagccactgtgcccggccaaaaatgtacaaatgttaagtatagtgttcagcttgataaagttttacttacacacacgtacccaccactcagatcaatgtatagaacattttcagcaccctaggagtggggttgccaggaggctctctcaagcctctttccaggcagtacccctacaccaccccccaacccctgctaggctggaacgcagtggcttgattgcaggtcaaacttctgggctcaagcaatcctcctgcctctggctcgcaaagctctgggattactggcatgaaccatctcacctggctaacatttattttccctctattgtcttcagaaaacccccaacttttcatctggaataattttagactacaaaaaagttataaagctagtatacccttcacacaatttctcctaatgttaacatcttacataaccattatacatttcttataactaaaaactactattacctaaacttaaattttattttaagtttatagcctagctacatcaccatgttgcatatgacagtgtctcagtttttttcttgcttttgattaccttgatagtttgaggagtactggtgaggtgttttgaggaatatcccacaaacgagatttgtctgatgtttatctttcagttagactgaggtcacggttttttttttaatcacatgtcaagggcaagtgcagtgactaatcactttgattttcacgtggagtggctctacagccctctttccacactgtactcttggaaaggtcgtccccaggcataggccacactcagggtgggtgtggacggattaccacacccctctggatgaggtattattagaattcctctgcaaggaagattatcccttctccctcatttatttaatcacgtatttatagcagcacgggctctgggctgttttatactttaggttataacttaatgcaatgtactttatattgctgctcaaattgtcccaggcgcggcccccggaagctctctgggtagatccctgcgcccttggacgcccggtccttcagttttttgagcacctcaagcttctggcctacaaaacgctcccggctcagctggagctttctgcgcccgggtcctagagtcgcccatttctctaaggcgccttggccctatttttagagagcggtatttagaaaccaagattagggtgctaacaatttttttttaaatttttatatttttaagacaggatctcactttgtaacacttccttttagtggaagcgccgacctcctgggagacccacgccccctgccgccttccgtcccgtttctcagaaaaccacccagacaccccgccccaccggccggggcccgccgcgcatgcgcgccgaggcgtgacgtcagaacggcggccaggacgccggacgtgcggcagttgcaggcgagcaggcgaggaatcgccgtggcgtcttggtgttctccacgctggttcgcaggtgagtgtccctgtttagtccggacgaccctagctcctttcccctctggcccgcgcctctccagattctcctctagagctgcccagcctcgcgcccctctgaggggaccccgcaccgcgccacctccgcggtgtccccactccctaattttccctgaggctcctggccacgggtccgcccacctccctggaccaccctgaccttccccaggtccgccctctcagtctcccctagagcagcccattcgagagccctcccagtgggcccccccggcctctcagaccccttcccatcgcttccccggcgtccgcctccggtcctttccccgagcccctcctctccggccccgcggaccctcctcctttcccgactgcagcctccgccttgcatcctttctggccgctcgggagtgtcccacatgtctgactgccgggacctgctgcggccc

SEQ ID NO: 8680 - DNA, 6000 bp, Homo sapiens
agctgaaggtatgtttgtttggaagaactgtatttttgtgtagttttcaaatttaaaaaaaatgagaaagctgaatggtttcaggtttatgatcctcaagctaaatttaaaggtcttgaaaatggctcaggcatattttacattacctttctttgttaataatctagtcatagtctgtaggatacatgtagggatgactctgaaaaactatgtgaagtgtccatctgtctttcttggactaaatgcttaaaggaacagtttgtaacaaaccgtggtaatataactgagggaagaattgtcctgaaaaaggaaggacacttaaatatttatacatgggaaaacaaaattgaagcttatttttagcgcaaaatagacttatgtcatacttacagctgcagcttgtctttctctttgcatttaagtgtctcctgtcttttccccattttcctgatttttagaaaattaaaggggaaagacaaaatagcagagctaatagaattttattagaaatcatgctggtgtttattccagaaagcattagattttaaaaagtgtgttgtgctatttaaaagtttttacaagttatgtaatgttttccagtagatttataataaagctttcttgtacaaaaaataagaatttttaattattttactggtgttttaaaagctattttatagctcattgatcaaattgcatagattattcatagctgtatagctcagttattaatgtgtacttttttaaaaaaaacaaggatttttaaaaagtctttaaagcttacaagttggtgaatagtgaatttatacattgaatttaatattcttgattttttcctgtttcaaatgcatctgtaaagtaaattacttatttagaaccttctaacatttaaaactctggaatatgcaaatatattagttcttattatttctgttcatatattttcaagctctataaagagcttaaacttactgattcccactcagtacaattgaacatgttgtcaatccgttattaaaatgcactttgcacttttgatatttgccttggtagtttgataatattgaatgattttattggaaaccagaacctaaaaaggagtctcatgaaagagtaaatctattatgttgttttactgaaaattatttcaaggctatttccattcattaagtaaataattactgagtgctgtgagttaggcacctttctggtggatgtacaaagaaacacaaaattgtcataactttgtagatcagaaatgaaaagcaattcatgtgtgctgaaatagatgtgtttataattaattttattctttgtatttgtctataaatttaactttaaacattaacacttacctgtttagaactttaagctaaagttctatcataaagttgaaaggcaatttttaaaagaaagtttatattgaaataagtagaaattttcatgttatatgtgtgaaaaatcagttataaccttaaaaaaaattcacattagaaactgacatatactattgccacacttaatgttaaatcatgttttcctcttaagatattattcattaatagcttttaaatttaataattagtaccacatatatggtacatatcttcctcattacttatttctaacctgttaaagaaatttaactggttccctatacgtttttttattttaagcactcaagtgagagtagttagtttcatgttgccacaacacaaaaacacccttcaaaagctcctggccctgttcttatctatctgtatatcacttttaataatgcagatttaatggaccaagataagtgtttaatatatttggcatttaattctaatattgtaggtaattagatttcttgataattgtatcatagtagttatagtcctactaacaattgtgctctacgtttattgtttttacctgtagccaaccacctccatgaaagtgatgctcaaattgaaaactggtatgtagctgttttgttctatttcttttaaaaaatgaagacctttaatgaaaataaagttataaagttttatataatctgattttgttcgtagcaataatatcttggccaaagagagaagattacagtttcatcagaaagggagaagtatgaattccactggatctgggaaaagtagtgggacagtttcaaggtaacttattctgaaattgtgttggaattacattgtgctatagatgacctactcttatcattttttcaatcttggatttgaccttgatcatatgaaatcagaaagaacacaaaaagagcgtttcctgtaccagcacaactgataggagctttttgttttgttttgttttgttttgttttactttgagattaaataaaatgcaataaataggcttatactgctgctggaacccataaatgagtattttgagccctctcaacagcctgaaagaggaactccatagcggagtaacttgtagttgtagagaaccaaaattcattgttaaggacttgagttaactctgacacaaaaatcagaataaatttttctaagttacagcttgatatttaagcatactttttttcaacacattaaaccaaagatctttcaaatatatagtatagccaggcccagtggctgacaccggtaatcccagtgctttggagtgtcaaagtgggtggattacttgagcttaggaattcaagaccagcctgagcaatatggggaaacggcgaaaccctgtctttacaaaaaatgcaaaaattagctgggtatggtgggatccacctgtagtcacaaccacttggaaggctgaagtggtacccaggaggttgaggctgcagtgagctataattgtgccactccatttcaacttggctgacagagtgagacgctgtctcaaaaaagccaaacagaaaaatacccttgcccctctcccgcccgcacatatagtatattaaaatacatcagtgcatgtgcctatggaatccagtttaaactgttatccaaattataatattagaatctgagcattttgtctgaaacaaattgaaatgtctctctgttgaagttccatctctaactttcctgttttcttcagtgagtcttagaaagcttggattatcactggtatgagagagaagggatactaaatatttaattcccaataggattagagtagttacctttgtgtaacccacactctctgtaccttactcctcctacttcctgagtggaagtggttggagagaagttgaaagtaagctcctccctcgcttctctgaaatcagcttgttatctttattgttcctcctaggacaattgccactcctaggacaaggataacagaaaagctcaaatttcacaaaatgtccctcagttccttttaatttctgctttaatctgttcattccttattcttcatcatctgtcttctacttgttttagctgctttacagggaatctcttaaaatgacaaaacaaataaggtgaggaatcacgtagggaatctctgactgtgttcgttggggttagctcttttctgcaactctagcaacttgagacaatgaaccctttataagggctatttattccccagtacacatgtgtaaacatggtaaaataaataatggtttccagagcagaagctgagaaaaaagattttatcacaggaaatcagtaatatgtattcatttataatgtggtgtggactatcaatttattttatattttcatgtttccttttttgccccctttttttgtagtgtttcagaattgttggaactttatgaggaagatcctgaagaaattctttataatcttggatttggacgtgatgaaccagatattgcttctaaaattccttccagattttttaattcatcatcctttgccaaagggatagatattaaagtatttttgagtgctcagatgcaacggatggaagtagaaaacccaaattatgctttaacaagtaagatttttaagtgttaggcatattattttcttaaattatagcatctacagcaagatggtcttattttaaagccttaattttcaggaatagcactggaaagtaaagagattgattaacgcaaaagccatttttacatgttaaaattaagctattttattactccatttatagtggttaatttgcctatttttcccctcctccccaattcctgacttaagtgctaccataacttatttgcagaaccttattgttgtctacagattgcttttattcaagaagaaaagaagtaggagaggagccttgttaatcttaaatgaagtcagtctgtttcaggaactagtctggctaatttgatcagtttcactcatatctttgcttgttttctttctgttagccaaagattccaaaaataggattccaatcctgcattgttcatggatcagttttaagagatcaataaatccctcaccctgcaaattaggtataaaatatatgcttacatgcattttcttaggagaattttgaaagagtcttaatggagttcaagacttcagaatagaatcacaactgtagattcaatagctagttctttctgttttattcaatgttgccattatgctttgtgcttatttctgattttttaaaaatacaaattctagtgcttagagtaaaaatcttgctccttcccacccagtgaatgtagagaaggtttaagtgttagatgaggaaaaaatagggttttataatctttgtgatctaagtgtagtttttggaattctaaacaataatatgcatttaatatatgtgtatgtatatatataaatataaacatatcattaatattgtttcttttggtaggccgttttcgtcaaattgaagtgcttactactgtggccaatgcgttttcttctttatattctcaagtctccgggacgcccctgcagagaattggaagtatgtcctcagtgacctctaacaaggagacagacccacctccacctttaactcgaagtaacactgcaaatcgtttaatgaaaacactctcaaaactgaatttatgtgttgataaaacagagaaaggagaaagtagtagtccttctccatcagctgaaaaaggaaagattctaaatgtttcagtgattgaagaaagtggcaataaaaacgatcaaaagtctcaaaaaattatgaagaagaaagagtcatcttctatgttggctacagttaaagaagaagtctctggtagttcagcagctgttacggagaatgctgatagtgatagaatttctgatgaagcaaatagtaattttaaccaaggaactgaaaatgaacaaagtaaagaaactcaaagtcatgagagtaaactgggtgaggaatctggtattgtagaatccaaattagatagtgatttcaacatatccagccacagtgagctggaaaatagcagtgagctgaaaagtgtccatatatccacacctgaaaaagagccttgtgcaccactgacaataccatccataagaaatataatgacacagcagaaggactccttcgaaatggaagaggtaggtaaaaaattactgagactggtttcaagttgcagactaggaaaaaaagtaccaaaaatgcttataaaatgagaggtagctaatagatttatactagaaaaatttattctaattttgactttccaggtttatgtttcacaaaccaagaattggtctcaggataatgtgatgtcgaggtaatgggacagttcagtaactcctccagatctttatccactagttgatatttgaaccttaaccctcttttctctctcaagggtaagattttgatgctcaagaaagccctgagagagtatatttaaattcaaagcaatattgcataatagttagaaacacaggctttgaaatcaaacagggctttgagttttgtctgccactgaatgactgtatgcctttgggcaagcttttcttaacatatctcagtggtaaggatatgtgaaggcggctttggggatagttcttgttatatgactggaaagaacatgaa

SEQ ID NO: 8681 - DNA, 6000 bp, Homo sapiens
aacatggtcttcattgggggcatcaactgtgccaacgggaagccactatctcaggtctgtattggtgcctttatccaatcaatgttccaggcaaaacactttttaaaaaatgtatttacttacaagtgcttccatatctacttatctttccaaagatttcatttctgcttctcattgttgtaatagtcttcagtgagataaacttttaaagggtcaatggtagtgcagttcagggtttcaatggccactgagaggaaggagaggcagggacgaggatctgtcaaaggatgggcaagagtggtgtgactcacggagactgttcgtttgtaaaagcaccatcttcatggctgtggatgtgcttcagctgggcaggagcagggacactacactgagaactgatccatccaatcttgctggcaagattttcagtagaaaggaggaaggaatagaaatttacaattgttgacgtgacaatttttagtggtcccatcttgcaaaagatagagaggtgaccacaggagacctaagcactcagaggaagtagaggtttcaaagaagttgactcagttcagtggaattgggccaatgtaggtgcaatggatgtctgtgatcagagaatgaaacacagagttcagtttccagagagggagtgttggattgtaataggagaatgtttcttgtgaagacactacttaaaaaaaattcttactaggttaacttcatggtctaataccgaagtgtccaatagaaatatcatgtaaaccacatacataatttaaacttttctagtgggcatgttaaacaccagcaaaaagaaaccactaaaattaatgtgaataatgcattttatttaaccagatgtatcccaaatattatcctttcaacatgtgaactgtttaacgtagctttttttgttgttaagtcttcaaaatctagcatatatttgacacttacagtatatctcaatttggaatagccacatttcaagtgctcaatattcatatgtagttagtgacaacaatatggtgaatgtttataaatattccatggataaaactaaaattctatcttttaaatttttctatcttttgagatggagtcttgctctgtcacccagtctggagtgcagtggtgggatcttggctcattgcaacctccacctcccaggttcaactgattctcctgcctcagcctcccaagtagctggaactacaggcgcatggcaccacatccagctaattttctttttttttgtattttttatggagatggagtttcatcatattggccaggctgatctcaaatgcctgatctcaagtgattcactcacctcagcctgccaaagtgctggaattacaggcgcgagccaccacacctaggcaatttttctatcttttaaaagaccctctactgaatctgcccaattctgtgaaggatgtcttttaaaaaatccccttacataacaaattctcctccagttatattttggctcttgaataggttttgctttatacatagtgattagattggtgcatgtaggtttgaggtttgagacttatattttcttcacagtttgctgttatcattaaataataatccttaaaatacattttatctgatatcagtaatgtgactcctatgttattttttgaattccccatctcttttaatttgaaaatgatttgtgtgcaagtgggtagctcacacctgtaatttcagccctttgggagaccgagggaggaggattgcttgagcccaggagtctgagagcagcctgggcaacatgctgagactccatctctacaaaaaattaaaaaattatccaggtgtgatggtgcacacctgtggtcccagctactcgggaggctgaggcaggaggatcacttgatcccaggaggtggaggctgcagtgtgccatgttcacgccacctcactccagcctgagtgacagagcgaggacccatctcaaaaaaataaaaatttatttggaatgtgaaaatcttgttttaaagttagaaaacatttttttaaaactccaatatgaaaagctgggtgcagtagcttgtgcctgtggccccagctacttgggaggctcaggtgggaggatcattgagctcaggagtttcagctcttgtggtttgttgactgactgactgattgactgattgattgatttaaaacacaacaaaacccaaaatgactttaatctgatagtttcttttgatgtcagcattctgattctgtccattcttagttgtattctttccactgagtgtaagctcattcctttaacagaaatttagtttttccatcttagttttggaattccatggcccttttccatttccatggagatgcagtgcagcatcttcaagtctctaattcttacatctgtctctttcacttgcaagagcccttgtgattacattgtcctgcccggacatccagcataatctccccatgtcaaaacccttaatataatcacatctataaagtctcttccacctgtaatggaatatattcccaggtttgcgcaactacaatgtagatactttgtggggctgtgattctgcctaccacagacactaagcttaaagtgaaacccacatcttattcaaaacttggaggttttccttcatttggccatttaaatttaatttttgtttctgtcctccgtagtcttctattctccaggcttcagagctctcagcttaccattcaattatctcctttctctccttatattccttttttcattttttaaaaacaatactttcaaagagcaaaaattttagaatttgatgaggtttattctagtgaagtttttatcgtttgtactttttgtaccctaaggaagctttgtttaccccaagatatagtttctacattctcttaaaaacactaaagagttccagtttatatgtttagctctgtgagattgggagaggggagctagatcactcaggtcaggctttcgggatgcctttttctgtctctggacgttgctggggtgacctcactgacacccatggcttcagctaccacatatgctgatggctccaagtctatctgtgcagcccagacccctcctcatctccagaccctggaagctgatgccttgggcagctcctcctatttcccaggcaccaggaatgtgagcttctccctccccacagtcctgctgtcctcagggcccctatgtctctgaaggcaccaccatcttccaagatacatgggcctccgcagggtctaggagtgccagacacgtaaccagaaatcagatgacatcactatctaaataaaacaccactacatggaaatagaacaccactacatggaaatagaacatgggagccccttgaatgtggcaagagcaccctcccaggcatgttccaccctcaccccgggctcatcaggagggttcttaagatgcagacagttttaagggggttggaggaatagttgagaagctgagatgttgcacccacagctgagaatccctttctagcactctgtgtcctcacaaatccccagaaatcgtcctcccctggggagttctcaagcccttacagacctgccctctctgtgccatcctgcatatgcctcccttgagctgggtgtccctctgatggacgcatccattcactgcctgtcccatgggttgtgtccaaaggtggaatctgttatcaatgtggatttctaatgggagtaacttcctccataagggaagcctcagcctcaccagcaatggcagacatggccaggcatgtagacacagaggtagtgagatggaaagtgggcacagcccagagagcctgcccacctcatcctggggcgaccaggacaaggaagcatcagcaatcttgcgagcacatgtaggagtgactttctggagcaggacgagcctcatgggcatgagaccattgtgagtgctcagggtctccccctagaaaggcacacatttaattctccattttgaaatttgaagtagtgcccccacaaattatgcagcccgttctgttctggaggaaccattcttatcagaacttggtgctggattgacttggagaaaagcctggccataatcttcaggatgaaataaaggcctggatgaatggatacttcagtctctatgcagacttgcagaagactggagcctttggcattcagaagaggaattcagactgtgcaagatctgaggccaggctccagctccccaggtcctttggtgagcaggagctccctgaacccaccgtgggtccttgctagggttgtcttgcccatgtgtgctttagacagcagcacctcttattccatggtgtagatggagaatcctcaataaagccttcccaagaatatgatcatcacatcttgagctcagcctccccggagcttttttttatattgacagccacttcagagagagtcctctttgagctttacaagaaatatcctggtgtgaaaaaagaccaaaaccagatagccagcctgaacactctctgtttagagaaagctggcttagcaatgttgtatgtcttttggatgtgctgtgttattcacatatgagaagaaagagtttcaagggttagcaaatagcgtcacattcagcagagaacatgtggttggggactagggcaatggtgactcctcagacctcagctgcagcctgataaatatggttaacagagtagaaggcagtgacatgaaatgggtgtccacagccttgtgttgggaattgaatgagaaagaagagcttgaacttggatgttccccagaggcagcacagggtcagatgagcttttcaagataggcgtgattggtctttcccagggttgggcccataacgaaaggcagttatagattaatgggtaataagtaactggaggagggcactttgtcttccaattacatgctgatttgctaggtggctcaatgacaaggtaattaaggcgaaggaaacaaatgtagcaggcacagcgtggggtggacagtcagctgtcggtggcttctgctgagatggccagaggactccaggttcccctgccgcggctggccacaggactgctgctcctcctcagtgtccagccctgggctgagagtggaaaggtgttggtggtgcccactgatggcagcccctggctcagcatgcgggaggccttgcgggagctccatgccagaggccaccaggcggtggtcctcaccccagaggtgaatatgcacatcaaagaagagaaatttttcaccctgacagcctatgctgttccatggacccagaaggaatttgatcgcgttacgctgggctacactcaagggttctttgaaacagaacatcttctgaagagatattctagaagtatggcaattatgaacaatgtatctttggcccttcataggtgttgtgtggagctactgcataatgaggccctgatcaggcacctgaatgctacttcctttgatgtggttttaacagaccccgttaacctctgtggggcggtgctggctaagtacctgtcgattcctgctgtgtttttttggaggtacattccatgtgacttagactttaagggcacacagtgtccaaatccttcctcctatattcctaagttactaacgaccaattcagaccacatgacattcctgcaaagggtcaagaacatgctctaccctctggccctgtcctacatttgccatactttttctgccccttatgcaagtcttgcctctgagctttttcagagagaggtgtcagtggtggatcttgtcagctatgcatccgtgtggctgttccgaggggactttgtgatggactaccccaggccgatcatgcccaacatggtcttcattgggggcatcaactgtgccaacgggaagccactatctcaggtctgtattggtgccttcatccaatcaatgttccaggcaaaacactttttaaaaaatgtatttacttacaagtgcttccatatctacttatctttccaaagattttattttggcttc

SEQ ID NO: 8682 - DNA, 6000 bp, Homo sapiens; identical to SEQ ID NO: 874

SEQ ID NO: 8683 - DNA, 6000 bp, Homo sapiens
cagggtccggagccccagtggctgcaaggcctgctgcctgaggttctttcaagaaactcaaacctcttaggcctgagtgtgtatgttgggcgggggtcccctttttatttctcaaatgatttcctgttgcgcagaggtagtggtgggtctggaggccagggagggcttcccggagcctgtttagccttcagccaactcaactcctccccgcttcccagggagacctgtggtcttttaggcagaggccaagtgtggggacttaggtccacctccaaagagaaggggaaggagggcaccggggctcctggaaggcctgatgaggagtcctgtggcctctcctgctgcgggcccctctggtttgctttctctggctgtgatttctgaccatgtcttttccctcagcaggacagctggcctgaagctcagagccggggcgtgcgccatggccccacactgggctgtctggctgctggcagcaaggctgtggggcctgggcattggggctgaggtgtggtggaaccttgtgccgcgtaagacagtgtcttctgggggtgagtgcctggaggggtgaggaggaagtcagggacaggctgctgaggagttgcccccatagtgtgctggctttattctcacgtgtgtggcacagctttctaagaaactcgagttggaagaacgggcagtgtgggttgggacctgggattagcctcctctgggggagctctgtccaactccccaccccagactgcctgcccaggtgtgggagggggagagccttctgcctcgccctctccacgcctcgcttcttgaattgtcactggcgctgggagcctaaagagaaactggaaccgggataaatataaactggaggctctctcccctggctccccaggcccccctaagacctcctactgccctgtacacatcatacactctggtggccctggaagtgtgtgtgtatgtgcacatgctcgcatggttgccggggcacagcggggacccagcagtgctccctgtgcacacacccgtgtgaaaggtgatgtcaggtgtttgtatcagccgtgcgctctggggacctgggatgagctcacctcccacaggctccactcgggtgccagtgaagccctgccatgccggtctgtgtctggatccattgttgcctgcaaagactaaggctggtttggggggaccctgaggacaggtcggcagccatatttggcagctgatgtaggaatcacgtgactgtataaatgtcgtagtgccctgcatgccgggtggcagcaagacttcccaggccccagccccatctccgctctctgagcctctggtttctccggacctccctggcctggctcacagcccagctcccctcctgccatccccacctgtcctagtggcctgctgtgctcgcatctctggcagcctggattggggtcctgctggagtgaagggtttcctgaggcagggagtactcatagccgtctgtgcctcctgctctgctggactctgatagaggcagtgggcagcagggcaaagaaggaagcagccgccgaggaagcgaaggtggggtgggggtgcccagccctgcggccggaggtgccattgaccctgagagcaagagccatcagtctgatggcttcctctggccggaagctgtggctgagatatccttccttcctcccagcagcctggatttgcctcctcccaggctgggaaaggctagggaggcccaggtggggctgtcagggccaaaggctgtttcaaaagtgtcctttattgccaatcagggggtttggctggcatctgcttgtggcatggggtgctggctctcgtggagcaagactgagggctgtcgagccccaggggtcctgcccatcagcagccatgcttacccctgcagagctggccacggtagtacggcggttctcccagaccggcatccaggacttcctgacactgacgctgacggagcccactgggcttctgtacgtgggcgcccgagaggccctgtttgccttcagcatggaggccctggagctgcaaggagcggtgagaggtggggcagtgggaggcagtcgggcctgccagagggcaaggcccagaggggctgtgcttggctaggtggtccctcagcctggctgcccccacagaagtgctgctgggcatccggggcctgccctctggttggggtcagcatgcggcattcctctcctctctggcacttactgaattctgtgtagtggggtggtttggggcttccattctgtactaaaggaagtccccagagaatagggaccatgcctctgcactgggcgtccctgtgttgctgctgcaggctgtgcttgtgacacgtgctcagtccgtacctgtaacgtggctgacatccccttccctttccccagatctcctgggaggcccccgtggagaagaagactgagtgtatccagaaagggaagaacaaccaggtgggtgcttggacgctgctcctggtgctgccttcaccccaggacgtctcctcccattctggccctcgcgctctcactaaccggacacctttctgcccccagaccgagtgcttcaacttcatccgcttcctgcagccctacaatgcctcccacctgtacgtctgtggcacctacgccttccagcccaagtgcacctacgtcgtgagtgctgccctcctacctcggtgtccccagccccccgccctcctcacccttctctggactcgtggatgtggcccacagagccctgcccttaagcatctcctcatcacctctctctctgtccttagaacatgctcaccttcactttggagcatggagagtttgaagatgggaagggcaagtgtccctatgacccagctaagggccatgctggccttcttgtgggtgagtggctgccccccatgcaggctgggtgagtccttggggcttggttccacttgggtctgtgttggccggatgtgtccatacctcatgtgtggcctagctgacctctgtctcccatagatggtgagctgtactcggccacactcaacaacttcctgggcacggaacccattatcctgcgtaacatggggccccaccactccatgaagacagagtacctggccttttggctcaacggtgagccaccggggggcctgtgggagccatgggtgggaggtcccccggggcccagcccctccctgctgacctcctccccttcccacagaacctcactttgtaggctctgcctatgtacctgagagtgtgggcagcttcacgggggacgacgacaaggtctacttcttcttcagggagcgggcagtggagtccgactgctatgccgagcaggtggtggctcgtgtggcccgtgtctgcaaggtaccgagtctcacagcggtgggccctgggagccctgctggcccagcggggctgaccggcagtgtccccttgccgtctgccagggcgatatggggggcgcacggaccctgcagaggaagtggaccacgttcctgaaggcgcggctggcatgctctgccccgaactggcagctctacttcaaccagctgcaggcgatgcacaccctgcaggacacctcctggcacaacaccaccttctttggggtttttcaagcacagtggtgagttggccagggctcccacagagtggggaggagctggggttcaggtcagggacggtgcatgggtgggagcctggaccaggcctcagaggcagtcccggaagccaggtgtccagaagccaaggagaatgctggcacctgcccctttcagagctgcctgtgaaggggcagggccccatgccaggtggcacttgagctgccagggcattctggtacccatggccagtttgtgccaggccctgccttcctgctgcttgcccttagctggggtgggaagagataaggtgggtacctgaccctgggctccctctcgctgtgacaggggtgacatgtacctgtcggccatctgtgagtaccagttggaagagatccagcgggtgtttgagggcccctataaggagtaccatgaggaagcccagaagtgggaccgctacactgaccctgtacccagccctcggcctggctcggtgagtgctagggcagggatgcatctccccacccagctgcggtgccatcccaccctgctgatggcctgccccccacaccctgcccccagtgcattaacaactggcatcggcgccacggctacaccagctccctggagctacccgacaacatcctcaacttcgtcaagaagcacccgctgatggaggagcaggtggggcctcggtggagccgccccctgctcgtgaagaagggcaccaacttcacccacctggtggccgaccgggttacaggacttgatggagccacctatacagtgctgttcattggcacaggtgggtgcatgggtatgcaggcatggctgctcaaggctgggcagaagcccgtgtgcccagggcagggagatttggagctgccccacggccttgtgccctctcatttacaccttctcctctgcaccccccaggagacggctggctgctcaaggctgtgagcctggggccctgggttcacctgattgaggagctgcagctgtttgaccaggagcccatgagaagcctggtgctatctcagagcaaggtagtaagttgggccctatctgccactgtccccagcactatcccatctcactctctccatctggctgcttctcccagttgggcctatgtgcttggccagtgcagagttaggaacacacacacatgtggatgcacaccttgcctaacttggggtgggttcctggaaacgagaatgaaaacagaatggaatctgcactgcacagggccattatatatagccaggtcacggggctgcgctcccagcatcaagccttggcaactgctcccatgtttctttcagaccctccaagctgtgctgtggttctggctctggcctcttccctgaccatgcccctgtgaccagacctcccaggctgtgagatgtttatgatgccctcaccatggtggttttccttccagcccccatttccgtgactgtttccctgaagtgcttgcattatacccttgtgcaatactctttttggtttttttttgagatggagtctcactctgtcacccaggctagagtgcagtgacgcgatctcagctcactgcaacctccacctcccaggttgaagctattcttatgcctcagcctcctgagtagctgggattacaggtgcctgccactatgcccagctaaaggttttttgtttttgtttttgttttctttgagatggagtctcactctgtcgcccaggctggagtgcggtggcatgatctctgctcactgcaacctccacctcccgggttcaagcaattctgcctcggcctcccaagtaactgggactacaggcacgtgccaccatgcccagctaatttttttttttttttttttttttgagatggagtctcgctctgtcacccaggctggagtgcagtggcgcaatctcggctcactgcaagctctgcctcccaggttcacaccattctcctgcctcagccttccatgtagctgggactacaggctcccatcaccacgcctggctaattttttgtatttttagtagagacggggtttcaccgtgttagccaggatggtctcgatctcctgaccttgcgatccgcccgactcagcctcccaaagtgctgggattacaggcgtgagccactgcgcctggccagccggctaatttttgtatttttagtagagacaaggttttaccatgttggccaggctggtcttgaactcctaacctcaagtgatttgcccacctcagcctcccaaagtgctgggattccaggcatgacctgctgttcctagttgccttgtgcaatactcttgtggcatgtttgctacacctcctgaactttgatttgtttgccttttaccagctattatgactcaaaattgtcccctagaacatggaataat

SEQ ID NO: 8684 - DNA, 6000 bp, Homo sapiens; identical to SEQ ID NO: 914

SEQ ID NO: 8685 - DNA, 6000 bp, Homo sapiens
actaaaaatacaaaataaatagctgggtgtgggggcgcacacctgtattcccagctactcaggaggctgaggcagaataattgcttgaacccaggaggcggaggttgcagtgagcctagatggtgccactgtccaccagcctgggtgacagtgagactccatctcaaaaaaaaaattattattattttgaggcagggtctcattcttttgctcaacctggagtgcagtgacacaatcatggctcactgcacccttgacctcccggattctagtgaagcttccctctcagcctctcaagtagctgggactacagatgcatgccaccatgccagtctaatttttttatttttatttttttgtagagaaagtgtcccactgtgttgcccaagctggtcttgaactcctgggctcaagtaattctcctgtcttggcctcccaaagtgctgggattatagacgtgagccatcacacccagccttaaatattactttttcctgttgttgaagtgatacatattcatgaaagaaaacttggaaaatgcagaaaagtagaaaaaagaaatgtcatccacagtcccatcactcagagagaatgtgttagtgtatttttggatactccaaactcagaccctgaaaggtccctaagactgaccctgaaggtggtcagggctagtatagccttaatgagggctggtcaagaagcttgttgatgtcaggcaatttacccgagctcatccagaagcagcggaaccaggaagaaccccatgtcacacaaatctctgaactcttgtgttgactaagctataatatcttgcaaaagatgggattgcaggcatcataggactccctaccctgcattttttaaattttccccagagaggagctgggttaagacaggggccctgattggcagagtttggggttttgaagaccaataataatagggctcttccaatattttttttaagagtttttcccttttaaatttagatataatttatacacagaaaaatgtacaaatcttttttttttttttttttttttttagatggagtctctctgtcgcctaggctggagtgcagtggcgtgatctcggctcagtgcaacgtctgcctcccgggttcacaccattttcctgcctcagcctcccaagtagctgggactaccggcgcccgccaccacgcctggctaatttttgtatttttagtctctgagtatctgggattacaagcgcaccaccaggcctgactaatttttttttgtatttttagtatggacggtgtttcaccacgttggtcaggctggtctcaaactcctgacctcgtgatctgcctgcctcggcctcccaaagtgctgggattacaggcgtgagccactgtgcccggccaaaaatgtacaaatgttaagtatagtgttcagcttgataaagttttacttacacacacgtacccaccactcagatcaatgtatagaacattttcagcaccctaggagtggggttgccaggaggctctctcaagcctctttccaggcagtacccctacaccaccccccaacccctgctaggctggaacgcagtggcttgattgcaggtcaaacttctgggctcaagcaatcctcctgcctctggctcgcaaagctctgggattactggcatgaaccatctcacctggctaacatttattttccctctattgtcttcagaaaacccccaacttttcatctggaataattttagactacaaaaaagttataaagctagtatacccttcacacaatttctcctaatgttaacatcttacataaccattatacatttcttataactaaaaactactattacctaaacttaaattttattttaagtttatagcctagctacatcaccatgttgcatatgacagtgtctcagtttttttcttgcttttgattaccttgatagtttgaggagtactggtgaggtgttttgaggaatatcccacaaacgagatttgtctgatgtttatctttcagttagactgaggtcacggttttttttttaatcacatgtcaagggcaagtgcagtgactaatcactttgattttcacgtggagtggctctacagccctctttccacactgtactcttggaaaggtcgtccccaggcataggccacactcagggtgggtgtggacggattaccacacccctctggatgaggtattattagaattcctctgcaaggaagattatcccttctccctcatttatttaatcacgtatttatagcagcacgggctctgggctgttttatactttaggttataacttaatgcaatgtactttatattgctgctcaaattgtcccaggcgcggcccccggaagctctctgggtagatccctgcgcccttggacgcccggtccttcagttttttgagcacctcaagcttctggcctacaaaacgctcccggctcagctggagctttctgcgcccgggtcctagagtcgcccatttctctaaggcgccttggccctatttttagagagcggtatttagaaaccaagattagggtgctaacaatttttttttaaatttttatatttttaagacaggatctcactttgtaacacttccttttagtggaagcgccgacctcctgggagacccacgccccctgccgccttccgtcccgtttctcagaaaaccacccagacaccccgccccaccggccggggcccgccgcgcatgcgcgccgaggcgtgacgtcagaacggcggccaggacgccggacgtgcggcagttgcaggcgagcaggcgaggaatcgccgtggcgtcttggtgttctccacgctggttcgcaggtgagtgtccctgtttagtccggacgaccctagctcctttcccctctggcccgcgcctctccagattctcctctagagctgcccagcctcgcgcccctctgaggggaccccgcaccgcgccacctccgcggtgtccccactccctaattttccctgaggctcctggccacgggtccgcccacctccctggaccaccctgaccttccccaggtccgccctctcagtctcccctagagcagcccattcgagagccctcccagtgggcccccccggcctctcagaccccttcccatcgcttccccggcgtccgcctccggtcctttccccgagcccctcctctccggccccgcggaccctcctcctttcccgactgcagcctccgccttgcatcctttctggccgctcgggagtgtcccacatgtctgactgccgggacctgctgcggcccgccgcctggggtctcccggcgtccgatctctacccctgctgctccctctgctccagggaacttgccttctcagttctcctgcccagaggtctcccctccttaagtcccggggggcgttgaggctttaccctcgcggtgcggtccgcccccgctgcatttcacctgctcttggccttgcaatgtctttagtcataagtgcttggtgtaccttatcttacatatctctcttcatgtttgattctgttactcaactagattgaaaactccggaggtcagggatttgcatagggatccccgccccgccaccccgcttaaatctcaaatgtagaccggttcagggtgggtggaggaaaggaatgaggtggagtggtcactgtaaaaaattaaaggaacatggttaattcaaaataatactgactcatggtctcagcctttaaatttttagtgcttaggaaagggtggaaccaccaccgagggaggagggctgacagctgaggggaggaatattccaaggtcttctgtggcctttggtatgaaccagtaccaattcaggaagtgacttgtccgaagtcacatgaggaattaggacccgagctggcactggtaactgcctgtttagtgtggccctcagtatttgttgactaaactaatgaccaaaacatgtatgcacagacacagctgtgcgtctgtgcccatgcagtgggtgtgtctgcctaaggacctgtgggggtgtgggaatactgctgtgacggttcaattgtggtgctcaggagtgttccctaggttcagaaagttcctaaccctgggctggttggctggatattgataggactggagcttgtctgggcttcctttgtgcctggtgtttactctctgtggtggtgatctctttactcgactcttccctattcgtactgatctccctgaggacaggaatcaaactgtgttgcagggtttccctaataaacagcatagtgtttggcactttgtaggtggtcagtaaatgcttattgaagaaggctgcagaaaagaactcagaacctgacagcggttctttgctagcattatattttaaaggcggtggtacattctgtaagtaaatttcctgctattctcaaggactgagttgattaaatgtgtacagcagtggtatagagaggacagatactcttgtggtgttactccttgggaaggtggaggtttctctcagctctttctgaaagctttgcttatgcttttcagcttgcattaatatttttgtttctcctttcctctgcctgccttcttactgtttgtctaaagaaattaaagaattaccttattaataacagtaactaccaaaaactgcaaaacacactgttaaaaatgctcccaaagtgggggctaattgacccagttgttttgttagttatatatttgcttccacagtggatcatggaaacggaaagttggacttccttgcctctttgctttctttgcctgtctgccctttgatggtgcttgtattaggcttgttgttaagaagtggttcccaactggaaatggccaatgccacgtgggaactgacctctacatgttgatgggtcacccaaccttctttcccttctgtttcagaatgtacctgtgacatctctttgactctccactgttgcccttgaagaacagagatgagttttcttcctttttcataaggaagccacttttatagcgaaagagagctggagaactgggatatcatgaggagttgtagacagttaaacctgaattctagcttttggaacaaaatagtaatgtaattgtagcagttctcacttttttattttttatttttttgagacggagtttcactcctgttgcttaggctggagtgcgatggcgcagtctcggctcactgcaacctccgcttcccgggttcaagggagtcccctgcctctgccccccaaatagctgggattacaggcgtgcgccaccatgctcggctaattttttgtatttttaatagagatggggtttcactatgttggtcaggctggtctcgaactcctgacctcaggtgatccgcctgccttggcctcccaaagtgttgggattataggcgtgagccaacgcgcctggccaattctcacttttggaccatctactacagggctgtttggacatacctcctttaattgtcacagtaaccccatgacgtaattggttgtgcctggtcatacaggtaagaaaactgaggcttagagaggtttagaattttgctgaaggtcatactagtgagtagaaggcaaagtaggcttcaggcttagaactgtcagattccaaaggcagtattttttgtccatctgttgtctgtttcgattcaatgctttcaaagagatacaaattcaaatttaaaataatttaaattgttgaatatggcttacattttaaagctttgcataggttttattggcataaaaataatgttcttttgcagctagtttgctggtgttttattctctagagaccaacagctagggcttagtgtttatctgatgagttttagtttatgcattcagttttgctccaggatataaatagtgaaatgttgaattaagttatggagtggtgtgaaattcagcatgctaaggcaatcaaacagaagtcttctgagccatttgagaagcagcttgatgtccttgttcttagaacagggctgtccaatctttagac

SEQ ID NO: 8686 - DNA, 6000 bp, Homo sapiens
ccacatcctctccagcatctgttctttcctgagttttaatgatcgccattctaactggcatgagatggtatctcattgtggatttgatttgcatttctctaatgaccagtgatgatgagctgtttttgatatgtttgctggtcatataaatgtcttcttttgtgaagtgtctgttcatatcctttgcgcactttttgatggggttgtttttttcttgtaaattggtttaagttccttttagattctggatattagccctttgtcagatggataggttgcaaaacttttctccaattctttaagttgcctgttccatctgatgatagtttcttttgctgtgcagaagctctttggtttaattagatcccatttgtcaattttggcttttggttgccattgcttttggtgttttagttatgaagtctttgcccatgcctatgtcctgaatggttattgcctaggttttcttctagggttttcatggttttaggtcttatgtttaaggctttaatccatcttgagttaatttttgtataaggtgtaaggaaggggtccagattcagttttctacaaatggctagccagttttcccaacaccatttattaaatagggaatcgtttccccatttcttgtttttgtcaggtttgtcaaaggtcagatggttgtagatgtgtggcataatttctgaggcctctgttctgttccattggtctatatatctgtttgggtacaagtaccatgctgttttggttactgtagtcttgtagtatagtttgaagtcaagtagcgtgatgcctccagctttgttctttttgcttaggattgtcttggctatactggctcttttttagttccatatgaactttaaagtagtttttttccaattctgtgaagaaattcaatggtagcttgatggggatagcattgaatgtataaattaccttggacagtatgaccattttcacgatattgattcttcctatccatgagcgtggaatgtttttccatttgtttgtgtcctcccttatttacttgagcagtggtttgtagttttccttgaagaggtccttcccatcccttgtaagttgtattcctaggtattttattctctttgtagcaattgtgaatgggagtttactcatgatttggctctgtttttctgttattggtgtataggaatgcctgtgatttttgcacattgatttttgtatcttgagacttttctgaagttgcttatcagcttaaggagattttgggctgagatgatggggttttctaaatatacaatcatgtcatctgcaaacagagacaatttgacttcctctcttcctatttgaatccctatattgctttctcttgcctgattaccttggccagaacttccaatactatgttgaataggagtggtgagagagggcatccttatcttgtgccagttttcaaagggaatgcttccagcttttgcccattcagtatgatattggctgtgtgtttgtcataaaatactcctattattttgagatatgttcaatcaatacctggtttattgagaggttttagcatgaagggctgttgaattttgttgaaggtcttttctgcatctatgaggataatcatgtgttttttgtcattggttctgtttatgtaatggattacgtttattgatttgcatatgttggactagccttgcattccagagatgaagccaacttcatcatggtggataagcttgttgatgtgttgctggatttggtttggcagtattttattgaggattttcaccattgatgttcatcagggatagtggtctgaacttttttgttgttgttgttgtgtctctgccaggttttggtatcaagatgatgctggcctcataaaatgagttatggaggagtctctgtttttctattgttgggaatagtttcagaaggaatggaaccagctcctttttgtacctctggtagaattaggctgtgaatccatctggtcctgggctttttttggttggtaggctattaattactgcctcaatttcagaacctgttattggtttagtcagggattcgacttcttcctggtttagccttgggagggtgtatgagtccgggaatttatccatttctccaagattttttagtttatttgcatagaggtgtttatagtattctctgatggtagtttgtatttctctcggatcagtggtgatctcccttttatcattttttattgtgtctatttgattcttctctcttttcttctgtattagtctggctagtggtctatctattttgttaatcttttcaaaaaaccagctcctggattcattgattttttgaaaatattttgtgtctctatcttcttcagttctgctctgatcttagttttttcttgtcttctgctagcttttgaatttgtttgctcttgcttctctagttcttttaattgtgatgttagggttttgattttagatctttcctgctttctcctgtgggcatttagtgctataaatttccctctaaacactgctttagccatgtcccagagattctggtacgttgtgtctttgttctcattggtttcaaagagcttatttatttctgccttaatttcattatttacccagtagttattcaggagcaagttgctcagtttccatgcagttgtgtggttatgagtgagtttcttaatcctgagttctaatttgattgctctgtggtctgagagactgttttacttccaattatgtggtcaattttagaataagtgcagtgtggtgatgagaagaatgtatattctgttgatttggggtggagaattctgtagatgtctagtaggtctgcttgatccagagctgagttcaggtcctcaatatccttgctacttttctgtctcattgatctatctaatattgacagtggggtgttaaagtcttccactgttattgtatgggagtctaagtctctttgtaggtctgtaagaacttgctttatgaatctgggtgctcctgtattgggtgcatatgtacttaggatgggtagcacttcttgttgcattgatctctttaccattatgtaatgcccttctttgtcttttttgatctttgttcatttaaagtctattttatcagagactaggattgcaacccctgctttttttttctttccatttgcttggtaaatattcctccctccctttattttgagcctatgtgtgtcttgcacgtgagatgggtctcctgagtgcagcacaccgatgggtcttgactgtttatccaatttgccagtctgtgtcttttaattggggcatttagcccatttacatttagggttaatattgttatgtgtgaatttgatcctgtcattatgatgctagctggttatattgcccactagttgatgcagtttctttatagtgtcaattgtccttacaactgggtatgtttttgcagtggctggtactcatttttcctttccatatttagtgcttccttcaggagctcttgtttaaggcaggcctggtggtgacaaaatctctcagcatttgctggtctgtaaaggattttatttctccttcacttatgaagcttagtttggctggatatgaaattctgggttgaaaattcttttctttaagaatgttgaatattggcccccactgtcttctggcttgtggggtttctgcagagatatctgcttttagtctgatgggttacctttgtgggtaaccagacctttctctctggttgcccttaacattttttccttcattttaaccttaatgaatctgatgattctgtgtcttggggttgcttttctcgaggagtgtctttgtggtgttctctgtttttcctgaatttgaatgttggcctgtcttgctagcctggagaagttctcctggataatatcctaaagagtgtttttggtacatacgtttaaacaaccagatctcctgagaaatcactcactattgggaggacagtgccaagccattcatgagggaaccatgcccatgatccaaacatctcccaccatgcttcaccttcaactctggggattatatttgaccatgatatatggaggggacaaacatacaaattatatcaaaggcatagcatggctactgtgaaaggagggtaaaaacacaaagatgacatcaccactgacctcagggagtgcccagtagactgagggagacaagtacatattttcctgaaggagggcactggattgatggcatgtttagaatgtggaagtagagcggccacagaaaggcagcccggcagagtgctcgcacaaagactgggctagagactccccactgcatgtgatgtatctgaggaaagtcattaaaataggtgatggtcactttccatcaagtccctggtatggtccatggaggcagggttgtcaatgtcatttcggcatttcagaggcctctcagggtttggatatggcagaagacaaccagcaatgattatgcattgcagagatgcaggtgagccccaatttcttgccagctgggaagtcggtgctaaggggccttgctgtctttccttggaacataggataccaatttctttctggacagagagtatttggttggctaaagttaaaatctaaattttgctttgggatgaattccaaaaatattagctttattcaaatttactttcactttatctttctgaatcttcaaggtcctaaagcattgcttagtaattttgtttctaaactcacgttacagcactgggcatgatctgtccaaggcagagactataagctactcttatagtactcttatgagatacatacaagtaggtatctcaaaaaatgatactcatgtattcctgttcttatgagtaaatcattggcagtgagtgtgattttttttttttttatgacaggataaatacacgccctctattggggtcaggttttgtgcctgtagttcttccgcctactgtatcatagcagcttagaatcccagctgctggctcgggctgcagttctctcatggctcgcacagggtggaccagccccattcccctatgtgtttctctgctgctgacctgtggctttgctgaggcagggaagctgctggtagtgcccatggatgggagtcactggttcaccatgcagtcggtggtggagaaacttatcctcagggggcatgaggtggttgtagtcatgccagaggtgagttggcaactgggaaaatcactgaattgcacagtgaagacttactcaacctcatacactctggaggatctggaccgggaattcatggatttcgccgatgctcaatggaaagcacaagtacgaagtttgttttctctatttctgagttcatccaatggtttttttaacttatttttttcgcattgcaggagtttgtttaatgaccgaaaattagtagaatacttaaaggagagttcttttgatgcggtgtttcttgatccttttgatgcctgtggcttaattgttgccaaatatttctccctcccctctgtggtcttcgccaggggaatagcttgccactatcttgaagaaggtgcacagtgccctgctcctctttcctatgtccccagaattctcttagggttctcagatgccatgactttcaaggagagagtacggaaccacatcatgcacttggaggaacatttattttgccagtatttttccaaaaatgccctagaaatagcctctgaaattctccaaacacctgtcacagcatatgatctctacagccacacatcaatttggttgttgcgaacagactttgttttggactatcccaaacccgtgatgcccaatatgatcttcattggtggtatcaactgccatcagggaaagccattgcctatggtaagtcacctctcctttagcacattaggaataatctggctttggaaattaaaaaaagattccttactgaattgtgatttgacattttcatttgttgcatttcaaatttctttccagtttaacagattattt

SEQ ID NO: 8687 - DNA, 6000 bp, Homo sapiens; identical to SEQ ID NO: 868

SEQ ID NO: 8688 - DNA, 6000 bp, Homo sapiens; identical to SEQ ID NO: 910

SEQ ID NO: 8689 - DNA, 6000 bp, Homo sapiens
aaagagcctgcggggcactggcacagcgagcggcaaggctgccagcacccgcgcacaggtcagaggcttggcgacctgggccgcctggagggccgccccttatgacgcagccacatctcattggccgaggcctgtgagcgcctcgcatcccaagatgcagtgctcctgggactggccctgctctctgtgaggctctgtgaggccctgtgatgctccaagaccaggccccgcccactccggcctccaaccagccatggtctccaaaaaggatgggaaaaagaggttggggaaaagagagggccttgactttggctgcctgaagaactgtttttcttaaagtaggctttatatcagtctttttcctcggccacaggagggaagagggtggtgggagtgagtttagtctgaccggggctgaagacatcctgttgtttaggactgcggttctccaacgttccagccccggtgcccatttgcttttgttcatctggattatgcctatcatatgtactgcattagagattaaaacagaattaaaaagacatattcattgggcaatttaagaagaataaacccatgacacactaacaaacctttttatgtaactttttttgagacaaaatgtagtgagaagagtggcatcgttttacagtttttgcatctctctctttagtacttggctctatagagaggtggattctcatgtcagcttctgcattctatctattgtgatattacacatcccccatgtagcttctggaaaactccactgtacacttgtgggagaatgacaatgagaaaatcaagtaacattattacggaaatagttttgactttgtaaaattctcctgaaaaattactggggatccctaggatttcctggctcatactttgagaatcgctagtctagcagagtagtccctggtattctgaagggattagtttaggacaaccctccttccccataccaaaatctagatgctcaagctccttttataaaatgacacagtatttgtatataacctacccatatcctcctttaaacctctagtcatctcttgattacttttacctaataaatgtaaatgctatgtaaatagttgttttacagtattggttttttatttgtattatttgtactgtttttttttcattgttgttccccccaaatattttcaatctgctgttggctgaatctgcagatgtgaagcccaagtatatggagggtcaaatgtgcatgttattcacttttcttgactgctaaaacaaccagggagatcctctcagacaaaaggaaatacagcactatttactgtatcgaaaccattaagacttgcaggccgtgtgtatagcactggggataaacatgggatgcagtgattatttccgctagaactgctatataatgacgatgaattttggggggactttttttgagatctgagttctcttcacctcctccttattctctttttgacactggattctttgctttgataaattgtggggcaatacactagtaaaggtcactcaattccaaggggaaaatgattaaccaaagaacattctaacggttcataaagggtattaggtgtaatgaggatgtgttatctcaccagaacaaacttctgagtttatataacctctagttacataacctgaaacccggacttggcacttggtaagcacgcaatgaacagtcatagtaagctggccaagggtagagttcagtttgaacaaagcaatttgagaacatcaaaggaagtttggggaacagcaagggatccagaatggctagagggtaagaggcagagggagggggcaagcagaagggctagagaggaggaatgagcttggacaggtgggctggggtctatcccagagttttgagagcaaggcagaggactctgaattttctgtgcccaggaagctgctgaccaaggttccagaagtggtggtgaggtggggttattcaggtggcagccgatgcaatgattcagaagggacagctgggggttgggggacaggggggctggggccctgaaatgggaccatgacagctgggtctgagagacagtggtagaaacatccagattcagcacttacttgctggcttggatgcagggtctagaacgaaaagagaagaaaagtcacttctatacagaaacatgtccagagcgcttactgtctccaaaaccatggactggcacctgagtgatagcatgattccaaagccaaaatcttgcctgtaaggaatatatatatatatatatatatatatgtatatatgatatagctatagtctaatagcaaggacagatatgcaaactgctaaaagatacaaggcagaacagaacaaaatgctgtttttctgggattttggaaattcaaggaattcaagggattcaaggaaggtggctttgcttcccgggagggtcctgtagatgatctacagggcactggacatgtttatgttgctcctttagtaataagcctgtcattctgatttgatgaaaggagatgaaaggagctggtagtgtgtctgatggtggcctactaacttatgtcttcagcttaaaaagaaagtagcttcaaaagggttccagaaacactttccatggacgtgtcactctttagcagcccccaaagcaagaccatcatattgctgccctgctgtgtgatttctcagcccctagagcaccatcccctgtaattgcctggtcatgagtttgtctctgtctacctgacccctcctttcaggcaaggaccatttctaacttgactttctgggcctagttcctagcatagtgactgccatccagtagggctcacacgttccataaatatttggcagatgagggaattagcaatgggttctgctttggtttcagagcagatattaattggattgcttagtagtggttctctgttgtaattcatgagcatgaatgtggattgcccactattcagattagtaagtatttcttggtcaagggcagagctgtggccacaaaccatccaggtacacagcagaagcagcctcaaaaagcttggaagctctgcatgatgcaggaaagtcataaaatcattacagtggtgacttatgtgtttatagcccctttactgtctataatctgcaaatgaactcacacagcattgggactttggaagaattatcacccttaaggtttaaattaaactgtgaatttcagaatttctaataaggacacaacaaagagtgaaagcattgctatgtctattctgcttgcccagaatcttggtcctaaaaaatgaagagtgtttgggtgtggggaggagcttcagtgtgcatgtgcatgcaaagtacctactctaaggagaagaatgagagggtaccctaattacctgttaatatgtcccataggacaccaaaactctagttagctgtttctctatgatcctctaagcacatccccaagtatggctggccagtgatgtgtatggttcaaatgttgggatctgtgcagttatcttggaattgtatagtacagcagtatatcccccccaaaaagagtgtaatacttccaattctggctgcacaatacttgccccatagtccatggtcaataaatacaaatttgagttgtttttgctcatctttcccttttgacttcaaatcagtcatcagaatttccccaaatgcctttcccctggatcttgggccagtggaatgagtacaatttaacttaattgaatttgcttatctatttggtttcctgttgtgaacaaaagttctctgaaaaggaatttggaagaaagagactttgttctagtgaacagtttgcaaaccagggagttacagcctctggtacgcaatgaaggtgagttccacagaacacaaggcaggcaggtttcacggcaaaaagttccttcccaggttcccaatcaggtccatttatgcaaatgaaggatggaaacttgcttagttcttattggtcactgcagctgcattctgattggttgatgaagctgagccctgagtggctgaggtgggtgagctttaattggttggttcaggtgagcgctgaaaatctcaactataaaaaggtacaggttttcaggatactcagagtaaccgtgtgacctgtagtaagcaaagggccagttggctctattttaaatccaggcccagttagccactcaagatctatcttacaggactggctctttcaggttcacactaataaaggcctgtccttggggaagacttctgttcacatgcgctccagtgaatttccctttctggtcattctctaccccagcacgccccccacccccgacccgccccacccacccacctgttcatttccttcttagcatgcttcacgatttctaagttcctgctcatgtgtttaaattgtgagtctggctcacctcatggcgcgtgctcgtgtggtgggctctgctgcagcctcaagaccccacactgtgctggactcaataaatattgttggacgaaggaatgaaacacatgatacaagtgagcaggcagtaccgggggagctgtggagtgggcactcttacaggtttccatggcgaaagcgggggtacagttgtgttcttttctttctaaaaggctttctaaaaagccttctgtttaatttctggaaaagaagcctaacttgttcactacatagtcgtccttcttcctctctggtaacacttgttggtctgtggaaatactaatttaatggatcctgaggttctggaagtactttgctgtgttcactcaagaatgtgatttgagtatgaaattccagccagttcaactgttgttgcctattaagaaacctaataaagctccaccttctttatctctgaaagtgaactccctgctacctttgtggactgacagctttttatagtcacgtgacacagtcaaacattaacttggtgtatcgattggtttttgccatatatatatatataagtaggagagggcgaacctctggcaggagcaaaggcgccatggctgtggagtcccagggcggacgcccacttgtcctgggcctgctgctgtgtgtgctgggcccagtggtgtcccatgctgggaagatactgttgatcccagtggatggcagccactggctgagcatgcttggggccatccagcagctgcagcagaggggacatgaaatagttgtcctagcacctgacgcctcgttgtacatcagagacggagcattttacaccttgaagacgtaccctgtgccattccaaagggaggatgtgaaagagtcttttgttagtctcgggcataatgtttttgagaatgattctttcctgcagcgtgtgatcaaaacatacaagaaaataaaaaaggactctgctatgcttttgtctggctgttcccacttactgcacaacaaggagctcatggcctccctggcagaaagcagctttgatgtcatgctgacggaccctttccttccttgcagccccatcgtggcccagtacctgtctctgcccactgtattcttcttgcatgcactgccatgcagcctggaatttgaggctacccagtgccccaacccattctcctacgtgcccaggcctctctcctctcattcagatcacatgaccttcctgcagcgggtgaagaacatgctcattgccttttcacagaactttctgtgcgacgtggtttattccccgtatgcaacccttgcctcagaattccttcagagagaggtgactgtccaggacctattgagctctgcatctgtctggctgtttagaagtgactttgtgaaggattaccctaggcccatcatgcccaatatggtttttgttggtggaatcaactgccttcaccaaaatccactatcccaggtgtgtattggagtgggacttttacatgcgtatattctttcagatgtattactttggatcgattaactagccccagatatatgctgagcaagcattctgagataatttaaaatgccctcttttgttaat

SEQ ID NO: 8690 - DNA, 6000 bp, Homo sapiens; identical to SEQ ID NO: 912

SEQ ID NO: 8691 - DNA, 6000 bp, Homo sapiens
accctcccaccggctatgaaggtcaacctcttgccttccctagcctcactggctttattttatgcaacactccaactctcctctttccacctcccctgttacttttccctacctattttattcctcttttctatctccttccccacctatgtctttcctttctgtcactttttctgcatgattcctgccccagaggggtcaacaagaaagggcatcccactggctgactcatgcagggaagctgtcagtaattaattagcaaggcagggaagttgtaccccaagtcttggtttcaacactagaggactttaggaggtggttcaatgtagtgtttgagcacgcggaccctggagtcctccaagcctgatttcataagtacttcagctgtgacacttgcgtaaacttgggtaaaaactcagcgttatctagattaaatatgataatacatgcagatgactggcatgtggatatgaatcagcaatacccgtaattgggtgggtgatatgcattttccagcacaattatctccaacctccacaagattaatgatcttaaccatgcattcagactctcttcagaacaacatggtgagatatcaatgttgtcttcttgatgcaagtttcccttgaatgatttaaacttcagatgggtggactgtctccttagggagaatttgcaaattaaatataataaaagctaacatatattggaggcttaccgtgtaccaggtgctaccctaagtatttacatggaagctggcattattggcagacctatttttcagatgatgaaactgaggcacagaggggttgagtgacttgcccaaggttatgcctcaagtaagtgggggagccagaattcaagaccatacattctttgtaaaaaaaaaaaaaaaaaaaaaaaaggaaagaaaaaaaggctgagtgtggtggctcacacatgtaatcacagcactttaggaggccaaggcaggaagatcacttaagcccaggagtttgagaccagcctggacaacatagggagacactgtctctacaaaaaatgttttaaaaattagctgggcctggtggcatatgcctgtggtcccagctactcaggaggctgaggtgggaggatctcctgtaaacccaggaggttaaggctgcagtaagccatgactattccactccactccagcctgggtgatagactaagaccttgtctcaaaataaataaatcaataaatacatgaataaataaaatttaaaaattgatatgtaattcatgtatcgtaaaattcagtggttttctgtgtgctcccagatacaatcaaccatcaccaatatctaattccagatcattttcctcactccaaaaagaaaccccatgcccactggcagtcactccttatttctcccccttcttctacccctcagcactaatttactttctgtctgtatggatttgcctattctgggcatttcatggaaatggaagcctttatgaccggcttctttcacttagttttgtggcttatccatgttgtagcatgaatcagtatttcattcctttacatggccgaatattccattgtatggatttaccgcattttttttatccattcatcagttggtggacatttgggttgtttcccattttcagccatgaaaaataatgttgttgtgaacatttgtatacgataaaccctgatgttctaattttcgagcccatgtgcctaacctctatacctgactgcctccctgtgttgacaggaaacttcttgggaaatgtcctatctccatccttttgggaatgtcacatgcagtgaaatgcgcctagagtgggtttgacttacatcacatggtctctaatccctcagcaaacatgagttcatcttgttttggttggtgttacagaataacaccctcagcaaacatgagttcgtcttgtttttgttggtgttacagaataacatgcagctggctcttttttaaaaaatttaatattaaacgtccttcattgaacaaatatctgttgagagtctttgagtgactgggatatggccataatcaaatgaacatggctttgccattctaatggagaggaaggcattgattagctacaaactgtgaaacatactttgaaagaaaaggatgtaaagagagctgatcatagggggccttgcaggataaggagtggcaatcttgggagaagttggggggatggtgtgccaagcagggaagatggcaggtgcagcatgaagccaaatgtttggaatcatagcatgttctttcccttcatccctatgtcccagggtctctttacttcataaacatggccaagtggaaatcctactttatgtctcttctgtataatccctttgtcatggcttaacttagtggcctgtgcccctccccactgctcctggaaccacaacccacattgttacaagcccctgaaggaagttataaacaccttatcttctactaggacaggtgcccctggaactgtctggctgggcaagccatacttacctgcacttccctattccatctgtgagtgattcagacttgactattgttatcatactaaactaaactggggttcactcacccagcacagtaagaccaaacatctacactgagatttgcaatgggagaaaggaaggcatttatgtgcagggcacaaagcaaggagtgttaggaggcttatacttgagacccaatctctctaatggcttgcaagtaaaggtttttaagagcaaggatacattttaggaaaacagaagttacaagaagaaatcgcaaatcaatacgcagaggttacacattggtttggtcatgagaagtgagggcttgcaggtcataggtgaattcagagattttctgatttgcaattagctaaggaagagaagcttggtttaaaattcggggttagcagaaaagaatgtttgctcttgctcatgagtgtgacttcctccaagaacaaagaatggctgtcagagttcagtcgttatttccccttatctgaggtctgcctgccaaagaatccatttggtgggagtccaggtttctgaaaaacaactcggggacatatgttatgatgtgatctgtagtttctataggaaaccaaacatctctggactctaactttcttggatattgttttaggctactattaccttcttgcttatcaagtgccttatttatttctcagggccaggtaggtgcctggaatttccttcgaaagaacccaagattttcctttatttccatgcttggaggaacccacaggcccctaaaagggattctcacttcatctcaccattttggaccttcctcaagatctgggcccagagcattctgacttctgcagccccacctcacagcctatcaaatagattaaattgctcctgcatcttatgtcacatatgtctttgtaacttggtgagctaatctgtagtggattcattgacatgtagttatgtttttatagccatttcataaaatattcataaattcaatgtttgccattttagtattctagattcagcaaatttcttattttaagtctcaaacattttgcaggtcctttgaaatcttgcaggtgggtcctggctccattacttatgggtcgtaggtcatacaagggtctgaaagagttagcaccttagaagcaaacctctccatagggtccacgtttccagaccttcctattcccaacatgaaattaccttcatgcacatctttgggtctctcctctattcaaaatgccagctatcctccatttactttttgggaaatctgctcttgccaacagagatttgttttatcttaggatctacttctttcaccccactggaatatgtcccaagcctgagtcattcagcctgcagcaatccctgagaaaaaaaaaaaatcggcctttgcctggacactcaagtgatacctgaggacaccttgactcctacagcaccaaccagggcaggcctgggtctccagcggagctactctttagggatcgtcattatgacgaacagacatgccagattcctctggctagtgtccagtgcagacatacacacacacacacatacacacacacacacacacacacaccattcttagtacagtcaaagctcacaggagaaagaaaaatgttttctaataccttcttaatttgcaagaaggtgttaggaattcaagggatggtatgcatagtgatgttagtttcatttcttcagctccttcctccaactcatgttctgtagggacttctgggactaagaacaggacccacatatgagcaacaggattttcagagcaaggctgtggttggaagggctcagaccaacgtccacagcagagtggaggtctagtataaagaatgtgaagtttgtagcatctcttgatcccgctattcctacatgcttgcttaagccattcttcctctagatgaactgttctttgaaggaaacctgcctaatgtctgcctgctcaagaaggtggacctgagctctgttccctttgcaaccttcctggagtcttattgctatctagatgaactcaaagcaagatgctgccgcccccatgactttgatcattgtaagctgccaatcctcttgggaggctgctcccagcttggactgagctgagtcttcgcatgccttgaacaatgaatttgcatcctggttatgttccccatgggggccagccctgtccttggagtggcccctctaatcatgttgctcaggcttcttctcccttcctgggccccagaacacctccggtgccaaacttgtgggtgggaacaggaactcgcgtgccagccaggtgtgcatgactagctctgggcaagtctgttctagtaattcaaggtaccacctctcactgggacagcctagtttctacacaggtcttgctctgggaccgccctcagcagtgtggttagcaggcagggccagtgtgaccctccctttctgggcctcagttgagaaacctgaagctcaggagaggagtcactcccctggcagatgggtggctgggccagaagcagataccaggctttctgactcctgctctaggattctcaccacgtactggctagacttatacttctcaaatcttaatttcctaaaggcaagtaacagtttgaatgttgttatattgtgatgtataataagaaatatatgtttgtctttgtttcctggacacagctcctgaaaccataagtggtgggagcgataaacgtgaacaaagaatcttttgttattcaaaacagatccctttcgatcacacctaagtttatgtaaaggagatgtaaagtctctaaggatgagggctagttgccagggaacaaaacccttgcgattagagggaagaaaggagagagagattgaagattgatttgatcaccgatgggcaacaatctaatcaatcatgcctactatgtatggaagcctacataaaaactcagaagggcagggttcagagagctttcaggttgctgaaggtgtggagggtggggcacccagagatggcagatggggctccatggccatacccccatatcttgttctttgtactttttcctctggctattcatccgtattgtttgcaatatcctttgtaataaaccaaacctagtaaataaactgttttcttcagttctgtgagccattctagcaaatgattgactccaagaaagagggtgtgtgaacctctgatttttgccaagtcagacagaagttgtgggtaacctggggacctactacttgcaattggtgtctgaagtgagggcagtcttgtaggactgagcccttaacctgtggggtccgtgctaactcagaattcagttcagaatggaattgaattgtaggatacccagctggtgttagagaataggtccgtgtgcaagaaaaattcccgcacatcatggacataacagacaacgtcaatgatgaggaatccagcaagttcgggatagagaattggcagggggtcctcaggggtctctccaagt

SEQ ID NO: 8692 - DNA, 6000 bp, Homo sapiens
cgaattatgtatgcattctggatactagttctttggcagttatagatattgcaaatatcttcccccactctgcatcttgctttttacttttattcaaacgaattagaataaacatcttagtatatgactcactgtgctcctgtgtgggagtttccacaggggagttgccggaaaatggacttactgtgtcgtgcacattttaaatgtcattaggcattaacaatttattcttcccttagcaatgtataagtgtacactttccttcatatccttgccacatgtattatcatcaaatgctttcagtttttgacaatccaataggtaaaaaatatctcaaggttatttgaattttcatttcccttattaattcttcatttaaacgtcttttgtgtgtgtgtgtttactttcatcaagttgtttcaccagtgaagataagaactggtatttaccttctgcatttaatagaattgatgcaactggctgagcgtggtggctcatgcttataatcccagcactttgcggggccgaagcaggaggatagcttgagcccaggagtttgagaccagcctaggcagcatagtgagattccttcactacagaaagtaaaaacctagctggacatggtagcgtgtgcctgtagacctaactactcggaaggctgaggtgggaggattatttgagcccaggagttcaaggttccagtgagctatgtttgcatcattgcacctcagcctgggcaacagagcaagaccctgaccaactccccacccccccccaaatcaatgcaacctgtgatcactttatttgggcaacttccccaaattcttgactcagtgaatttgttgcagggcttttcttttttaatctcttttattggttcacatactagaacaatctcaggggctatctggttaggtattgcttgctacagagccaaactatgtcaccagaacccatttatatgtttccatttcttgtctctgtttcctcggccgtggcatccttctcagtgtcataatacccaagcagcaggggcttcagcctgagttcttttcccaggattcctagttaaagttcttctgcctcattggctctaatgaagtcacatgcccatctctgaactaatcatggtggccaaggggatgagacgtgctgattggttgaggcctaggtcacatgttctatcctgagctgggagtggatcctcaccagaagtacatttgagagtttgggggaggggtggccgctgggatgagataggaaataacttgtccacgctgtgaattacccttcaattaatgatattttctatttagatgtcagattttttgttactagtttgtcatataaacctattactatatagatttttctgtgtcctaatctaaatttcttttaataatctatgggtgaacactcaataagaatgtcctccagaaaggatgacctgccgacttttaaagcaatcattttggggcttataagtatttagtatttgaagtctctgcctcttgctctcttttaggaattctttttcctactgtgatatatgtaagtacttataaatttaaacttaaaattcaaaaaatataccaggatgtgaaagaaacattattaaatataggtgttttgctgtgagtgtttcttggaataggtagggctttgtatagtaggttttggtcttttggtcagcttgggaaaattttgttcttttttaattgaatgatatgttttcaattgatactactaaaataaacattattggagtattatttacatgcaataaagtgcaccgttttaatgatacatttctgagttgtaatgattttatttagctgtgcagccatcaccacattcaagacacggagcactccattacccagtaacttcccttctgtcctatctcagtcacctaatacctcccctcaccttaggcaaccctggatggtttctgttgctggataacagaattgtcttttctagagtttcatctgaatggaatcatacaattatgaatgaaaaacacacaggtatactgttttgtgtctggcctctttggctcggcataatgtctcttcagatcctttcacattgttgcatgtatcaatatttcattcgtttctatttccgagtagcatttcattgtatagatatatcatcatttgcttatgcatttatttattgatggacatgtggatagtttccagttgttggctattatgaataaagctgctatgactattcgagtacgagtgtttctgagatttcatttttcttgggtaaatacttaaaagtgggattgttgggttgcatggtaggtgtatgtatgacttcataagaaacagtcgaactgtttccaaagcagttatacaattttacattcctaacagcaacgcattagagttctggctgctctgtatttgtgctaagacttgctatttttagtcttttacattttagccatcctaatgggtgtgtagtagaatttcattgggtttgaatttgcattcctcttatgactgatgataatcttttcatgtgcttattgatcatatgcctgttttcttttaaaaggtgccctttcaaaatcttccgcacacctttattggtttgtttgtcttcttatatttgagtagtgagttctttacatattctggatacaagtgctatgtcagatagttgtgtttctgtttacttctggtgtgtggtgtcctttgtttcattttttaaaaaacaacgtctttcaaggagcaaaagttgcaagttttgattaagtcaattttagcaaacgttttgtgttttgtacccctcgtgccctatctaaggaatctttgtctaccaaaaggtgggaggatttgtttctatgttttttaaaaaagttaaacagtttaagtttgtaggtttgggtggaaagaggtctttagaccacttagtctttgtttaggtctttgtttatgtctctgagattggcagaggggaatatacaatcattcagatcaggctattggatgcctttttctatctctgaatttttctggggtgacctcactgacacccatggcttcaatcaccacttatgctgatggctccaagtctatctgtgcagcccagacccctcctcatctccagaccctggaagctgatgccttgggctgctcctcctatttcctgggcaccaggaatatgagctactccctccccacagtcctgctctccccagtgctcccatgtcgctgaaggcaccaccatcttccaagatacatgggcctccccagggtctaggagtcctagacgtgggagtagaaattagatgacattggtgtctaaacaaaacaccactgcatggagatagaacaggggagccccctgaatgtggtgagagcaccctcccaggtgtgttccaccctcaccccgggctcatcaggagggtgcttaggatgcatacagttttaagggggttggaggaatagttcagaggctgagatgttgcacccacagctgagaatccctttctagcgctctgtgtcctcacaactccccgggaatcatcctcccctggagagttcccaaagcccttgcaggcctgccttctctgtgccttcctgcctgcgccctctggtggacagctccattcgctgcctgtcccatgggttctgtccaaaggtggaatctattatcaatgtggatttctaatgggggtaacttcctccctaagggaagcctcagcttcaccagcaatggcagacacggccaggcatgtagacacagaggaagtgagatagaaagtgtgcacagcccagagagcctgcccacatcatcctggggcgaccaggacaaggaggcgtcagcaatcttgccaagcacaagtatgagtgactttctggagcaggacgagtctcatgggcgtgagaccattgtgagtgctcagggtctctccattagaaaggcacacgtttaattctccattttgaaatttgaactagagcccccacaaattattctgttctggaggaaccattcttatcagaacttggtgctggattgacttggaaaaaagcctgaccataatcttcaggatgaaataaaggcctggatgaatggacacttcagtctctaagcagacttgcagaagactggagccttcagcattcagaagaggaattcagactgtgcaagatctgaggccaggctccagctcccccggtcccttggtgagcaggagctccctgaacccaccatgggtctttgctagggttgtcttgcacatgtgtgctttagacagcagcacctcttcttccatggtgtagatggagaatcctcaacaaagcctttccaagaatctgatcatcacatcttgagctcagcctccctgcagctttttttatattgacagccacttcagagagagtcctctttgagctttacaagaaatatcctggtgtgaaaaacgaccaaaaccagatagccagcctccccactccctgtttaaagaaagctggcttagcaatgttgtctgcattttggatgtgctgtgttacccatatgtgggaagaaagagtattaagagttagcaaatagggtcacatccagcagagaccatatggttggggactagggcaatggtgactcctcagacctcagctgcagcctgataaacgtggttaagagagaagtaggagacagtgacatgaaatgggggttcacagccttgtgttgggaattgaatgagaaacaagagcttgaacttggatgttccccagagcgagcgcaaggtcagatgagtttttcaagataggagtgatcggtctttcccagggtggggcccataatgcaagacaattatagattaacgggtaataagtaactggaggagggcactctgtcttcaattacatgttgatttgctaggtgtctcagtgacaaggtaattaagacgaaggaaacaattctaggaggcacaacgtggggtggacagtcagctgtcggtggcttctgctgagatggccacaggactccaggttcccctgccgcagctggccacaggactgctgcttctcctcagtgtccagccctgggctgagagtgggaaggtgctggtggtgcccactgatggcagccactggctcagcatgcgggaggccttgcgggacctccatgcgagaggccaccaggtggtggtcctcaccctggaggtgaatatgtacatcaaagaagagaactttttcaccctgacaacgtatgccatttcatggacccaggacgaatttgatcgccttttgctgggtcacactcaatcgttctttgaaacagaacatcttctgatgaaattttctagaagaatggcaattatgaacaatatgtctttgatcatacataggtcttgtgtggagctactgcataatgaggccctgatcaggcacctgcatgctacttcctttgatgtggttctaacagacccctttcacctctgcgcggcggtgctggctaagtacctgtcgattcctgctgtgtttttcttgaggaacattccatgtgatttagactttaagggcacacagtgtccaaacccttcctcctatattcctagattactaacgaccaattcagaccacatgacattcctgcaaagggtcaagaacatgctctaccctctggccctgtcctacctttgccatgctgtttctgctccttatgcaagccttgcctctgagctttttcagagagaggtgtcagtggtggatcttgtcagccatgcatctgtgtggctgttccgaggggactttgtgatggattaccccaggccgatcatgcccaacatggtcttcattgggggcatcaactgtgccaacgggaagccactatctcaggtctgtattggtgcctttatccaatcaatgttccaggcaaaacactttttaaaaaatgtatttacttacaagtgcttccatatctacttatctttccaaagatttcatttctgcttctcattgttgtaatagt

SEQ ID NO: 8693 - DNA, 6000 bp, Homo sapiens
acctaaggttgccagatttcgctaataaaatcacaggatgtccagttgcatttggacacacttatactaaaaaaggattcactgtttttctgaaattcaattttaagtcacacgaatagcctcaattcacagagaagtggactgagtgactgcaagacgacagtatcatgacagggtatctgtctaccctaataagaccagaagctgagagatggccttattgtttcccgtttgtgatcagacagagtgggaaaggctttggggaagagaggggtgggtgaaaatgtggatacagggggtcctcctctcttacagaaactctaaggtatcattagaaaataataataaaatgagataaaacttaaaaacggatggcctaataataaaataaaatgaaataaaacttaaaaacaggatggccttagacctctccacagaaatattcactaccagaagatattaacaatatatgcaaagttctgagggaatgtgaaaatcaagaacctatccaggaagaggttgaataattataatgttctcaacatgaaagaactcagggagttcagcacccacaagactttcttgcaaattctcctgaacagtgcaagcaaggcaactgagatgaataaagaaggctggttaaaaggacgactggtaagtattgaaagtattaaattatggtaatacagctaaagcaaactggaaaatgagtaaagaatagaaattaagcaaaataaatataatgtaaaataacataaagctaatagaaaatgagataaaaagcatatttaaatgttatcaatcaatttcatctataaattgagtaaaaagtaagtaaaagtaaatgtaataaatcaaaccttcctttcatcatgccattgtttttcttgaacaatatagggctcttttagaaattaatactttacaaaaacaaaacttcacctaaatttctaaattgcctacagtttcagttatttcagttatttattttcgtttttgtaaaattaattttgttactttttatttaaaatatatattaatacaatttaaaaataaaaatagaatttagtttgactccatgtttgcaaaattcattccatctaatgttctacttgttcaatcaacaaatatcattacttgagcacttactatgttccaggaacagttttttatacacacacagaaaaacaatacacacacatacagaaaaacaatacatacacatcaaaaaatatctggtaggtccatctaatgttaatgacagttatttttgaatgaatgatagaatttagaatgtttctcttttgtttttctttctttttttttttgagacagagtctcactctgtcacccaggctggagtgcagtggcgcaatatgggctcactgcaagctctgccttccaggttcacgctattctcctgcctcagcctcccgagtagtggggactacaggctcccaccaccatgcctggctaattttttgtatttttagtagagacagggtttcaccatgttaggcaggatggtctctatctcctgacctcgtgatccgcccacctcggcctcccagagtgctgggattacaggcatgagccaccacacccagccttgtttttctttcaaacttgaattacttataagaaatagtaatcatttttataaaaacaatatattatcaaagaaaatggagaaaggaagaaacaacacttaatttttaaaagccggcatatcatatatcaaaacctgaaaaggaatgcaccaaaaaaacatgcaaatttcatttataaatattagaaaaaccaattaaaatataaactaagaaggttagagagtatagtgaaagaattacatgctacaacaaaatagcttcattccaagaatgacaaaatagtcaatacgtattaatagattcatcacagtaagcatgaaggagataaatcacatagtcttcctgtgagatactaaaagacattttacgaaatgcgtcatcttttatggcctaatcacctctcaaaggtctcacttagtaccattaccttgaggtttaagttccaacatatgaattttggaggtatacatgcattcgaaccatagatcattagaagtgagaaagatcaagtacaagaagtcaggatgatggctttccctttctgtctcactcaatgcaaactgcaatgtcactattgtgatctacaaggccctatatgccctgcacttccatccccattaacactgtgacttgtctcctcctacccttccttccattcctctgtgagccacactcacctccttgctcttccttaaacctgtcagggacatttgcatctcacattcctttgcgcttgctaccttggcccagaatttccttcccacgttaccatctcattgcagatgtcactaccttatctaaggttgtcccatcacaccccaacactgcctattccccttccttgctttactccattacacttatcacaatctaatgtatacatcttacttaaacatatacagctgttttcttgcttattctctctctctcccagtagcacataagttcctgagagcaacgatttttgtttcttttgtttagtgctataaccccagcaactagaacagtgctttgtacatagtaggtgatcaacaaatatttgctgagtgaatgaaggagagagagatgagtaaggaaaagagtgaacaaagaaatacacagagccctaaaggctttgctgaaactggggaagacctagcttaatttcaaaataagataatatccttttaatgaaacatatacttttacataaaagtttagcatccttcaaaatatcctatttttgaaaaatatgtccattaaaagtgaagaaatttctatacgacatttaaaaacctccccaggaatgtttaattttagctatttcactctcagccttcatccacctctctgagccatgccttaaaaatacttttcccaggagtctcatgtagttttaaatgaagtacacaagttccaataagaattagaactgcaagcaaaatctaaacttagagtgtagaagtttttattttaattgttaaagtatacatccaatatcatttttttttaaatccaggtttatctaatgcatccagtctaacatgaggagatatccaaagaatgttcaaatatagatctataagattaaataacctaatgaatttgttttaaaattcaaggctgttcccaagcaagagaaaaaatgtggtagattcacacatggaaaatatgcaaaggagaccacagttaactaaagtttaatgctagttatcttccagtgttctcataactgcatgtacattaaaagctgatccacatgtttaagagcaatacagaaataagctaacttttcctcattagaagaatggataaactgtgggcttttcgtgcaatggaataataagcaccagctaaaaatgaaagaactgaaaagctaaaacacaatttccctcttctcatttccttcttctcctctcctccactcctcttcactcccttcattttcctctctaatccccacccttctcctgcttttccctcccttcatttcccttccatccccttccctacttttggatcacatcccttcattcccttcttggactattcagtgtaaaagtcattaggtgacaccaagcagaatgcccaactacccttcacactagtgataggagtccacactgtttggcatagggtgtcagactctgagcagggcaaggagagctttagcccagtagattcctattgatcttcaaattccaatccagaagtcacctcctccaagaagtcttccttcacgaaccaaacacaggaagaattaatattccctgagctcccaggacattttgcacttgcctctaatcatgcacttttattaaagtgagttgtttaagctggttctttctgctgctgaatggtgagtgcttcaagaacagttaacatatagaatacatttatatcttcagatcctataatgttttgaatttgtaaaatggagttgaataagagagaagttgtggtggaagcatggtatatgcttaccacatggttgtatatgtcaaatttttccaacttgtaactcacgtaactatataatattcaatacactttctcaaattacttgtatctccaggcaattatttgccccactggaccttgtgccctcagtggagaatcacgttacaagagagccttagtaacagggcctgggcttggaggggtatcccctgaacccattccaccccagtcacctcggaaaccagcagatcctctggaaagacagaagttatcattataaccaaaaagagcatctcattaaatcttctaactctttaaaaactgagcaatctgttacaactaaccctaagtgatcagggaagtaaccattcctcttcagcatcagcaacagttccttggttttaagcaatccaaactgactctggatatttcagccataatccatgtaaacccaggaaggacagaaatcagcatagcccaagggatcactgtcaaaaacacatagactatctttttaaggcaattccattggaataacaacttccttctaataatgtgtccctcccgtcaaggtacagatttcctagagaagtcagctagtcctagtttggggcatgaggacacccacaggccatgtatgtaagacactgctattgacaatcccactagaccacatggaagagggaggcatagctccccacaggaaaaaaaaaaaaaatgagatgaagaaaatgagaattggatgagcaaaaccagttgtctactgcaacccttctgttctgagcagactgatacaatgttgcagcagtacgaggaccaagagaatttgcgactagaccatcctagggaatctacaccagaggaagggatttccaagcagcacactggccccaggagaccatcagcctagataaacagagtcccagagcaaagcagcaacgtctcctcacatggcgcaatagatatagtaccgcaagggaaagatgaaaaattataaccaagcaagtcatcttggaagcaacggcgtgacatggactagcccaggagcagaaaggagcaaaaggtctgatctgtgagaacacagaagacttcttctgagaactctaagaaatacataaaaagtagaaagctttaaaagtgggctgaggtccacctgtgagtcaagcaacagccaacgagctcatgaaattcaggaactaatgttgacgcatgtttgactgggaagacttcaagtgtctcttattttttttttttctgttcaagaacagaagaaagggaacttgattccaatgtcacacttatttatccatggctcttataatagggcattgcatctagtaagtcaagtagttctccctatccaaaagatttagatatttaagcgtaactgactccaagaagagagctgcctcattccatgtctctccctcctaaagtatgaaggaataaaaatcagataattctcaaattcagaatctttcctcacccataccgcctatgaatataatttttcaaagacatgctacgtccataagtcaactcaaaaggatgaatggatagacactgctacgaatcacctactaacctcatgttcttgtctttcctcagtcatgcccatacacacacacacattttcctatctgcaaaacttattcaggatgattatctacagtaggatgaagggagaaaaaacatttaaaagttataaaaactgcaaacaggaaatgaatgaaaagcaagaggtcactacacgtgcacacatacacacaaactcagtttgccaaaatcatggaggtgttggtcactgggttagagcataatggaataaacatcaaccttaggtcttttctgaacatcggttaatttagcttcctttttcttgtcacctgggaccttcttgaatctccacgtggctgacccctagcaaaatagcccctactgggcaagctct

SEQ ID NO: 8694 - DNA, 6000 bp, Homo sapiens; identical to SEQ ID NO: 863

SEQ ID NO: 8695 - DNA, 6000 bp, Homo sapiens
ttttgcgccttgtgtgttttgaaccatgtgatgtgaatatatcatctagtcaaaaatgaatacatatatttaaagagaggtttggagtctcaaatcacacccagatgaacaaaccatagatattttgaatgtacaacggaggtcaccatttctgtgttttacttttcagtttttcatggagtatgcctcagtgggaagatagtcataaaatattctaggatgcctttaatcatgaacaatcataaaatattccaggatgcctttagcgaaatttaaaggataggttgaataaggtaaaactatttctgtgcttcacaaattgctttaacccataatgcagggtacgttttcagtttgagattattgcgaattatgggacagaacatcgttctcattttgatctagcagttcagggcctaattcaagttcaacattcataaccgttggggccatctgggccacatttctgtggttctaaagctttcccttaggtttaaactcttatctgagtcaggatttatttttcatgattccattttgatttgtctttttttcttcttttattttatgattcttttaaatcataagaactacttcatggaatgaggtggactattctcagtatttattccagaaagtaaccatgaatataggagaatacacttgaaaggttttgtacttttttctaccgtattatctggtcctttttgggtcttaaagagtagctcactaaacaaagaagtagaatactgaattaagaatatgacggccgggcgcggtggctcacgcctgtaatcccagcactttgggaggccgaggcgggcggatcacgaggtcaggagatcgagaccatcccggctaaaacggtgaaaccccgtctctactaaaaatacaaaaaattagccgggcgtagtggcgggcgcctgtagtcccagctacttgggaggctgaggcaggagaatggcgtgaacccgggaggcggagcttgcagtgagccgagatcccgccactgcactccagcctgggcgacagagcgagactccgtctcaaaaaaaaaaaaaaaaaaaaaaaagaatatgactacattcactgaaaaactgattgctgtgtaatcttaggaacaaacttcaaaccaagctacatattaatcataacacaaaagttagtcataatgcataaacttctaaccttctactaactgtgaggggcagagcctgggctggaacccagtatgtcctgaagttaaggaaagttaaggacatactggaacccagtatgtcctgaagttaaggaaaggcagatgagagaagtgatgtgggagccagaaccaaagacaggcaggaaagatagacttgggaggagtccacaatccagattaggattagcatgttggaatattatccagattaggattttgccataatccagattaataccaacattttagaatactattagtaccatctataaatcataccagcacttattttctatttataacattgtgaataattgcaaaaaaacttaggaacaattgaaatgaccaaacataagtgacagatggtaaactatctatccaaagaacagaatgttatgcaaccactaaaaataactatttttaaaagtatgatgagccaggcacagcactatgggtggctgaggcaggaggcgcatttgaggccaggtgttcaacaccagcctgagcaacataataagagcttgtctctaaaaacaaataaaacaaaacaaacaaaacaaaaacattatttaattagcttggcgtggtggcatacccctgtagtttcagctacttgggaggctgaggcagaaagactgcttgagcccaggagttcacggctgcaatgagctatgattgtgctgctgcactccagcctgagaaacagggcaagacccaagaccctgcctctaagtatatatatatattatatatatatatatatatatatataatatatatatattatatatatatataatatatatacttattaaaattatatatatataatatatatacttattatatattattatatatataaaagctgcacaaagcagatgcatatatatatataatgatatggttaaattttcaaatataatgctgagtaagcaaagagagtataattttgttaaattgatccagggaagaggtgttaagggaggtaataattatgtgtgtttacatacacagtcagattgtaattttattttcttttttataacttcttctagttgcaaacattttacagtaaatatctattatatcttaaagccaggaaaattattttttaaggttttccaatacaaaatccttgactacaataagtctgccagtgtgcaggcatccttcctgcatcacaggtccattctggtccctcaaggtagagataagaactaaactcctaatgcttgacaatataatgcacacagaagatgtgtctcagagatctatagaaacatgacatcaaaatcaaggcaacatatatgaaagcacttcttaaaatcagcaatgcaggtgaatatcagatacatttaaaaaaaaaagcaaactgaccaaattgaacatgttataattgtcagtaatgtattctcatacaaatgtcttttaaaaagaacattggtgaataagggcatcttttgtaaaccagggccttcagatgttctctttagtcactagaatttacataaaaaggactggaggagcttttgcagcaactttgcattatgtgggtaacactagcagcagcctgtcacttcctgcagcacccagttcagtgaccatattgaaagtccgacttagattttctgaacatcaatgagcaacagcctcagtagtacaaaagcaacaaatacaagtttacaaacattcctcatccttttgctctatggaaataacattttctacttgggacttcaaacccaatgactcaactgaaattctcaccccatgtaagctggtcacaccttcaaacaaataatgtatactgaacatggctacctgcccaataatgtgatgaacacagatgctcgtttaatgtaaacatacagtgaagagaagtagcacgagcaagtgtctgccatgtgctgggcagagacttggctctggagtccgggtgctgctggtatctcctagtaccccaatgaggcaactgctcccacacatggtttggactgtgagggtttccatagcatttgtaaactatcatggcacgggtgggagtgtagcagtgaggacgaccaggacactctcatcaccatcttggttttggtgggttttagctggcttctttactgcttccacagcctctcacaatcaacatgcagttttctctgaggtcttttcttcttttaaaaacacgctttcactctcaaaacagcagagaatgaaactgtggttgtgtttatatgcttgaatacaattatttctgcctcaggaaacttttcagtatatttaatttctaagtatcgctttgaatgaggaagtacataaatgaatgaatttatgaatgaatgaacaaatacatgaatatgaagaactttgaaactggggtctataagagagccagggcacttattcatccaagggcagatggcctgagagagtagagctgcacaaagcagatgcaaagaaagggtgaaggtgagtgcatggcttctcagccccccacttccccagagcctgtggcccctagagactaggctttgggtgtggacctcaaagaatgacaagcaacagaatgaatgtatgactgcagattttcctggagcaagtcttggccatagatcaataataacaacaacagccaggcatggtgactcttgcctgtaatcccattgttaccagaaaggggtgccgatctggacctcaagagagagttcttagatcttgatcaagaaataattcaaggacagtccatacagtaaagtgaaagcaagttgattaggaaattaaaggagttaaaagaatggctactccaaagaaagcaagttgattaggaaagtaaaggaataaaagaatggctactccacagagcagcccagagggctgctggttgcccatttttatggttatttcctgattatatgagaaacaaggggtggattcttcatgtctcccctttttagaccatacagggtaacttactgaggtttccatggcgtttgtaaactgtcatggtgccggtgggagtttggcagtgaggatgaccaagacactctcatcaccatcttggttttggtgggtttcagccggcttctttactgcaaactgttttatcagcaaggtctttatgacctatatcttgtgctgacctcctgtctcatcctatgacttagaatgcctaacctcttggaatgcagcccagtaggtttcagccttattttacccagctcctattcaagatgaagttgctttggttccaacgcctctgaccccagcactttggaaagctgaggcaggtggatcacttgagcccaggagttcaagaccagcctgggcaacatggcaaaaccccgcttccactaaaaacacaaaaaattagccaggcaggtggtgcctggtgtcagtactcccagctacctgggaggctgaagtgggaggatcacctaagcccgggaggtcaaggctgcagtaagccctgatcatgccattgcactccagcctgggcaacagagtgagaccctatctcaaaaaaattaaaaaattaaaaatggttaggctgacttgaagcctttataaggagagagagtcgggccttgctgggccgctggcccctcagtgctgccccaggccctgccaccaccaccgcctgccccctggcccctgccagagcggggttaccatcacacacgtgcccacgcctgcccggggtgtgcacttccgctgggtttcctgggccgcagcccacacaggtagtggaactggtggaaggagaggggcgggacttctccgggtcaaggccaggtctcttccctgctcggtgctatgttcctgttccacggggtggcgggtcctgggagggagaagcccagacccagtggacactgacattgtctctcgctgttcccagccttttccaggcgtgtgacttaatccgtttccacagccagaccttttctccgtgagttcctcagccaggactgctgccatgccggtgactgttacccacccaaccgtcacgaccaccatgcggtcccccaccgtcgtagggtcctctagggccctgatccagcccctgggcctcctccgcctgctgcagctggtgtccacctgcgtggccttgtcactggtggccagcgtgggcgcctggaaggggcctatgggtaactggtccatgttcacctagtgtttctgctttgccatgaccctggtcatcctcctcgtggagctgggcggctcccaggcccgcttccccttgttttggcgcaacttccccatcacctttgcctgctatgcggccctcttgtgcctctcggcctccatcatctaccccaccacctacttgcagttcctgtcccacggccgttcccgcgaccacgccatcgccgccatcgtcttctctggcatcgcctgtgtggcttacgccaccgaagtaacctggacccgggcccggcccggcgagatcactgactacatggcctccgagctggggctgctgaaggtgctggagaccttcgtggcctgcctcatcttcgtgttcatcaatagcccctacgtgtaccacaaccggccggccctggagtggtgggtggcggtgtacgccctctgcttcgtcctggcggccctcactatcctgctgagcctggggcactgcaccaacatgctgcccatccgcttccccagtttcctgttggggctggccttgctgtccgtcctcctctatgccactgcccttgtcctctggcccctctaccagttcaacgagaagtatggtgtccagccctggcagacgagagatgtgagctgcagcgacagaa

SEQ ID NO: 8696 - DNA, 6000 bp, Homo sapiens
tacctgtgcaaagacagcaagcaggggcatgagtatgaaaaaagagtgtgcgggtactaagatgcagctggagaggtaggcagaagcaggatgaaaagggctttttaagtcattgaaaggattctggccactgaaatatttttcataacatataggggtggataggatacatcgtataacgcacatgacagcccctcacaacaaattatccagccccagatgtcagtggtgcttaggttgaaaaactttgctctaggaaattaacctacaaagatattggcacacataaaacaacttttgcacaatcatatgtttgaaattacgaaccattggaaatgacacaaatatacaataaatgagttaaataaattagggtacatttgtacagttgatgcaggatttttcttggccactttgacagctggagacctccggccagcaacaccccaactactcggcccaccaggatgtgtctggcttgtgctcaggcacgaatcctgcagccaccatggcctcagcccctggcaggagggggtgtgtgagtgaacgagtacagggcaggagtgggctctgtgcggggcttgtggctggaccaggtgtgtcacattgagggaaatgtggtggcacccaaacaggggtgctcatgaccctgaagccccagaggtgttacagtatgctaagcactcttttagttctgccgtctgcaggccaacggacagtggcatgttaacagctctatcagtcccattgccccactcaggcccgtggcttcaggactggctctgccccactgctgcttcccatcgcgttgtgtgggacggttgccctccaccagcagagggcaaagggccacagtgtgtacagccttctttgtatctgcgtttggtgggtcccgaatttttcttcagcgtccaagaatgaggttacgctgacaatcaaagggtgaggagggtggagaagagttttatttgaactatgaaacagctctcaggagagagaggatgcaagggtggtccctcactcaaagtcaggtggtctctctctcagtgcggctgagtccacagcttttatgggctcagaatgaaggcgtgcatgctgattggtttgtgagtatgcaaaaaaggctaaaacaacagcaccactcaaaggtaggtacaacagtgtaaaaaaacaattaggaaaggatatgtgtaaaataggtgaagggtggggatcaatcagaagaaagcacgccaaatgggaagagaggttctcaatctggtctgtggatttatcctggtcttgtggctagcctttaaactgtcctcagcttgaagggtttcaccagggacctgcccctgtctgcctaggatttgtctgccttttgcggctatcacagtgggatactatgtagccattaagtagaatgagttagctctatatacacactgacccaaaaaaggctgtcctgggcacggtggctcacccctgtaatcccagtattttgggaggctgaggcaggtggatcacatgaggtcaagagtttgagaccagcctcaccaacatggtgaaaccccatctctactaaaaatacaaaaattagctgggcgtggtggcggacacctataatcccagctactcaggaggatgaggcaggagaatcgttagaatccgggagacggaggttgcagtgagccgagatgacacctctgcactccagcctggactgtgtatggaaaaaaagaaagaaaaaaaaagtgggggacaggggttcagatatggtggctcacacttgtaatcccagcactttgggaggtcaaagcaggcagatcccttaagctcaggagtgtgagaccagcctgggcaccaacatgtagagaccctgtctccacaaaaaataaaaaggaaggaaaagaatagtattccattacagtcatgtgtcccttaacaatggggatgctttctgaaaaatgcatcatcaggtgattttttgttgtgtgaacatcatagagtgtacctaaacaaacctagatggtagcctactacagaggtccccaacctttttgacaccagggactggttttgtggaagacaatttttccatggaaagggggagttggattctcataaggagtgcacaggttagatcccttgcatgtgcagtttacaatagggttctcactcctaccagaatgtaatgcccctgctcatctgacagggggcagagctcaggccgaaatgctggctcccctgccactcaccttctgctgtgccgcccagttcctaacaggccctggaccactactggaccactacatacatatctacatataattacctgtatatgcatagaatatctctggaataggactagatacatactttgtgggcccagtgcaaaataaaaccgcagggcccttgtccagaaactttcctgaatttcaagttagtgacagcaaaacattaaaccaagtgcctatctgtacaggtcaccaccatgaagccagccctgctctggcaacatacacaggaaaatggaatagaggtgattccaagaggaaaattctatgagtggcaggagacaaagactaaaagaagacttagttttcactatatatctttgcctttttttttttttttttttttgagacagtctgtcacactgtcccccaggctggagtgcagtggtgcaatcttggctcactgcaacctctgcctcccaggttgaagcgattctcctacctcggcctcccaagtagctgggattacaggcccccaccaccacgcccagctgatttttgtatttttagcagagacagggtttcaccacgttggcctggctggtctggatctcctgacctcgggcaatctgcccacctcgccctcccaaagtgctgggattacaggcgtgagccaccatgcccggcctctctttttaatttcatatgtgtaaaggcattacttattcaaaacaacaaaaaaggaagattgtgggcttatttggttagcaactctttgaagtggaactttgatgactgcctgaagcaaagaacatctgctggggaagatgtggttatggggggccctcagacttggataagcactgagccctgtgctttggaggggtctgaaatccatggaatcatgggactgtagccacctgcagcccactttcccttttccagaccatgctgtgggcactctagtattccctatcccaaacgccaagcctgactccagggtctgcacaatcctcttcccaagttcagtcttcctggggagtaaccaaagggtgaggcttggacagaaggctggagagtctaacatcaggctcaaaaattgtgtgaagcattctctgactcttccaagacagaaatgttattttctctgaggtcaaaatacattttgtccactttcatcacatcaattaattggctctattgttatgtattatattatgatgattttcttcaagtacattttctgaggtctctagattaaaaaaaaaaactatgaatccagattttgaaattatttctatcagcatgtgttctgtacactgacccacgttgtagtgtactgctgaagggtgtccacacttaagcgatctggtcaaaacataagcacgttttaacaagaccattgattagttatgactacaactcccaagatgcactgcagggtcagtgtgcgcgtctcgcctagttttcaccgatcaggctaatgagctgcacagaagtggcagctgaacaagctgagagactgtattaaagaacgaatatagcggggatggggagcaggcgtctacggtcccagctactcgggaggctgaggtgagaggatcgcttgagccctcaaggcggaggctacagtgagtcgagatagcgccattgcactctagcctgggaagcagagagagactatcaaaaacaacaaaacgaataaagggattctaccaagagtgagctggactgaaataaacgacacgctactacgacccagcgcgtgactatatccaccgcacaatgtgcgataatagcctcaatgcagagagaattcctcctttccttattcagtgcaagagagccctatagagaacgcaggaaatgcccgcgagaaactgagaagtatcaaaacaatcacagatatgttaggaaagtagctccccgccacttccctaaacttatcatagcagacttactttccaaggttacaaacacaagaagagcactgtattttcatgaagcggaaaatgtgctttacaatcgccagctactaagagccttaacggtgaagcgctctgcaagaaacaggaaatcgtcaacacactttctgcatgaattgcctggagagttgtgtccatagacaattcctggttagatgcttaattgtagcagactccataacggggtttagcgggtttccattcggcagaaagggctccacgttctttttcacagaaaggtttaaacttatttttcctcctcaggcggacgaagtgagcgtcgttccgtgaaggtatgaaacccttttccttcctttctgtccctggttactccggttcaaggctacgtacttccccggtttgctttgttttttcctcagagctaagttcctaggaacgtcacatactggtgccatccaacaacatgacgacgtgcggaaccgaagtccccttccacctagcggcctctcgcggcgcaggcgtggacggggagatcgcgagaacctcccgcccaattgcgaccccgcgccaagaggcggggccgaaagaggaggaagtcgggccgaaagaggaggaagtctcgccgaagtactcccgccccagtcggtacccctcctcgcgagagcgccgagcattccggcctgggaagcgcgtgcagaagcggaggtgctgctcatgggacttgtcggccgccgtagcccctgctaggacagcccgtgcgagcctgctggaggaggaagagaaaggcagagagagtcgggttacaagatggcggatctgtagtagttaccgcggcggcgggagagcaagcgagccctggggggcaaagagacgggagagtgggtgtatgcgcgggtgaagtgagaggtaacggggctccgggcggagaggcctcagtggctcttgtcaccccttctcgcggctgaacctttggagccatggtgaattcgggcctctccgaagccgccgccgccgccaccgccactactgcctttaccgtctcctaagagtgaggagcgcggacgaggtaagcgaggaggcggcggctagagcggtggagacagcagccaccatgtcggatacgcggcggcgagtgaaggtctataccctgaacgaagaccggcaatgggacgaccgaggcaccgggcacgtctcctccacttacgtggaggagctcaaggggatgtcgctgctggttcgggcagagtccgacggtaaggttatcggaactgtagaataggggatagtgcctctggttggggcacagcttgggtttagggccctgggcccgttaccgttgctactccttcgggacagcgcgttggttctgaactggctcttgtgtacggcaaaaacaaagtactgtacttttgactggacttatcctcggagaccgagactctctgtccttctcccatctctcttaaggattggactccttcctttccagtccctcctcttttgaagaggggagagtgtgagagagaagggaggaagtagtgagagactaggtactgatgtcgccctaggagctgacaccttcctccccctttatttacttatccattatacgtctagtacaaacggtttagggaaacttttctttccgagtgtttttaaaaaaaaaaaattgtaccaacgggccccaggtgccacagtcgacaggtgctggggaaaaccgaaaggcacgttttcctggctgtattgctgactgttgccacgatacatggacacacaagcacatacatctgtagtctgcatttcttcgggctgcctttgtagaaggcgctatgaga

SEQ ID NO: 8697 - DNA, 6000 bp, Homo sapiens
aagccgcagtcgaaagcccctttgcataatccattcttaaattgactgaggcttgtacagttgtaaactgaaactccagaggcaaaccctgagcggttacattttctcgaaaagaatgtttcccagcctgtcaattatttcctggtctccgtccctccccaacgcgcgcacacacccaacttttagtagccagctgccttgacattgagtctctctcctacctgaagtggagcacctcaggaagcagcgaggctgccgtttcattcataatacatgaactcaggggaggagggaggcgggggcaggggcctttcatctctgctatttaaaatcccggcattgcagctgaaagggaaaacgacctgggattgaacggcaccggggatgaagcattgcacgataacggcacaaccgagcgcgtcagcggcccgcccgccggctatttataccgcgcggattatgcaatcgggctccagccattcatgccccgactgggccgccgcacgcccggggcgggggggcctcattcccgggcgccgggtcagtttctaagtttgcatcatcccctgcattacgagagagcttgggtttccattcctgccagcggggcttgggggagacagctgggctacaaactcacttggcacacacgactgcttacttaaacatcataataaaggcaccagatcgcccgaggcgcggcccggccgcgcgcagggttgagctcggggagaccggaaggaactgataaccgagcgctaatgacaccccctccctccgcgtcggaagtgtcctcggagcgccggtcattgagaaataccgaaggggcagagtgggggtgaagcgaggacaggcccgggcgcagctgcgcgcgcctcgcggggcggggagcgggggcgccgcggcagcggggggcttctgcaggctgggccgcggcggggcggtgcgaacctttgggccccgtggagtcctccctaaatcaccccctccccgcccctgggaggggggagggcgagtgattgctcagatcccacccccgcccctggggaaatctacactgccggccctaccggacgagaggggggagaaggacacgaacgagagagcggattgcagaggaggctaaaatgtccgcttctcctggcgcccgagccaggcgggaggggtgggggccgcggacggcttcccagtgaaacaggacctgcggggctactgagcatgcccgtccccggccgcggagggtcgctccggctccgcgctccggactttccgggcagcccgcgggaagggccggggtgggggtgctccctcgcccaggactcggaactgagaagcctgtaggtgggggacctgctgggggccccgctgggtttgcgtgaagttgtgagcagatcgatattacttttgaagctttacgatcctactctgactgagcactattgatttgatcgtgttcagagattcccgcagccccctgttctgccggttgtggggagagacagggatgtgggtccttagctctttcagcagtgacatcaattaaagccctaaatctgtgatatcccctattccagcaacaatccaatggactttgataacaccttgatgttcagatcaacagacatatctgagttattcgcccaatgtcctcatttattctatggagctgcaggagtcagacttgcctcaaccacagtaattgatggggaggaccaagaagtgacctgctagtaatgtttccatcaaaaggccccttttgggtgttgaacaagacagaagagaactggcaggcttcatttaaaggaacatgaaggacagagtggaggggggcatttggtaaaccagctggccagagagaggaaagggctatcaggaatctgtatagcccatttaagattcccagcaaccctatgttgtgggtactattccgacccaacagacactgaacccaaggctcagtggacctaagggcctgcctgagatagcccagctggagtatggtaccaggtgatcccagtggggacttggggacttctggacctcagaatatttatcattgttcccctggcaacctggtccataggctgggccagtcgttcgctgctattaagcagagagctggctgagtgagtggtgatgacaccaatttaacctgctcatagagctggcctacctgcagaaattaatcacctcacctgccaccttgccatttgtgtaccttgaaactggagggtggagcccaagagatgcccacagggtggataattttgacatgggtaagtgcctgtgttctgggaagttcaggaataacagggtgggatctctttcagcactcccagggagaagagcaaccatggccaaaggtgagacttgggtagattccttagccatctgaggatttggaagacaatgagatcttgcctttgcttagtactttctcaggaactctcaatggcctcaaaaactgataaagacaagcttggccttgttattcctgttttataaagaaactcactcggggtctcaggactgctaggagaaaaccagaaccaagctgttccatcccctggttcatgccctccccaccaccacacatcaccagcgtgaaccctactccatgtctacagagatcatggctgtgataagcacaaagcctggagtaaaccaccagtttatccctgactcaaggtgaaactttttggagcatttgtggctcttatatgtatgtaaattttaggaatactaaatttgaggcatttatttatttatttagagacaaagttttgctcttgttgcccaggctggagtgcaatggtgcaatctcggtacactgcagcctcctcctcctgggttcaaacaattctcctgcctcggcctactgagtagctgggattatgggtgcccaccaccacacccaactaatttttatatttttagtagagacagggttttgccatgttggccaggctggtctcaaacgcctgacctcaggtgatccgcccacctcagcctcccaaagtgctgggattacaggcatgagccactgcgcccagcctgaggcaaatatttaatctcttaacctgttcagtggttgctatttagttaacatcgtatctggattgtcccatggacattcaagaggatggaaaagtctactgtgtttggagagcagcaagggatagggactatgtctcttgtttctttttctttctttctttcttcttctttttttttttttttgagatggagttttgctcttgttgcccaggctggggtgcagtggcacaatcttggctcaccgccaccttcacctcctggggtcaagcgattctcctgcctcagctcccgagtagctgggattacaggcacgcgccaccacgcccggctaattctgtatttttagtacagacgatgtttcaccatgttggtcaggctggtctcgaactcccgacctcaggtgatctgcccgcctcggccttccaaagtgctgggattacaggcgtgtgccaccgcgcccggccggggctgcttcttaacgcgagaaattccataatttctacggaaatgcaaacgtttctgggctgtgctgggttgacctttttctttgcatgagtaatgattcttaaaaacatccgttccttggccgggtgcggtggcccatgcctataatcccagcactttgggatgccgaggcaggcggatcacgaggtcaagaaatcgagaccatcctggccaacatgatgaaaccccctccctactaaaaatacaaaaattagctgggcgtggtggcgcgcgcctgtagtcgcagctactcgggaggctgaggcaggagaatcacttgaacccaggaggtggaggttgcagtgagcctagatcgcgccactgcactccagcctgaggacagagcgagactccatctcaaaacaaaacaaaacaaaaatccattcctctattgagacaaaaaagaaaaaaaatcacaagattcacgtgaaacggaaaagcctctgcctttcagaaccttggcaaagtcgaaccccctcccctctctggttgggttgggctggagaagccagcccctggcacctgcgccgcccctaccttcccaccccgcggtgggggtagttgtgcctctgagcctgagcacctcttcagctgttttactccctcccctcccttgagtttcccatctctgcccccgcccaaccccccgatttttaatcttggtgtttggaaggagggagggggcaaaaacgggagccagatgtgtacgagtcctccgctcccgcctcctccctcctctcgggcttcctaaaacccggagccctaatcaaggaggattcggagccagacggtcgcggcgcaagcaaacaactcggctccgcggctcccccgggagtggaagccaggagggagggggagaggaagcggggcgtgctcagtaggcgggacaaagtttttttttttttcttctccctttttttcggtcgcaagtaggaagctttttgcactccaccacctctggccgctgggaagacgtcatcgcttccgccctacttcctcctcctgttggcggcggtgagaatccaatatggagtaaatcggtggagtcgagagatggggctcggacggggcgccctgcaccgcctcccaggcgcacctcccccggccgccgaccgctccccggaaccgtgattggcccggccccccgggggcgaccccggactgagcccccccacccgcggccggcgctctcctcctcctcgcagcagtccctgccgctccgaggcgcgcttgtttttctcctgctctcccccaccgccgtccccttcccaaatctcgccccctctgcccgctcccgagcccccggagcctccgcccgcctctccccacggcgctgcggcgttcactccccgcgcagcctgcctttgcaccccttcccccaaaccctatcccgcgccctgcttccccttctgctgcggcgccctcttcatctctagccgccccccctccccaaatcaggcgatctccggagatgtgaagaaggggggcgagcggacaggaagatgaagggagcaaagctgcccgccgcgggacaggcgtctaggtgaacaagaaaatgaccgaagaaacacacccagacgagtaagtttggtcgcggggtgggacgagggtgcccctcaggggcagcgtgggggccggggctgaggatgcgggcggggacgcttattgggtgaacttggcgtggggtgcagcgactcgctgacctttcggcgttgggacgcgaggcttccctgcttgttgaagtgaggagagggcaaaaactgctgcgggctggcgggcgcacgcctagggtcggcgggctggtggcagctccgggggccaagggcgtgcgggtgacctcccggcggtctccgctccctctcggaggacttacagctcccccgcccccgaaatcctcggcggctagagcggaagacctgacacccccactccggcttcccggggctggtgggtttttgcacagtgactttgtgactcccgccgccccgcgagccctgcagtccgctccggagcccactggggcctaggctccgccatttcgttttcttgaatcgctctcatttgcataccacattttcattcataaaaaacacggcggagcgagaggaggacaggcgcgggctgcgcgggggtctggtgcgccagggtccccgcgcgggccggcgtgctggagccgcccgaggggccccgcggcgcgtgagtgcctgtgcacgcgcttgtggccggcacacgcgtcctgcggggtcgggcggctcggggcggaccgaggcgtgtgcggcgggggcgtgcggggcatcgcgctgggggcgcgcgtgtgtgtgtgtgtatgtgagtgtcctcgcgggtgcgcgtgcacgggcttgtgcctggcccgcgggcccgaggggaacaatgctcggggcgctccgccggagggatcctgggccgccccgcgcggga

SEQ ID NO: 8698 - DNA, 6000 bp, Homo sapiens
ttaaaagcatgattctcattgtaaatataaaatgaacatggatcaaagattttattcgactcattcattaatgagggaatcagtaagacgttaagattagttcaaaggagaattcaaagaacagatatataggtatagacatggatattagtgaggaatgcccagtaaatttgctagtggatgcaaaactaattaatattctataggatgtctttatggaccaaagtttatttgcattgctttggacaagagtcatgtgcattatgatctgttttccacaaattaccttttaaactattcagcgtggggcgggtgcggtggctcaagcctgtaatcccagcgctttgggaggccaaagtgggcagatcacctgaggtcaggagttcaagaccagcctggtcaacatggcgaaaccccatctctactaaaaatacaaaaattagccgggcatggtggcatatgcctgtaatcccagctactcaggaggctgagacaggagaatcacttgaacccgggaggtggaggttgcagtgagctgagatcgcgccactgcactccagcctgggcgacaagagcgagactccatctcacaaaaaataaataaaaaaaaaataaagtattcagcgttttctgtatattcatagtatattaagaaacatcgctgggtgcagtggctcacacctgtaatcccagaactttgggaggcggaggcaggtggatcacctgaggttaggagtttgagaccattctcaccaacatggcaaaactccatctctactaaaaatacaaaaaaattagccgggcgtggtgcagtgcgcctgtagtctcagctactcaggaggctgaggcacgagaacctgggaggtggaggttgcagtgagcagagatcatgccaccacactccagcctgggcaacagaacgagactccatcgcaattaaaaaaaaaaaagaaaagaaacatcaccacgttgtctaaaacattttaatcactccaatatataacacactaaatcataaatcccaggggaatgtatgcatattcataaattttgctgaatcttactttatattttattcgagacagggtcttgctctgtcaccaggctgaagtgcaatggtgccattataggtctctgcagccttgacctcctaggttcaaatgatcctcccacctcagcctttgagcagctgggaccagaggcacgcgtgcaccaccacacgtggctaatttttacattttttgtagagacggtgtctcaccgcgttgccgaggctggtcctgaactcctggcctcaagctatcctcctgtctctgccttccaaagtgctgggaatataggtgtgagccaccatgcctggcctaacctagtatttcatcctccttagtctaacactttagaatccattcccatacacagttctcagcttctctgcaacacatattggcaagattttccagctttcgtggtatataatctatttccatcctcctcttctctggctgaccttgcatttctccttctgggctctgtagagagtttattcttgttatgctcctggagtcaatgaggtgcatcaggggcaagtttggaggagaacaggcatccatgtgggaggcagaggccccagtgaagtcttgaaagctcttagtgtatgtgaaggctaatttccttgcacaggggaggcggggctgcttctgtatacaagggagccttgagatttgggaattcggctttgtctgtgtctgtccaaatgttcctatcacaagtctatggtcctactccttcccaatcagtgtcctaatcttagcaagagaacttgctgaggttgagcacttaacctttgccacaattctgtaatctgtacaattatatttagtatctgaagatgaacttattctgtcctgtgcctatcccagataaatggttctttggatttcagcatatctgtaccttaaaataagaatttaatacttcatgtttatctcttccattgtttaaaaactctccagggcagtcagaaacatccatttcactctacaatctttataattattactgttgccatagcaatcaagagcaacagcagcaaaagcccccaaagctttgtggtccatatgcccctcacactattcccagtgctaactggagtaatcctgctgcccctccatgccacgggttactagcatcccttttgttcgctatgcacgcacgaatctgtgggtaacccagccagaatcccacaattgaggaactgtgtttcctggggtcactctgctatcagccagggtcttggtaggaaatgcagtccatctccgaaaggttgaagagatttgctgctcaacagctgtgggcaggattacagaggcaactggattaatttgctaggacagctgtaacaaagtacgagaagggaggtagcttaaacaacagaaatgtattatctcccagttctgggagctagacatctgagatcaaggttgtcggcagggaaggatctatttcaggcccctctcccggcttctggcagttctttggcttgtagcagcacaactctaatcttctcatggtgttctccctgtggatttgtcttcccaaatttcctctttttataaggacaccagtcattatggattaggggccaccctaataacctgatcttaactaattacatctgtaatcatccttttttcagataaggtcacattctgagttgctgggagttaggacctcaacatatgaatttggggagacataagtcaacctgtaacaccatcaagggtgatgagaacgtagagatgagcaacagcgggaagtgggtagggctctgccggattttctccacccgctcctccagatcccctcttcaccctcctccaccttgttgtgtgtctgggaggctgactgccgcagactgcagcctgtgaccccttgcctcctattggcttctgtttgacttgggtaatggcacaggcaggagcttcggaggtgggagagagataatagaaacacagtacctcatagtaccctcccatgccttcccaatgactttcatatccctctccgtgcttctttcatatttaatatttggcagatcagagctgaataatgtttaaaacatgggtgagcgtgtgtgaaccctttcagaagtttttgaacatttaataataatggctgatgttcactgagtacttactttgtgttctaagtacttactacagtatgctcttgatagttcctacaagggaggcactacgattatcctaattttatagttgagtaaactgaggctcattgagattggtatcttgcccaaggtcaagatcacacagctaattagcagcagttgcaggattccatttggggctgtcagccaccagaggctgctctaaaccacaaggtcatctgtgctcatccatttaccagacatgacctcccctacttgacctcctgtcaaactcatattcaagtactgatctagcaacagctgttctgtgggactttctcaattccctccccccaagaactgaccacgcggtctgcgcattgctctctgctcactgcccccctgcgtgggctcctgttaggaagcctacggctcttttctgcctcattttcctacctgtgagttctccagggcagacaagtctcccagttcatctctgcgattcccgggcctggcagtgtgtctgcgcgggaggtgccagtgaatgtctctggaaggaatgttttcttaccgtccccgactgttctatatgccctggtgcaccctaatggtcccgattaccattgacttccttcctcagtttcattcagaggctgttagtggctgccagtcctggaccatgctctcccggcctctgggtgggcgttcctgtcccccgcccacacggttcttgtccgccaggtctggtcagggtttctgagctgttcccttctggaggcgcttccctgagttcccaggcgtcctggggggtcgggattgactttacttccacttttcagttctgtcctagttatcagtcacgttttgtcagggattcctttgttaaaaccccagggatgttttcatggggttgttcttttcttcttttgctaggtagggtgttaaatgtaactgcctccctgtggagatccttggaggtcctccagcctgctccaggccagccaccttgtctctgcttccacaacatccttgaggaaatacgcatttaaaacccgacctctacattccctgtagtttctcttcacatcgcctactccatattttccagcttttcaatttctctcagaacaaaggttttatttctgggcagggcactgacggcggtgacactaatatcggtacctccgggccacttgagggacgtccagacctgagtctggtctgatgctttctttaggatcccaaacatcgctgccgcctccgcagcgccgtcggatccctggggagagcatccaaaatgtgaaccaagtattaaaaacattggaatataactgtttttaattcttatgctgttttttggttatttgtaatttttgttgttgttgctattttaaacccagcgcacttaggttttctggcgtgcattctgccccccgccccctcggtgcggaaaaatgccctcggtggggcaacctgcagctgcgagaagaaggctttttccctgtccctcctccacgtctcaggtcgaggtcagggacggcagctctcccgagttccccctgagagcgcggagaggcgggagggagggagcctggcgcaggattggacttcctccctccactccggaactgcgcgccggagcgccttggacgcggaaacccgggaggcgccgcgggagccgcggggtaggggcggtcgggggcggggccggcggctggagaggggccaggggcgggtgcggggcggggccaggggcgggtgcggggcggggccacgtgagggccgcgctgggtgcgcggggctagctgcgcctgctgcgctccgcgggctctcagagcgctgggcaccggccgggctgtggtccccgcgcgccgccgtcgcctctcgagcgggctcggctcacagcgaccggcggccggggagatgtgagctggggccggcgggcgcggccggaccgccgcgatgtggctcaagcccgaggaggtgctgctgaagaacgcgctgaagctctgggtgacccagaagagcagctgctacttcatcctgcagcggcgccgcgggcacggcgaggggggcggccgcctcaccggtaaggggctcgccggggcgggcgcggcggccgggcccggggcctcgcaccccgccgggcccgcggcccccagtcccgggctgcgtcgccagaggcgatttcttgggagacgcggggcccggacggccctgccgcgggcttgttttccttttttctgcgtttctcccgcgggctcccgtcgaggtggtggtagagggggctcccgggcgcgtgcgttttccgggcgaggcaggtgtcttcgccgcctggcccggtgagctggaggccggactcgacttgggaatcgaaggagaaacgccgggtggagcggggccggagggctcggggccgccctggagcagcgaggctgctgtgtggggccaggtgacagcggggtgcgccgagccagcccggactcggccatctggaggcgccggaggctccaggtggtgtcgtggctgggggcgcgcggcgatgcgcgcggggcgcagctcttggaggccgcggtgagcgggaactgtctccacgcccggaggggaaactgagggtgggcgaatcccaagctcgtgatctcagtagagaaattgaacagatcagttttttcctctctttcagtgtcttacaaggaatgataggaaaaaaaacccaggctcgtaaagttgatgataaaacaaagcattttttttctaaaagttttgttccaaagctctttgaaattgacgccaacttgcagtagctaggacacctgtttaaaggtcagtgaagg

SEQ ID NO: 8699 - DNA, 6000 bp, Homo sapiens
aagctaaagcggcaaagcagggagaggttcatccccacccttctgcatcccctccctattattttgaagaaaatgaccctccagatctttctttcctggaagacactgggcgaaaagtagttgccccagtgactgttcgagaagtgccttaagcgactgctctcagttctattcaagcaggaatttagcaagctacacaagaggttgatttagaggcttggcattttgctgttagaatacaccccccagatcaacagggaaatattatagctacatttgagccttttccttttaaattactaaaaaaatttaaacaagctattaatactaaaaaaggatatagaaataatcagcgagtcaggctgccatataggggattccagaatggctcaggccattccctcacccctgtacaatgtctgtcccctgccacagctggtagtgccacggtagacttatgctgcacaaaagctgtgagccttctgcctggggaatccctgcaaaaggttccaacaggagtctgtggatctttgccaatggggacaataggattacttttaggaaggtctaatttaagtttaaaaggggtacaaatacatacaggagtcactgattcagattacaatggggaaattcaaattgttatatttacttctgttccctggaaagcagagccaggagagtgcatagcacagctcctgatcgtgccgtatgtgggaatgggaaaaagtgaaattaaacgaacaggaggatttggaagcacaaataaacaaggcaaagcagcttattgggtaaatcaaattactgataaatgtcctacctgtgaaataactattcagggaaagaaatttaaaggtttggtagatacagaagcggacatttcaatcatttctctacagcagtggccgtctgtgtggccaattcaacccgctcaatttaacatagttggagttggtaaagcccctgaagtatatcaaagtagttatattttgcattgtgaagggcctgatggacaacctgggactattcaaccaattataacttctgcacctataaatttatggggaagagatttgttacaacaatggggagcacaagttctaattccagaacaattatatagccctcgaagtcaacatacaatgcatgaaatggggtatgtccctggtatgggactagaaaaaaaaaatttgcaaggtttgcaagaactgcttcaagcagaaagacaaaattcctgccaaagattaggatatcatttttgatggccattgttaagcctccagaacctatacctttaaaatggttaacagataagccaatttggatagaacaatggccgctaagtaaagagaaactggaggctttagagaaattagttactacacaattagaaaatgggcacatagctctaacattttccccttggaattctccagtttttgtaattaagaaaaaatcaggtaaatggagaatgttaactgacttaagggccatcaattcagttatacaacctaagggagcattacagccaggattgccttctcctgctataattccaaaaaattggcctctaatagtcatagatttaaaagactatttctttactatccctttagctgagcaagactgtgaacagtttgcatttacaattcctgcagtaaacaacctgcagcctgctaagtgttttccttgtttcacagatgggtctagtaatggcaaagcttcttattctggatcaaaaggtaaagttttccagacgccctatacttcagcttaaaaagcggagcttgtagctgtaattgaggtatggactgcttttaatatgcctattaatgtcatttctgctgcttcatacgtggttcattccacacaattaattaaaaatgctgttactatttcatacagataaacaactaatgacaaaaacaaaaaagggggagaaatagggattatgggacagcccatacacaattgaatctagcattattaactttaaatgttttgagcctgcccaaagaaggccagatgttatcagcagctgaacagcatctacagaaaccagatgcaaagacagaagcagaacaactgatttggtggagagatccggtaacaaaaagttgggaaataggtaaaataataacttggggtagaggttatgctgtatttctccaggccaaaatcaacagccgatttggataccatcaagacacctgaaaccttatcattagccagatgccaaggaagagattctgggaggatcccaaggacccccccccccggttgcagccatgttgagactgacactgagaaggaccccaactgtcgtgagctatacccatcaaacacagccacccacctggggacagaccaagaagctgtcacagatggcagaagaaaacctgaggaaagcgggacaaccaatcacaacgagtaatttaatggtagctaccatagcggtgatcaccattgccataagtattccttcaacaagggctgccgagaccagctcggtcggggagagcctaacctagcggcgctagaggaattaaagacacacacatagaaatatagaggtgtgaagtgggaaatcaggggtctcacagccttcagagctgagagccccgaagagagatttacccacgtatttattaacagcaagccagtcattagcattgtttctacagatattaaattaactaaaagtatcccttaagggaaacgaagggatgcgccgaattaaaggaataggttgggctagttaactgcagcaggagcatgtccttaaggcacagatcactcatgctattgtttgtggcataagaaggcctttaagtggttttccaccctggaagggccaggggttccttgccctcattccagtaaacccacaaccttccagcgtgggcattatggccatcacgaacatgtcacagtgctgcagagattttgtctatggccagttttggccattctcctgaggcaggagaatggtgtgaacccaggaggcggagcttgcagtgagcccaaatcgcgccactgcactccagtctgggtaacagagtgagactccatctcaaaaaaaatttttttttactattctgctacccaatatccttaaataattattgagtgccttaatcaaaataaaaaattcccagcttgccctttaaaattcttgtcaatctgtttcctcttatacctagtcagccttgttttccattccaacactaagtcttagacaaaaagtctttatctgtccaaaaaatctctaagtcttttttttttttcttttttcgagacagagtcttgctctgttgcccaggctggagtgcagttgcctgatcttggctcactgtaacctctgcctcctgggctcaagtgattctcgtgcctcagcctcccaagaagttggcattacaggcttgcgccaccatgcctggctaatttttgtatttttagtagagacggtttttcgccatgttagccagtctggtcttgaactcctggcctcaagcagtctgcccgccttggcctcccaaagtgctgggattacatgcgtgagccaccatgcccggcctcccaatttatcttgaacatccctaggttcaacgttctatgaaaaacagccccttctgcacgattccttctcatttgtgccccgaactttataaaatgcaaccacctttctgaatgtgtatgagctctctatagcatcaggtctttatactagagtttgtaaaatggttttgattaatctattatttaaaatgttggagtaattctcaacatttaaacatcattgaaaaattgcaaactctagtaggacccacatttcaataaatggctgcaatttaccagtagttgacatctttagatacgcactgttcagttagaaagttacagcttcattcgaaaagcattgagcgtctattacttgggacactgttttagacgctggggatatagtagtgaccaaaacttatcagggagtttataatctaatgaggaggagagacaggcaacataatcattactacagttttctaagaggaacagagaatatgtgggtgggaagggtgcttgggcttttgcattcatttaaatacctggctggatgctgttggaatttgagtttatgactcgtactaccatccgaatcgtcatacaccatcatgtacgttatgcactgcccctataaaactctcaacaagtctaaggcagggagtgtgcctccttcgcctttggattccgggggcccagcagtgtttttatggaggggacacgatggaaagcgaaaagttaggcgtagttacttcgaccaccgctgtcccgggtggttattctgacggggtttggactgggcgcctgggagggtgcaacacaataattgttgaagagcagtcaggtctttcgcagaatctcaaagccacctccgcgccggcagctccgtttctagggaaacaggactgtaacgcgtacgcgtcgtgggtcctcgttctctagctacgagtcctgccgctctgaaacaaactaaattcgtgacaagaacttggccctcagagcccgtcgtccaacgcgaaaaaccacgggtaaccgcgccccctgccgcgccgccgctggcactgcagcttccggggtcgtccagttccaggcgggactacttccggctccgaaggtccccggcttcgtggctagccggggtcctagcgctggaaaggtggccgtagcggccgcctgacccctacaaaagtctgggacaggggcagcgacaaaggccttgggaggacgcccatggtcggagggatctcgccccgggagaaaagttgggacaggagcgcgggatcgaagggtggactccgagccggcctgtcaggcaagagccgggcaggtgcggtggcggaagtgcagggacggaggccgaagcggagcggtctagggagccgcggccgcgggtcacccggcgggtagcagttgctgagtgtcagctagacagcagcgactagggctcgggcgccggcgagatgcctttgttcaccgccaaccccttcgagcaagacgtgggtgagtgctgtgcccggtcctggactgctgtgtgcctggccctggactgctgtttgtccggctagaaagtgggcggtagcgactccggggactaggaagcaaagcgaagggaggggaggggcggtgccgcccgctccttcgacgttgggatttttctggggcaacctcggcgcgtcgctagcggtctggggagtgcttcctgccgcctgagtttggggaccctcaaagggccgttctccttgccaagcgtaggatttgggaagagcctagggctcgctggagactggactgattaagtagttgtggagttggtgattaaaaacttcctgctcgttcgacagctggttacctccgtctttgccccatcgttttctgaagatgatgcagcagtggagaccctgctgtctagagaagcccaacactagacacttgacacctagacaaccgcattgaataggaagaacttacttccccattatttatattactcatgcattcaatccctgatagggtagctttaagatttattacaattgtaaaggtgttgctcttcatccccggattgcaaagattgcgcgggtgctaggagatgttcggttttagagtatgaaaaggaaatctccagtctcaaaacactccagaacaacaagtattttacatgttgcagtcataaagcgctggtctctcagtgactatagaatgagaaaaacatggataagatatatacgaaattatttaggaaatttgagtaacactaaaacaaactgagaaatatatgtatgtattctcgaaagtctgggtctcactatgttgcccaggtgcgactagaattcctcccacctcagcctccacctccgtttccccttcccgagtagctgggactacaggtttgttttttgtttgtttttgtagcagtagttaacagaaccctaggtaaat

SEQ ID NO: 8700 - DNA, 6000 bp, Homo sapiens
agaaagggagaaaactttcttttatgataataataacatatcttcttggggtagaacataaaacctaatgtccagtgtttgagtaatatttcttttcatgatacagagagtggatggaggtaaggagaaaacagaagaaagaaaactaggaggagaaaaaccagcaagatgtcagaaatcttcctaactgtgactctaaaacttcattaacatctactccacttagaaatactttatgtgagtggattgtatgatacttaaagaaggggttggagtttacaaccgggcagttatggagaagtacagatatggcacatagagaaacacttatttaaacccaagagccagagaaggccttgagaatgtaagctcctctagagttttctaaaatcttggagttcctaaatgacagcacatgggaagtgggtaaaatttaccttatatgtaaacactatacattatttatgcttcatcactcatttatgtaggatttccttatacatttctctacttcttactgacatcattgatacacaaggactttggttggaagagattcgaatcatataatcatgtgcttttcatcattaatatttctagtgaaagtaaacacttgattcctcttcactgccgtagaaaaagataaggcaagacgttcaggcattctgcaaactgcaccctcactttctatccacacccactgcaggattcaatgactcgatatagagttcgcccagatagggtcagatgatctttcaactccaccttcctttctgcataatgcattttatcctggtaatatgcttttttcctaccaccttttggtattaaacccagtgttaagtttttcttaaggtgagaataatcacacaaagtcctttattttgctttataacactaccttagcagttaagttttggaaacagtagtatgcataaaacatattagatagaggggttctaggaacaaacctagactattaacaataattattttagaattacactgtcattgcaaactacagttcccagttatctactgttgcattaaaaaatcaccccaaaactcgatgacataaaacacgtggatgtgtcatcacatggtttttctttctttccatatggtgaatatacaaccctaggactgcctcctgttcaagaggaaacccaccctttgaaaggctttcaaactccaacatagaggacaggggaaaatatatatggagtagcctgcttagctttctttgtttctttagccactggggcaaagggctttcttttctgtgggatcctcattccaggtctcctattgctgtcagaccaagagtgcccagattactttatggacctacatggaaaaggtcaacaaaagagaccactgagctgcctctggtctaggaattatgggctagtggttcagaataggaaaccacatagaaattgggaccaattccttaactgataataaagtaggtattttcctggaatgacttctgtgcttctgtgacttaaacctctgaggttaactggtgttcgggggagctggtgatcagctggaggattctgagtcctaaccataccctgtcatgactaaagccttcatggtcctagactccagcagagctaatcattccctctctgtgcccacacctgtacctctatccctaggatttgtctacctacctatcctcctaaggtgggagattttaaagggtaacaaatacacaccattcatctttgcatccccagtgcctagcacttatttcccaccagccaagtgacccatctctacatcttattgctgtacagattcttcttaaacacatcaccttcacgtgttcaaaaacctccccagcctgtcactgtatcaagtctaaactccactacctaatttccaagaaacttcataatatgtggtaggtagaattaattattttaagcatttcttttaagaactgaccgctgaaattcactgatttctctcagacagaaagaagacttaatttaggacaactaaatggtaagtctggctgctcagggtagtctattacttagtttcaggccatcttgtatgttcccattacatagctccttctagctcccctgattgtaaggttgtccaacaaaacaaattgcatcacagcatgaaactattcactaatgaactgatcacttttaaatataatttttaaaggatatatgccaaattcattaaaatgattacctgacaagagagggaagggaataaaatggaaatggtgatcaaaaggggctccactttatctgtgatagccttttaaaagaacaatctattcacgtggtgattgttttcaaaggtgactacaacagtctctcccaagcggctcacccttttgtcatgggacattactgcttctctctcttaaagaggtggagtctatttccaccccttgaatctgatcttggcctgtgacctacttggaacacagaatgtagaagtgacaaggggagagttccagagataccctgcagccttaagacaccctgcagctttgcttctactctcttagaaccctgaagtaccatgtaaaaaaagtttgacttccctactagagagatcagatggagaggccccagaggctgaaaaatggaaaagagagaaatcccaatatcctagttgccccagctgaggaggcagacacgtgaatgagtccatctcagattcctcagctcaaactacagatgaatgcatatgcctagcagaaataatccattctagttgagccctgactagccaaccacagaatcatgagtaaataaaacgttattttaagccactgagtttcatgctggtatgttacacagcaatagatgactgatattacttgtgttattcaaaatatatattttaaaaataaataagcccacacgcaaacctttctttctatttaacaactagcctctttccttttaccacctcacaccccatctctttaatgtctctattcatctagctgattatacaatatccaacaatgcaatgcaaaatcagcgcaaatcaatgcaaaatcagggtgaagtgattataatgtgaaatcgcaaattttgcaaaatatgtaggaaatcatgaagttgatgaaggtaatgttagagaagcccttgaatcatgggcaactcctctgacaaatgagaatctgcagctggaatagttaacattaacatttgaagaagaacaaatctacatggatgatggcacaataagtgcttcaaaaagaaatgatttgaatgtcaaaatttaagagaggctcttggaaaattgatgaagccctcaaatatttttgaaatagtgacactctatgatttgcccacaaaagtcaaatgtaaaaggacgtcgtgtcatgatatcatataattttgttagaaaattatgcttcttaaaatcaacacttgattcatcctttattctaatatttaacacatttttgaccaactaaattttattaaatataaggtaaattaattttaataatgttcttacttttttaaaagataacatctcaaccaaaccttcttttcaccttttttggtctctatttttaaagcatttgctttaagtgggttttggtggcaccaattatctgaagaaattgaaggcctctgtaaatatctttagttcatcttcctaactggcagctatactcattgagagcagggtctccgtcatgctttgccaatgtcttctggatagtgcttcatgcatatagcagaaggcagagattcaaccaacgtgataaccaatggcctgctgattgattggcttacatgtaggtgttactattgacgaatggcattgttccattatcaatccctgacctggtatgagctggcatttgttcgtctcaaaattgttcatagaaggcctattacaaacttcctgctgaaagcactttcaaaggctggatacgtttaaaatcaactcaagcatgtaaagccattttaggaaaataagccccacatcccaaggttcagctgaggagggccacatttgagaacaggtgtgccacttcactgagcaggaattttaaaatgtcaaacattagaaccacttgagaaactccaactcagcctgccaacagacacttctgggcacgtgtcaataaatgccttgcagagatgggcatttgagaaagtctctcctcaccaactcaaagttagttaaaacaaatcatcacggtaggttcttaaaaagaccacattttatttttcctcagtctcacttcttgaaaaaaacaatcatttttttaaatgtggtcattcaaaaagtttccatatattacataacagtcataacagcagtattactttttttaaatatccctgaagttcaatctcttttaacttattttgtatctgcaactgcaagagtaataagaactgagctgttttccttatcattatcagagttagtcccattcctttgcaaatgagaaactaataatacaaacttggctgcagtaccctttaaactctatgcctcccagtaggacacccggtgttctgcaacccatcagtcagttctagggcaaatgcaaacaatactttccgttacaataacttgtatccaggaaaaagaaacaggcaccctgttgcatctgcagcatagcagccagagaaaagtttaccagctttagccaattggaagctgtggagctgggccaagttagcatgtttttctccgcctctagatgaagtcatgattgaaatatgacattgaaagggaaggggaacaggaaagaaaagctaaacctgcaacaaagtgtcctgtgcccagaacgcggttaggaagtgtgtgcatacgtctgaaccctaaatggttctcagttctgtaaacttctcctcccactgggtggagtagggcctttaagagcagctggaatgcagttcccctgatcagcgtagccagttgttgcctgtctgaacctctgccagtcctggagactggtgccctgagctccaaccagcgggcctcatcctacaccctcaccaccgcaacttctcacccgagcaagaagcagctcccagagagaaagaacgttcccacctgcctagccatgggagaggacgctgcacaggccgaaaagttccagcaccctgggtctgacatgcggcaggaaaagccctcgagccccagcccgatgccttcctccacaccaagccccagcctgaacctagggaacacagaggaggccatccgggacaactcacaggtgaacgcagtcacggtgctcacgctcctggacaagctggtgaacatgctagacgctgtgcaggagaaccagcacaagatggagcagcgacagatcagtttggagggctccgtgaagggcatccagaatgacctcaccaagctctccaagtaccaggcctccaccagcaacacggtgagcaagctgctggagaagtcccgcaaggtcagcgcccacacgcgcgcggtcaaagagcgcatggataggcagtgcgcacaggtgaagcggctggagaacaaccacgcccagctcctccgacgcaaccatttcaaagtgctcatcttccaggtcagttccccctatgcctccttacaggcgggctggaactccttatcattcttgatctcgctcatcctggctctcacagccatttttacatttgtcctgcctgtcagggatcacacatacaaggcactgtcccctgtctgcctgcggaaagcaaatgtgaaatcttcacacaggggtgggaatttcccaggtcactacagactaatccaaagaagatgtccccgggcttagtaggccccgggtcatttgtcagggagcacctggatgcactctgtacaggttgggaagatgtgcaggtgcgtgcaccctagtcaaattcatttgtctctttgcattaggagcttagggctctggctgcagctgttagctggacagggcaaattaattcagtggctgttcattaactcttagtggaaatgaagtgatca

SEQ ID NO: 8701 - DNA, 6000 bp, Homo sapiens
attataaacattgcttagagatattattcaatgtatctatctgttaaataaatcttccttataatatagtttcccacagtcaaggcagtcacaacataaaatcagatggagaagaaatagcactgtatagttctattaaaaaattgacctaggggctgggcattgtggcttatgcctataatcccagcactttgggaggccaaggtgggtggatcacctgaggtcaggagctcgagaccagcctgaccaaaatggtgaagccccgtatgtactaaaaatagaaaaattagccaggcatggtggcgcatgcctgtaatcccagctactcagggggctgaggcaggagaattgcttgaacctgggaggccgaggttgcagtgagctgagatcacaccactgcactctagcccaggcaacagagtgagactccatctcaaaaaaaaaaaaaaaaaaaaaattgacctaaaattttttgatcatttgagatcagcaattcccaagcactgcttttgtaaaactactatttaaaaaaatgtatcaaatgttagccagaccccaaattccctgttaagattaaacggtttccaatacttgaccatctcttcactcaacatactaccctcatcccagtatttacctgcagcatgagaaccaatcagatttccaaatccaagtaaaatattccgcctctacaacccagcacctatgaatcttcacagcaaagtcaagtttttctgggaagcctgggaaccagttacctatataatccccctcccaggacacagtgctactccaaatcacattcccaacacttaaaagatggtttctttacatcatgagtcattattttaaatttgtaacctgttaagtagttgtaagtcatgccaaattctgggaagccctccctcctctgggttaggtgtcttctagcagtgtcacacatctcacatcaagttcccagtgcaaagatgctaggttacaacaaatcacatcatcaggcactgctaaggacatcacaagtgggtaaagttgcactacaattttttttcttttgacaggaccttgctctggcacccaggctggagtgcagtcgcacaaccttggctcactgcagtttcaacctcctgggttcaagaaatcctcccacctcagtctcccaaatagctgggaatacaggggtgcactaccatgtccagctaatttttatattttttgtagagacaggatctctccccattgcccaggctggtatcagcctcctggtctcgatccagccacttcagcctcccaaactgctgggattacaggcatgaaccaccacacctggcctgcactgcaattttctaacaacaatgccaaaccaaatttggggtatttaggaatcacatattcatttaattccttcccccaaaatgaaaggaatatatacaccaccctcctatgtaacatactcaagagccaaaggtaatctttcaatcttttatttaaatgccatgatccaggatggattttagatcttgttgaaagcagccacatccatggactgcacatagtcctcaaaagcagtgatctgctcctccagcatatctgttccaactttatcatcttcaactacacactgtatttgaagtttcttaattccgtatcccactggaactagtttagctaaaaagagcattaagaaaaatcctagttagaaaagtcttgtaggaaaggttgaaactgtaggcaaattccagatgttagtttcaaaaaaaaaaaggcaaagcctaaactcacatgagccccagactaagccgtctgcttgaatgcttctgacgcactcctctaatttcgccatatctgtctcatcatcccaaggtttcacatctagtaagatggaagacttggcaacaagtgcaggttctaaaaacaataaacagcattattcaaataatgaattgtatttttttcaccctactccaagacacaaacaaatccatctcaatttgttttgagactatctccttagccaaacaaaactacagatacatcttgtgtctgtcacacatatatacccactttctgttttgctaagaaagaggtgtttgtgttaacagtttctttcccacagaggaatgccacaactgctaccataagaacagctgcagaccagtagctgtggaagaacctgtacaggttttaaaatattgacctattcaaggaatgtggaggaaattacttcaaggtcaagctttgaaaaagattacttacattaacatgaaatgaagttaaaaacaaatgacctacttttggctttctttgattcatattgtgcaagacgttcttcccttagcctctttgcttcttcactttcctgtaaagaaaaaaaattaatccacttcagaaagctggttgttcctctgcttaaagctagtggggtcatcacaaaaaagactggcttaatcagaaaaaagcaaatccatcacgaactcagccgaaagatggtgatttgattttattcatcatgcaaccagtcagaatttgaaaaaggcatataaattaaagccaggattcaaatccaggcaatttggcttaaccacattgatacaattgctgatcgatgtattctttttttttttttttgggacggagtctcgctctgtcgcccaggctggatgcagtggcacgatcttggctcactgcaacctccgcttcctaggttcaagcaattctctgccttagccgcctgagtagctgggattacagatgcctgccacatttttttgtatttttagtacagacagggtttcaccatcttggccaggctggtcttcaactcctgacctcgtgatccacccgcctcagcctcccaacatgctgggattacaggcatgagccactgcgcctggccgatatgttctttatagaagacgccatacctcctcatcatcagatccaaagaggtcaatgtcatcatcatctttactatctgtagctccacttcctgtagtgtcttccacatcggcaggaccatatttgcccaaagctttcttcactcctggcaggcttgaaaaacatttaaattcaaccactattgagctagtataacatccttttccagaaaatacaaaataacttgttttaatcactacttatcactagatcccttttgcaatcataatttaccctttcacatgcgcccaggtaaacactgtcatatgttcaactcctcacccgacaagcattagtaccatgtgagacattattttcaatactcactatgatttactctttcagtatgaacatttctgtttgagatttcattaagtatgctcagttccattcttagtgaactggagtccacttccccaaacttccacccttgttggcagtttcagaagaatggccaaggactgaatgaatgagccaccctctcaccccagaggtgggccccccaggtcaaggtcgaggcacattggcagggcagtgtggggaaaagttgaattgctgctgtccatgttctacctgttctgtgaaaaaatggagggcttcagtctcttggccttctaaggttacagaaaaatttagcttacaatatcccaacaaaactaaagtagcctgggtccagttttgtcatgtgaacatcctgataaacttcgagagcagtcttattcttcagctctatacaaagatgattttacctggccttttccttttcgtaagacttgatgtgattataccaacgtagggcatgacacaagtcggcaggcggtgggctggacacggcttcaaatactgccacatctgcttgtgatggcacatacctgccaaggacacagaaacattcacacacacctttgaaaaacaaacgccagcgaataaataataaataccgtatgcatcacattaattagtgggcactaaccccagcagggttgctttaatgcttttcttttcttattagctccttcaaatcaaaccatatgtttgggtcaccgcgctatcctgagaaatgtctgccactaagtagacctcaaatactgcaatgtctggcgttgctctatctacagcttaacatgtattaactgggcagcgatgcggaaacacctggctgaattaagtgtaaataaagcacattttaacctttccttgctcgtgaaccgctccccggaggccgggctcgccccacacgagggccttgggagacggcaacggggcgctttcccctccctctcgaaagggccccgggcccggcctccctccctcccgcggcagccgacacgctgcgccacgtggccccggccccgggcggagaaacctccccgccaccccgactcagcccgtccgctcacccctcgatgtagctcttgtccgccaggtaatcgttgagcacctggaggccggcagggcttttcaggtctccgaaacccatggtgtcggctgtatccgagagctggggagcagcagaaagagagcgcgcaaattgtgggcgccccacgctgaagagaggaaaaaggacccgaagagaccggaaaattccttatatagagacggaggcgtttccctccaccgcgccggaccgaaggttaaaggtcaaagtacttttgcattcccacttctccacgtacgaattgggggccctgaattaaatggcccacaaattgtccatggacctttcgttgcgtttggaagtaaattaataaaataggcatgtcttaagttcgtacctccacggctcccgaagatgacgggaaccagccctagaagcgccggagatgaccgaagacgcccggcctcgaggctggggccacttccggcggaactgcgggtccaagttgtccttcccgcctccgggctgggccgacctcagctccgccctctggtcggctgacggaaattgccgacaaacttgtcgaatgcaaggattctagtccctccgggctttccgttctccaggcccggctgacagagttagccgaggccgccatattgaataagcgacccggcctcctagggggtcgtcgtggtccagacagtttagcagaacagcctccgcggctccggggagaaggtgaggtcttgtatggatgggaagggtgaggtgcgtcggccagaggcttatttattgacgggactgtttcctttggcccacgcgacgtagtcttctgttgtccttgactgggcgccgcctcccgccccgccgcctcggaagcccctgagagccggcagatggggggcttttagccacggtctctggtctgatgaagcagaaaagaagatgaggatcagggggtcctcgggaacgctgtcacgaatgtaggcttgcaggtgaccttccctctgcagggaaaattcaggacatttccctctcagaggaggaggccgttttattccccgggagaggaccagtgtccgatgacttaggccttaagactaagcctttccccccagatttttacacgcctgatacagtgcatgattgtttggtcgctgttgtgttagcaatggctcacgcttctgtttgttgtccttgtttgtttggtccattgaccacgttggacagcatttttttattcctttaactaacgggaaattgagaaaaacgacttttgaaaagttagcccaggattgcattgcaaataacaaaacgttgtttacaggttattgggatccagtgcttgaactgtaaggtcttggatcagacacaactctgttcacacacgaattgacggtatagaagtgtaacgttaactgtttttgatgaataaacaagttatttttgttttgcggaatattcttgttttcaccgacttaaggctgccagagcacctgcactttttaaatccgggaaagtggtctctacaaattaacgaccagaaattagagattcagttcacttaaccgttattgaacatttactacgagccagaaatgagtccgtaaagaagaataaaatggatgatatgctgggggaatcgtaaatgttagatagcctggtcaatgaaactgagaaaaggc

SEQ ID NO: 8702 - DNA, 6000 bp, Homo sapiens
gtaagacaccccctccccatctccctaaagagccaagagcctgctatgagctctgctccaccacttctggttcctctgcagatggtggccagtaagtacctctatgatgaaggggaggaggaggaggtcttcaacgacgaatggggagctgctgggggtgtggccgtgcccactctcaatgccttggagaggggcttcctgagtgccatggtgagcagctgttctctctcttgctcagtttccctggcccatctttaaccgtcctttagtcctttgttctctctcagtcttctgttggttcgtcatttctcttcctgtcctcctcctgcctttgtgttagtgtcttcctttcctatctcttcagtactaaccagtttttggagattcgtagagcagtaaggccaagagcagaacatttcctcgcctcctctattcctccagggccccacagggtacactctgagtcagagtttatcctattgggttctgaatatttgtgtccatactttctctgcccctagatgtttagctccctgtggacacagaccattctcagggtcattttctcccctcttgcttagtggagagtataatgtgaaaccaggcaggtggtgattcaatgagttaatgtgtaaaaacttttgagacagtatctggcacatggtaagtgccaaatatgcattagccataggggcggttgtagttgctgctatggctcttattattaaatgactgtggctcatccaagtctggtttgatgtccactctccgtactcacaggattggcatctctacactgaccctcgggagatctttgaggtgctgagctggttggagagctggtaggttctaggagttgggaagaagggctcgagggatttgggggctgagtcctcagccataggagctagagatgagagtctgtgtaactgggggagggaggagacaagaaagagaattgcccagatagtggttcccagacccatctgtcctcttcttcatcacctttgggaaggtgagaagcagcttatttaaaatacatgtattgggtgggtatggtagttatgtctataatcctagcactctgggagggtgaggctggaggattacttgggtccaggagttcgagaccagcctgggcaatatagcaagatgcctgaccctaccagaaaaaaatactagccagatgcagtggtgtacacccataatcccagctactcaggaggctgagacaagaggatcatttgagtccaggatgttgagtctgcagtgagctatgattgcactactgcactccagcctgggagacagcaagatcctgtcttaacaaaataaataaataaaaataaataaaatataggtcttggtctcacccttagtttctagatcagcagatagcctaggaatctgggtttaacaggcttcccagtgtttcctggtgggtcctgagtggtatgagggtgccactgggctggctgcaggacagttgcatactcttgtcatttctccacttcccccagtgtggctgagcagcagggacggtggcgaggctggtacacctacacagacctgtgtgtgctgctggagcagccgacctggcagttggccctgggctccctctgccagcggctggtaaaggtgaggaggggctcggaaggatagggagcttgagcaggccggtgtgtagggtgggatggtgtgaagtgattgctgaaaagcccaggagatggggttgggaatagatgggcagagtggggtgtaaatggctatagagacctccaactggaacacagatttctagagacaaggggtgaatgtgttaaagacagattccttctttcttatctcctctcctgcagctgtcttgcctgttagctgtggcatatgtgagcagtgtggccctggctgtggcatcggtggccgtaatacatcagtctttggggctgtcctgcatccctacacctgggccgcctgaccttggactgacctcccgttgcctcctggagccctgcataccttctgtgccacaatgcctgccgtctctcgctaatgtctccagctgcctggaaggcagcatggggctgcggtcactctggggcagtcttctggcctcactgactcctccaccattgcctcccccagacccccctgcccctcccactcttcttcataactgccacctttgccagaagctccagagagactccccaacctgccatgcctgcctccaccccaaccgtacagtccccactgcgctgtccagcccctggtaccatacctatggcctggctcccccctggccttggagcccggtgctcctttcacttcctcagcctcagcaatgttcccttttcagtgtcatggagctggctcgcctcaagtctttcgttttcccaggctaggtagggctgtgaggaatgcattaagagggtttgggagtttctgagaacctggaggagcaaagcttgattcagatcctgtctgcctcgctgggtccttggcaggtcccctgtcctcctgggtgggagcttatggggtggtggggcagaaggactgaaggtaattcactcctagatcgcagtggctggctgcttggccaggacagtgatgccgccagggagagcttccgcttggtgaccagggacatgtcccagatggacatagaagcccctctctgcctccctgggattttttagacttttacttttgatttccctaggatggaagagtataggtgggagataagggaagtggggtgagaggagaaaggaaatgttggcatgggcctgtgtgatgtccctgaggcagaagagccggggactgatgggttcaggtgggagctgctgggtgaggcagggaacccttttcactcccattccttagctttagtctaatggagccaaggactgctgggaccttcaaccctgatcttttgtcttccagtcttctcttagtgtcctgctcctaggtttccctctcttctggttcttctcccaggtattctcttcccaggcctctctggccactgctttgtatcagggtttttcacgcttttgtagaactgaggtttcaataaacagtttcagttgcatggcctggacttttccttctgcggcagcccttgaagatttttcctccctgtatctgccttccaagcctccctgcttcctgatcctgtcatctcacaaactgttttctcagcctcatctcaggactttcctatcgtttgataggcataggcttccatttccaactttgttcctgctcccaggaccctgggccctagcactgctcaacttgggatgccatgggacacacatggtgactgtcctgtccctgagttggccttgtctgtcacttgttctgggtaagcactctccttgtggatcccaaagcacatctcgtggagaggggccaggccttgtaaccagcagagccttgtgagctcctgagggcaagccacgaggacgcttctctctcctgacctcctcactggtctgacacatggtgatggtcacatggtgcttaacaattccaagaacttgaagaactccaaggctgggtcatcactggaggaaggaaaacagtctgggcagcttggctgagggtatttgggactgctgaggatacttcacggaagaagtggttctgccccctagggggcattttggaaatttatgggctattttttcattgtcaaaaggattcaaggggatggggtgctactggcatttcgtcaacctgggcgggatgctagacatcatgaaatgctcagacctcccgtactgtgaagaattcccaagacaacttttgaatgaccagctttatgtatatgaaaaccctgtttatctgagcctagaactgtctttgcacatgtaaacgtgaaatagcgtttgtgcgttttgaaaagactcagtttgctaggaattcattcccatgtaaattaagacgactttattttgcttggcaccttaaccaagagtttgtttgccattttgaaaatcgggttaccaacatcagagtcaccgataaagcaccaatatcagctggcattgcagctattgcaaccacagcaattctcatagggtgtgggattggactacttcattgtactttattgtcttctggtttagttgtgcttaagccttcacgtaatgaaatacatgttattataaattttattctttacagtgagcatgtttcaggtagttgtggttgtcacatgtgatgtaggatatattgtccacaagtttctttttttcttttttctttttttttttgacacagtctcactctgtcacccaggctggagtgcagtggcacggtctcagctcactacaacctccgccttctgggttcgagcaattcttgtgcctcagcctcccgagtaggtgggattacagggatgtgccaccacatccagctaagttttgtatttttagtagagatggtttcaccatgttgccaggctggtcttgaactcctcacctcaagtgatacacccagttcggcctcccaaagtggtgtgattacaggcatgagccaccatactgagcccacaagtttcattttgaagtagtccaggggccttggttctgaaaggggtgaggactgtggatcaaatagtgatagttttaaatgggagggaataaagtctgcaaaatttccccatattattttgaagagctcctctcctccccacccctcctatcctactttctacagcctggtctaggggcaggaaatctggaagaagattctcgggggagggccccagaactcagctccccagttaatggctgatggaatttgcacaacagctgggcaaaggtgaaagggtggtgccctgccccaaattccttatacctttgctccgcttcattgacacccccaccctctccccaccttctccccaccccaggcttcacccaaactctgacctcttactctctctacttaactctggtcccgggcagccaagacaaagcgaaaggcaaggcagcatgagccgatcacccctcaatcccagccaactccgatcagtgggctcccaggatgccctggcccccttgcctccacctgctccccagaatccctccacccactcttgggaccctttgtgtggatctctgccttggggcctcagctgtcttctggctctgcaggtaggaggcagaggtgcaggagttggtgctgcctgatggtgtgtgtggggaagtaggtgtagatgtggcatgtgaaagcctctggaagtattgtaggtatttccacttctctgaagactgccctccccattcctccacctgcagcatgtcttggtcatggcttctctgctctgtgtctcccacctgctcctgctttgcagtctctccccaggaggactctcttactccccttctcagctcctggcctccagcttcttttcatgtggtatgtctaccatcctgcaaacttggatgggcagcaggtgagaggaacctccctggagagaggggcagagtcctggagggtaggagaggtttgggggagccttgctggctgccacatagtcccagacctgctggggctgctgttcctacaggctgcctcttgtccaggctccatccttagagttccttatccctgctctggtgctgaccagccagaagctaccccgggccatccagacacctggaaactgtgagcacagagcaagggcaaggggtaagggtggggctgggttctcatctgagcatgcaggtgtaggtgggtgcagaattgagattgggcagtggtgagactgtgacactatagggggcttggacctgtgccaggagtgggactgtagagcaatgggtctccattccattcacccttctcttctccatgccccaaacttttcctagcctccctcatgctgcacctttgtaggggacctagctgccatggcctggggcactggaacacttctctccaggaggtgggtatctggaggtgagaagggataagggtggtgccagg

SEQ ID NO: 8703 - DNA, 6000 bp, Homo sapiens; identical to SEQ ID NO: 3347

SEQ ID NO: 8704 - DNA, 6000 bp, Homo sapiens
agaacctggccatcatcctcatcgtctggagcagcacctccctccacaggcccatgtactactttctgagctccatgtctttcctggagatctggtacgtgtctgacatcacccccaagatgctggagggcttcctcctccagcagaaacgcatctctttcgtcgggtgcatgacgcagctctacttcttcagctccctggtgtgcaccgagtgtgtgcttctggcctccatggcctacgaccgctacgtggccatctgccacccgctgcgctaccacgtccttgtgaccccggggctgtgcctccagctggtgggcttctcctttgtgagtggcttcaccatctccatgatcaaggtctgttttatctccagcgtcacgttctgtggctccaacgtcttgaaccacttcttctgtgacatttcccccatcctcaagctggcctgcacggacttctccactgcagagctggtggatttcatcctggccttcatcatcctggtgtttccgctcctggccaccatactgtcatattggcacatcaccctggctgtcctgcgcatcccctcggccaccggctgctggagagccttctctacctgcgcctctcacctcaccgtggtcaccgtcttctatacagccttgcttttcatgtatgtccggccccaagccattgattcccagagctccaacaagctcatctctgccgtgtacactgttgtcacgccaataattaaccctttgatttactgcctgaggaacaaggaatttaaggacgccttgaaaaaggccttgggcttgggtcaaacttcacactaagacaactaaatgtcctagagtaaaatctgtagtgatgaaacaacattgtatgtggcactttgtgctctttaaattaatttttaagttaaatttaacaaacctacagaactaagtgaaatttaacaaacctacacaactgtgcacaagtaacaagccttcgtctgcatatgttttcacaaaaggactgtgctcatggaaccagctcccagatcaagaactagaagctgccttcacgccctctcccagtcattaacccttctccacaaaaagcactgtcctgacttccaaaaccagatgctagcattggtgtttctgaggggcttacacataaagtatgtgccctgttatgttcagcttctttcattcaccgtgttgcttgagtgaatccttgatgtttttgcatgtaacaataattcatgcattctcattgctatccaatattcataataaataatacatttatactgtataatacacaatgcataatacattcatactgggataatacatatactgggataatgcatatactgtattgtgtattatatatacataatacattatgctgggtgaaaccctgtcccacctgtcccagcaggtgtgagccactgtgctcatccataatttatgcatctaaacacagataaggtaagtcaaaatataatgtcataatcttatgggaccaccatcttatgtgccgttcagttcatcattcaccaaatgtcattgtgtggtgcactactgcgtcagttgagaatatttgtgctggcttatttctggatcctctgttctgttaaattgatctacgtatctatcaatatcacaccctccatccatacaacacagtcttgatttatatgattatgtagtaaatcttaacactggaagagtgactcctcccactttattcttctgcttcaaaattattgtggctattgtacagcctttatatttttatataaattttatagtaagcctgtcaatgtctacaagagaacctcgctgagattttgctagaaattccattaaacctaaaaatcaatttgggaagaactgacttcattactctgttgagtctttcaatccatgaacatagtaaacccctccaattattgaggtcttcattctttaaatcagtgttttgtactttttaatatgcagattctgtgtgtgttttgctggatttagacctaaatattatattttctttgaagcaactgtaaatggtattccatcttttatttcagtttccttctgtttgttgttagtacataggatgcagctgattttcatatgttgacattgcagcctgcaaacttgctgcgctcactcattagttccaggaggtttttgtagattcctttgggttttctatgtgaacagtcatgtcaactaaaaatagacagttttatttcttcctttctgatctgtatgaatttcattttttattttttgccatactgcatggcctattactagaacttccagtgctctgttgaataagagtgggcagagcagatatccttgccttgtttcctccttagaaggcaagcattcagtctttcatgattaagtacaatgatgcagagttttcacgcatgtgctttatcaagctgaagcagctcccctttagtccttatttgctgagagcagtttttgtttttatcataaatgagtatttaattttgtcaagtgatgcagaaaactgcatcaggcaatctggtcatagatttcgtctttcacctgctggtaaggtgtattacattggttgattttcaaataccagattagccttgcatcttctgaataaaccaccttgggttgtggtgtatgattcatttcatatagtgttggattcaatttgctaacatttcgttaaggatttttgtgtctaagttcacgagagatattggtctattggggtctgaagttattttcatgctgtctaatatagtgtggacgtcaaagcgacctcctagagaacattcctagctctcagaacgttctagctggggagggaaaacggaaaaaggggggcgagaagcggagggacggggaagtatatagtaatacttcccttgaaccagtaaaactgtaatgcccaacctggtttttactaactgttttcagactctcccttttcctttaatcacctagccctgtttccacctgaattgactctcccttagctaagagagccagacagactccatcttggctctttcactggcagcccctttctcaaggacttaacttgtgcaggctgactcccaccacatccaagaatgcaattaactggtaagatactgtggcaagctacatccgcagttcccaggaatttgtccgattgataacgcccaaagccccgggtctatcatcttgtaatagtcttaaagcccctgcaccttgaactgtttactttcctgtaaccatttacccttttaactttttgactactttacttctgtaaaattgttttaactagaccccccccccttcctaaaccaaggtataaaagttaatcaagccccttcctcggggctgagagaattttgagcgttagccgtctctcggtcgccagctaataaaggactcttaattcgtctcaaaggtggtgtttttctaactcgctcaggtacaacaaaacatccacgcaaacaggttgtgagaagttacgtctgcgtgctgtgatacctagaggaaccactacgaaaactatacataatgatatttcccaagacattatcagtaaatcaagatggaattctaaaaaaatgtactgtatccattggaaggcacaaaaaaaaaaaaaaaaaaaaaatgcaaaggaaacaaggcaaaaaacagcagacatgaaccctaaagcttgttaaatggatttcaggtgccctccaggatctaaaaaccagaccctcctgcgttggggaccgggaatccgtatttttgacaaaaagcaattcttcaattatagaaacatccatagaaccggccgtagtttacacagctgcattcccactgttttacaatcgcatgatcatttctgaaaagttgaaaacaaagttaaagaatatttaaggggttaagaacaaaaagcctggggaacacaaaagattataaaaacccttcccaacagcaggcatacttggaaggaaacctcacatgcaaggctccttcgtggagcccagagcccaggtcctgacgggagcacattttaagagatggacttgccggcgcggtggctcacgcctgtaatcctagcactttgggaggccgaggcgggtggatcacgaggtcaggagatcgagaccatcctggctaacatggtgaaaccccgtctctactaaaaatacaaaaaattagccgggtgtggcggcgggcgcctgtagtcccagctactcgggaggctgaggcaggagaatggcgtgaaccagggaggcggagcttgcagtgagcgcgatggcgccaccgcactccagcctgggcgacagagcgggactctgcctcaaaaaaaaaaaaaaaaaaaaaaaaaaaaaaaaaaaaaaaaagagatggacttggagcgtgtgcttttgttttctatgctattcaatgtgttcacagcaggtcccctggatgagaccacttagccttcagctccggaggcgacccaggccggccttgccaggtccctctccctgacaggcgccccgcgacaggggtcccaccccgtccctccgctcctcgccccctctttttccactttccctccccagcgagaacgttctgagagctaggaatgttctctaggaggtcgctttgacgtccacaccgcgcctgggggattctgcggggagcacaggaccctgggacgagacgcagaagtcgctccacgccctgggcggcctcagctcccgcgacaccgcagcaactcagaacccaggcaggggccgggcagccagcatgctgcccccacgttcacctccaactcccacctctcggccctcgccccaacccgcaggaccctggcagcgcactggctgtctccgcggaagcccccgagggcctcggcgcggccccgccccctggaaggttcccgacaggcgccgcgggcaccccggccgtgacgtcacggcagcgcgccggccgcgagagagggccccgtcgcgaccgcgtccccttgggtccttgatcctgagctgaccgggtagccatggccttgcggctcctgaagctggcagcgacgtccgcgtccgcccgggtcgtggcggcgggcgcccagcgcgtggtgagcgggcggcggggtggcagggtggcggggtggcagggtggcggggtggcggggtggggagcagttccacatctcccccggcctctggcggcggctcccaggtcgctctccgggtgggtttgggggacccctcctgcctccggaattgtttggtctttggtcgtggacagacctcagggggccacgagcttctccaggccattttatctcagctttaagcaaaacgctggagcgcggaggtgatcagggccccgaggctgccctgatgcgggaggcccgtgtgcaggtggcaggccgggggcacacgcgcttgtcattagataattcacgtagcagccctgtcaagagccgtttaaaggtcgggccctgctgggtgcttgggtgatgccatgttgagcagacacggagttcagtgcttgtgtccgcttccttttgcctttactctgactgactactctcatttcttagcattttgcccccaccttcttcagtgaaatcgtttcatacatttgtaacacagttggattgctttgtcacattctgccttacatcttgggatccttctacctaatgcgttttttaaaatgtgcatacattgagcgcattctttgtgctataaggttctatggattttttctttgtgctataaggttctataggttttgacacgtgtgtaatagcatgtctccaccattataggttcgtacagagtagcttcactgccttaaaaaattcccctctgctttacctattaaacccttctttttctccaacccctgacaaccacagatctcattaacatttccatagttgccttttctggaatgtcatataattagaatcatacaatatattgccttttcagacgccttgaatacttggaaatatctatgtaagattcacttatgtcttcgt

SEQ ID NO: 8705 - DNA, 6000 bp, Homo sapiens; identical to SEQ ID NO: 3331

SEQ ID NO: 8706 - DNA, 6000 bp, Homo sapiens
taggggaggggaaggaccctgatttttcctttcttcccagcgacaaaatgaaatgcaacctctctccttataaaatcaggagataggatagaaatagctagtataaaaacaatagtaataataataaagcatgtgcctcgtgctttattcaaatttaatcctcataacaacccgaagagacagacactattatctccagtttacaggtaagacaggtgctgttagcctagtgttgggtctgcaaagtttggggttgcaggtcagagaggacagggacatgaagcagtctcctttctagctgaaagtcttccacctcccatcctgagatgtctggcctgggaagcagaggcaaacacaattgggtgggtggtggtggttttggtcacatgtagtatacatgccttctgctgggggaggggaaagaggaacattacctgacatcacccatgagaggatgtgaatatcccccacagctttggtctgtctgtagatttggactttaaagtaggaaggaacagtcacggtgtagatactgaacttggagtcagaaaactcaggtcagatctcactagataaccttaagcaggtcaatccgcctttctgggctgcactttcttcaattataaaatgaaggcgttggattcaagttaaatctctgaggtcccttccagctcaaaaactgtacaatttgagaacctggtggttgaatgtgacaaattgtgatctctctctctcccactgcatatgttccagagcgtggtattttgggtataaatatgccaatgtctgctgtctgtatgtgtgtgtattccagctatatgactaaaactttagttgtttgtgggtaaacaagggatgcttcttcgttttctccatgagagaccaaatggctctgagtggtagtaaacaaaaagatcactgactcaaggtatgatgggagggcaaatgatccaagaaatggttttagtctgtaatcattctttggcagttatttttggttttttactttcattctttttaaaaccaaatccaattaagtcttgacatcaaccctgtgaaatggcacaggtttttatagaagaggaaaaatagactcagagatgaaatgatttgtctaagatcacacagcctgtgagggccagagccagagctaagatctagggcttctgacccctggcttgtgtgttcttcctaggactgagctgcgtgtgagaagagcccaggcatagaacactcagtcaaagaggctctggtttctaggtaaaggcaaagaggagagccactggccaaaggaggccaggccgactgggccgtgctactcccacctctgcagcttcctggctgaagtgacattctattcagagcagagcctcgcaagacttacagataacggctatttcaagagccatgaactgtgattagttagaatgtcagagggccatgataagaagtgaaaacattctgcagcctctgtcaagatgcgaaaggtgtttactaactcttctcagaaccgaatttgccttctttctcagggctcacttctatgaagcagggatgcaatcgcctcttgggttgttgtgaggatccaaagagataattaggtaggagtgtctcggaaaagcctcacacttttgcttgttcattcaaccaaccaacatttactgaacacaggaagtgtgttaggaactggagggaatactaaggcaaataagaaacggggagttcaggatcacgttattatctcccctctcacctttctgtatcatggtttcttcttgtctaggaccatatgagggaagatgggccctgtagtcttgtccaattccctagctaagtgcttctgtcccagggaattctgagcccaacctccaggttacattggatcagcagacggccctcagctatagctcattcaagaaatcattcattcactcacgtgagccaggcatgactctaggtgctggggatacaatggtcaacaaacaaacaaggtccttgccctcgtggagctgtcacctggggaaggcagctatttttttttttttttttgagacggagtctcactctattgcctaggctggagtgtaatggcacgatctcggctcactgcaacctccgccacacccagctaatttttttatttttagtagagacagggttttactatgttggccagactggtcttgaactcctgacctcgtgatcgacccgcctcggcctcccaaagtgctgagattacaggcatgagccactgcgcctggccaacagcagcttttaaatcaatatgcaaataaacatatgttcaccagctgggcgtggtggctcacgcctgtaatccctgcacttttggaggctgaggcgggcagatcacttgagctcaggagttcaagaccagcctgggcaacatgatgaaaccctgcctctaccaaaaatatgaaaattagctgggcatgctggtgcatgcctttagtcccagctacttgggaggctgaggtgggaggatggcttgagcccaggaagttgtggctgctgagctgtgattgtgtcactgcactccagactaagaccttgtctcaaaaaaaaaaaaaaatatatatatatatatggatagatatagatacatatacacagtgtgtgtgtgtgtgtgtgtgtgtgtgtgtatttgcaggctgttatgaggtgaggagagaggagtagaacccagtttagaaggcctctctgaggaggcctgaagctgagatccctgaaggatgagaggtcaagccctccaggcagagggaacaacatggtcaaagactcttgaaatgggagggaacacgatgttttcaaataactaacaggaaagaggaaagcggtggagcagagcccagagcaagtaggacagtggttccagaaaagattggagagggaggggcaggaccacgctgggtcttacagactgaggcaaggaattcgttataagtgaacctctaatgccttctgctctctctacccagtgctggggaagaaatgagctggtttgttctgctagttctgtcctcccatgatagtcatgaaagcttgggggttaaagaaatctggcatgagacaaaccaccataaaaaaattatcagcttcagcttctttttaagtgagtgacctctaaactcatctgacccagagactatggaccaggtgggtaatgcaaaggtcttcatcccctctccctgcactgaccacaggcctacagaaataaattcattaattcagcagtcatcacgtctgctacagatggactccttagttcgtttgcttagatggttcttgaggtggaatactgatttacaagtgcacctctaatgccttctgctctctctacccagtgctggggaagaaatgagctggtttgttctgctagttctgtcctcccatgagtcatgaaagcttgggggttaaagaaatttggcatgagacaaaccaccaaaaaacattatcagcttcagcttcttttttggtgagtgaccttcgaaggagctggcgcaatgggggttggcgcaatggcttcaaggaggctggcacaatggctcacgccttcaagggggctggcgcaatggctcacgcctgtaatcccagcacttttggaggctgaggcgggtagatcactgaggtcaggagttcgaaaccagcctggccaacatggtgaaaccccgtctctactaaaaatacaaaaaaaattagccaggcgtggtggcaggcacctgtaatcccagctacttggaaggctgaagcaggagaatcacttgaacccggaaggcagaggttccagtgagcagacattgtgccactgcactccagcctgtgtgacagagtgagactccacctcaaaacacaacaaaacaaacaaaaaaaacctacaaggtgaggaaaatgtgcacaaataactgtaataaaaggaagagagtgataaaagctacaaaaaggttaacagataagcattttccaagtaacaaagctttttctactacatgttacaggagccattgagtgctcttgcaaagaaaaccagcactacaaagtagtaaattataagtgatgcaaacactacctcctgtagaaactcacaggaagggaagccaggtagaggcatgctcccatgccagcaggtggggatacaaatcctccttctgctacctttccagaagaaagttagcaatagagatcaagagcgtaaaaaaaaaagaaaagaaaaaagaaaaaaaaaatcatttcgacccaataattccacttctaagaatgtatccttaggaaaaaaaattagacatttgttcaaggatttctgttgaattttccttataaggttattatattatcaaatagaaacaactgaaacagccaagttgggttacattatgggacatgctcatgatggcatcatatttaagtgacgtttttgaagcacggtagtgacttttggaaaaggctcaatacatcattttaatgagacgtgcaaactcatcattacgatatactaggagaaatgctttgacagacgaagtgggaacaactgggagagtgaatgatggagtgtcaggaacaggggcatatgagttgggtcttccaggttgtggaggtgtttccgggtggaagagaaggagggaccaagcggagagccctaagtcctgaagacaactgggaaggtaacacacctcttaagaagggcatgcagcagccatacctctcatccgccacggtcagcaaacccattgtgtttcctggagtgagttgggccatcaagatgggtggtgccctcctgctggggaagaggggctcggtgggaatccctgccccaaggcctggcagcaacgctcctacgctgccttgggccgcaggcctgctaagccctccgctctcgcttccctgcgcgcgaaataagtcccagggccaatgtggcctccccacccagtgcttccgggggcgccaaaaaacgacctgcccagaccctcagcgtcgacgctgcgcacaagcgcagtcaactgctggacccggccggtgtgaagtttcacacccaaaaggatgaagggcacccacctggcttaagagaacgactcccaggtaaagggccagacccaggtgaggagtcggcacagggccagaggtgccctgcacactcagagctctccctttgagctccttgccttgctcggttctcctgggccgcaggcgtctaccctgctctctggggttccgctgccttttccttgccaggtctttcccacagcaacgccttttctcttccttctccagcctctgagtcctcttcctcctctccccactgtcccacctctgagggacagaagtggggtggtttgagagcaggagactggagggaagaagcaagtccaggcctagctgcaagcactccccacccccgcccccgcccccgcccccgcccccgccaggctctaggacacttgacttctgttaggcctcacacggtttggtctgaagtgtttctctcttaatagctgtggatcggcgaggctcaatggctcacgcctgtaatctcaggactttgggaggccgaggtgggtggatcacctgaggtcaggagttcaagaacagcctgaccaacatggtgaaactctgtctctactaaaaacacagaaaattagccgggcgtggtggcgtgcacctgtaatctcagctactcgggaggctgaggcaggaaaatcgcttgcacccaggaggtggaggttgcagtgagccgagatcgcgccattacacttcagcctgggcaacaagagcaaaaaactccgtcaaaaaaaaaaaaaagaagaagaagttgtggagctgtctgattcctgatcctgtccgttcaggctggggccgccctggtctttcaaacccagcagtgagcttggacagacccagaggtgtttactccaggtaataggagctctagacaaaatcaggctcttttcctggcttagacctctccctgcttacaacacctctaggatg

SEQ ID NO: 8707 - DNA, 6000 bp, Homo sapiens
gagaagataaaatgggtcactaagaattatgtgattagtcaaatgaaatcaaggaaagaaaaacagagcaaagaagtgtaagataaaacagtgggatggaagagctgaaattaataatgtcactaaattgcttaccttcctccttcctgaactgttgtggattttttttttttcagggggttgaggtttttttttagagacagagtctctattgccccaggctggacagcagtggcgtaatcagtctcaaaatccctgcagtctcaaactcctgggctcaagtgatcctcctgcctcggcctcccaaaatgctgggattacaggcaggcagagccaccacaccctgccagaactattgttttaaagtcattaggtggttaagccctcgagactatgtgcaagtttgatgattcgttaggagcactcacaggactcagcatatagtcttattcccaacaatgatttattagagcaaaaggatatgaagcaaattcagcaaagggaaaaaaggaattaagtgaagtccagaggaaaccaagcaccagcttctaagggttctctcctaatgaagtcacacaggatgtcactccagcaacaagtgacagcatgtgaaagtgttaagcctcactgttagacatagtaagcttgttagggaatagagggaatctcccctcaaattcaagttcccagatgcctggcaagggccaaccttgccagcaggactttctggggatagcagtcccaggcacgtgtttgcacagtggttcagatcaatgtgcttacattgggtagaggggacctatggaagtccaaatttgggtgtcagagacctaatagggtgaagacagtgtctacaatgatggacagctaggtatgaggtgtcagggacagattgaggcagttattcacatggtggataggggcaacctggaatgaggaataagctcaagcacagaaaggggtgtccatatggggtaagggtgtcagcagagatggtagattggttgcacaccaaagacttgatggaataaagtgaatatactaaccacagagaaggtaattataaatacagaaaggggggaaactagaatgaaacctggagttcagcttgaattgggtttaagaaagtgaattcatggtttaaaatctataaaaatagatgaaatatcggctgggcacagtggctcacgcatataatcccagcactttgggaggccgaggcgggcagatcgcttgagatcaggagtttgagaccagcctggccaacactgcgaaaccccatctctagtaaaaatacaaaaattagccaggtgtggtggtacacacctgtagtcccagctacttgggaggctgaggcacgagaatcacttgaacctgggaggcagaggttgcagtgggctgagatcgcaccactgcactccagcctgggcaacagagcgagatcctgcctcaaataaaaatagaggacatataagcatataaatatacacgtgtgtatgtgtccaaatatgtatattccctagtctgtccaccaaggtggccttggagcagttatgctccaataataatgagcacataaagtacccatatcttgccttccaaattcttcactgtcttagtctgcttgggctgcattacaaaataccatagactgggcagcttaaataacagaaatttatcctcacagttctagaagcttggaagtccaagattaaagtaccagccagtttggtttctagtgagggctttcttcctggcttgcagatggccaccttctcaccgtgtccttgtatggcagacagcacaagctctctggtgtccctttttaaaagggcattaatcccatcatgacagtcccatcctcattatctcatctaaccctaggtacttcccaaaggctgaatcaccaaagaccatcacattgctggtgaaggcttcaacatatgaatttgagggacacgaatattcagtccataacatcaactaaaggaaccaagactctttgataaaatggctaaattcagggctggggcagagaaaatacatgagtgtggaacttcttgtgccagagagaaaaagtgcccaaagattgatgaggatgaatcattgaaatgacacacagattaaaagggttcccactggacaaatttgagcatcaaaataagtaatagtagtaattaattataacccatcagaagaaataaaccatgagctcatgtgaatatatgaatacaaacataaacaaattacaagcataatgaggaatgtgatatttatatggtttaaaggtacctctccaggccgggtgcagtggctcatgcctgtaatcccagcactttgggaggccaaggcaggtagatcacctgaggtcaggcatttgagaccagcctgcacaacatggtgaaaccctgactctactaaaaatacaaaaattagccgggcgtggtggcacgtgtctataatctgccactgattaggtgtgtgattttcccaagcaggggataatagtagtacctatgtcaaaggctgttatgaggattaaatgagctaacacataatcgtgctttttttttttttttttttttttgagacagagtcttgcactgtcgcctgggctggagtgcaatggcacgatctcggcccactgcaacctctgcctcccaggttcaagtgattctcctgcctcagcctcctgagtagctgggattacaggctcctgccaccacacctggctattttcaatagagacggggtttcactatgttggccaggctagtctcaaaaacctgacctcgtgatccacccgctttggcctcccaaagtgctgggattacaggcatgagccactgcacccggctttttttttttttttttgagatggaatctctctcacccaggcttcatctcagctcagtgcaacctccgcctcctgggttcaagcaattctcctgcctcagcctcccgagtagctgagattacaggtgcctgccaccacacccggctaagttttatatttttagtagagacggggttttgccatgttggccaggctgatctcaaactcttgacctcaagtgatctgcctgcctcagcctcccaaagtgctgggattacaggcatgaggcactgtgcctggcctcaaattcttagaatactgcctaccacatattgaatgttcattaaatcctaggtataggacaggggtgttggctcatgcctgtaatgctagcatcttgggaggctgaggcaggaggatcacttgagcccaggagttccagaccagcctgcgcaacatagcaagacctctcctctactaaaaaagattactgtggctgcagtgtggagaacagattgtcgatagatgataatacctacgattttatttattttttacttcttatttatttttttgagatgaagtgttgcactgttgcccaggctggagagcaggggcacgatctcgcctcactgcaacctctgcctcccgggttcaagcaattctcctgcctcagccttcttagcagctgggattacaggcacccgccactacgcccagctaattttttttatctttagtacagacagggtttcaccatgttggccaggctggtctcaaactcctgacctcgtgattcgcccgcctaggcctcccaaagtgctgggattacagacgtgagcaccacacctactcagttgttctgtataccattacatgttcagcaaccctaatccaaccatctgaaattaaaatgctccaaaatcaaaactttttgatcatcaacacgatgccacagtggaaaattccacacctgaccgcatgtaaaaagctgtagtcaaaattttgtttgatacacacacaatttttaaaattgcataaaattaccctgaggctatgtgcataaggtgtatacgaaacataaatgaatttcaagtttagcctctggccccatccccaagataaagagccacaatctgaaacagttctggtcttaagcatttgggatgaaggatactcaacctatacccagttttctacacgacactacttatgaatatcttttaaaaatttctttatccctacttgttttctgtcttccctaccagaatataattttcacgagaccagtatctgacaaacacacgtgctacatattcaatctttatcgaatgaatttaatattttccaagttttctataattaacattacttctatattattaattttatagagaatccaaatagcattttattaagtagaccattagtcggtccgagttcaaattctgctactacagcaaactatatgtaggactcaaggcaagtttcttttttttgagacggagtctcgcgctgtcgcccaggctggagtgtagtggcgcgatctcggctcactgcaacctccgcctcctaggttcaagcgattctcctgcctcagcctccagagtagctgggattacaggcgcgtgccactacgcccggctaatttttgcatttttagtagagccggggtttcaccatgttggccaggctggtctcgaactcctgacctcaagtgatccgcctgcctcgccgccgaaagtgctgggattacaggagtgaaccaccacgcctggcggaggcaagtttcttaatcttctttcctcacttgtaaaactggaatactgtccattttcataaggttaaatcatacaacacaggtaaaagcgcttcagcacgcaacgaaatttttctaacgtaacgaaaaactcctcgttgctccttgccttgcccttaacctcaacgcttcaggtcccgaccaatctctcggagagctcagagggagccgctctagccgccttccgccacggagtgcagggacagccgggaaggggacggaagccggaggccagagcacgcacttcctcccacgctttcctcacagccaatcgcccactggtgccccaccccttccgttctgggaaaactcgagcacccagaacggcttccggcgggagctgtgcagctccttatcatggtgagttggctgttggggtgagggtttcggctgtagctgattcggtttatcttatttggtcccgaagcgaccttgaaatccctcagccacccagaggaggggtcattggagttgaagtcgggccccttggcaggagcggctgtctcccaaaatgttccccttcagagttctggtccctttcggtccctcacctgttccgcaggcgctcacgatctaggccccgctgcaggcagagctttcagctcctggcgagtttctgacttccctctgccgagatttctttaaggtaataaaagtttttgccagcgtcaacaactaggccaccaacaaaagatctgaaaacaagtccacagcaacaactgtaatagtgattcttagagcagtggcgataacgccagcggaaaaaaaaaaaaaaggttagtaatagggttttagggcagacgtctcactctgcaacttggctttactaaatattaagtagcctgattacggcagcaaatttcataagcgcagtaactacagaaagtcaaggtgttggtaggacattttattgctgctttatttctgggtttgtagaaactaatggaagacccagtagacgttatggttgttgggatatggtgttttctctcaaatttgttagaattagtcattctttgcctttagagctcaaatatatagctctgaactttaaagataagcagttggttgggatttgaagtgtccaagtggcgtgtgccttttgaaaatgcatttattagaaaaatttatggagtacttattgatagcctacgtatgagaaagagaccacatttctgtgcctaagcttttgtcactgtactaagttttttacttaagtggatatggtcgggaaaatgcctcattcacacactttatgttttgtaaattttctgtaatccttttgcacacagaaaatgggtaaaagtttacactttttggctaatgatcaaatagccttcagtta

SEQ ID NO: 8708 - DNA, 6000 bp, Homo sapiens; identical to SEQ ID NO: 865

SEQ ID NO: 8709 - DNA, 6000 bp, Homo sapiens
aaatgtgcagtttatagttttatatagcattaaccctggaagttgctctcagatcttaaaagtcttcaaactcttctgttacttttacatatgaagatagcaacgtatttggttgatgatggctaagaaaacatctggcacagccatattaacaagggaatagtttgttttacgacagaagaggaagcttctgttctcggctaagagccatgtcctcagataccatggcaataaatggaaagcttgtcagtaagtggttgcctctttgtcttaaatttttaagcagtttagtagttagctccaaattaggaaattaactggcaatcaaagcattggagcaggaaaacccattatagctcttccaaatctccaaaaaaaaaaaaaaaaaaaaaaaggttagcattacgataactctttgtaggaagaggaatacagcagggcgcggtgggtcatgcctataattccagcactctgggaggctgaggtgagcagatcacttgagactaggagttccagaccagcctaggcaacgtggcaaaaccctgcctctactaaaaatgcaacaacaacaacaaaactagccgggtgtggtggcgtgtgcctgtggtcccagctactcaggacgcggaggtgggagaatcacctgtgaccagggaggttgaggctgcagtgagccaagagtgcgccaccacactccagccggggtgacagagtgagaacctgtctcaaaacaaacaaacaaacaaaaaaaattagaagaattgaaagaattgactggtagatggaaacatgctggaatctgttggcttgcttgcaggtataggggcctcaaaaggtatctccccatttagaacctttgtgtttgttttaccagtggctttaattatttctcagctcaaccccactgcttccctaaacactggatagtagtggaatagcttagtggtgacatcttataggcccaagaatagaaatagcaccggatcagttaactaagaacaaaatgtcattcacatacatcttgctgagatggtgaagaatattctccctttcttcggctttcctatatttctttaggagacctcttgtactgtggtaaattgtcaacatatctcatgtagttattctcatgcatgccatcttcctgaacagcaacagatactgtgaggcaggaactgtgccttatactttctcccccacagtgcctaggagaatgtcttgtacacagtaggttttcagtaaatgaaaactggatacattttaggaatcaagccaagggagtggccagctgtagcaacgatcaatgtggctcaactacactcaagagtatcccatcttcaggacaaaggacagtcaatcttgagccattctgaactgattatcatactcctaagtatcattgatttcatttggcattttcagtgaagatgtgggctttttatttatctctggaatattccatccagagtatttgggtttacttatagcaaaaaaaaaaaaaaaattcatttaaaaactgtttatcaaacatgagagcaaaatgtattatgtactcaagatggtgatttttaaattttttcgatttcattttaactattgttgaagccatccactgggagattttatggttttcaaaaaaaccatacttatatatgtataaaatatatataatatataaatatataaaatacatacataaaatatatatacataaaaaatataaatatttgttgagatggagtctcgctctgttgcccaagctggagtgcagtgttgctatcttggctcactgcaacctccgcctcctgagttcaggtgattctcctgcctcagcctcctgagtagctggtattacaggcgcccaccaccacgccctgctaattttcatatttttagtagagatggggtttcaccatgttgaccaggctggtcttgaactcctgacctcaggtgatctgcctgtctcagtctcccaaagtgctgggattacaggcatgagccacagtgcccagccaaaaagctgtagtttgaatgagtgttataatgtaaacagagatttgctgttgccaagtttttagagaggaatgttcctacgaagcatttagttctcagtgtgtccctccccttggatgtatattaaatgatcctgacagcttcagctgacatgagttttgaggaattccaagctaatctattaggtcatatctacagatactttggggatctcttgttaaacagttgggaagttctaaatatttccatgaaaaaactgccaggaaagagaaatctgctaataaaaaggagaatgacatagtttgagggtctacttattgtaaagcaagagaaagaacagtaactggagtaaaatgagctcacagctgtgatgaacggctgtggtggcttagctattgaggccaggctaagctgtttaccaccagattttgatacaaagggacactaccagaaaggatcctttggaaatacatggtggagttgcaagaaataaatcttcattcatgaaactggcaacctttggggcaatgctgaatcacacagagggggaaggcctgtcctttgcaaaagacaaaatggttttcaaccaactgtattagtctttagaaagttatgggcatccttgctttgcagaagtgtcagagtttccaaaagagatttctttcaccaggtggctacccactaataaaggccatactgcttctttcaaagatgacaaagtttaaaaggtgcatacagaactctgtaaatgcaatgatgattactgtttgtcaaatgtgtcgttgcttcctgcatgagtcctgtctccagttagctgtggcagtttctgagatgagctggcctctgtggaagacccactggtgaaaggtgggctggatacaggaccaaaaaggttcaatttgggggttcaatttggggaccccaaaatgcctgcggtcaaagcatgaggacaacaaagagttgccccttctctttttcttccgttcctcctcctcctgcttcctgtgtccttcttgctccacttctctcagctccttaccagaagcctgacttaggggtccagtacctgtctgtttccatggaacaatctctgacaagttaaccagccagtcagttgacttcctattccctaggctctcctcttccctaggcaagttgcccttcctcaactcttaaccattactggaaggtagctggaggaaatgagaagctgaggagaaaccagtgcctttttctgtgtttaggatatattaagcataagcacaattagtagttttatctgagaataaaagtatcctaaatagatcctggctgtgtgatttcaggcgctcgaggagtgccctcctggaacgtcagtttccttcctcaaagccccgagggcaggttcttaacactggctggaggtcaaatagggtactgactatatttccatttcaccagcgaactccaaggtcaaaaacaaggctacacctgacagaacatttaaaaaagaattacactgctgtgcaaatacaaagaagtgtccactgattttcaccaaccctgggtgcactgcctatgagttagcccagctcctcaaggaaatttacgattaaaaaataattcattgcctttccaccttccagcatagtacttcaagttgagatgctcaccggggcctcctaacccctctctttggatgcaacccctttcttcctaggtggtccatcctacaggactgttaaaccaatatttcttatttgccattttgaatcctcaaggattcactgagtgcctactctacaccttcgcttgaaaactttcagagatttcctgtattctgcttcatgcccagctccaccttcccatctaaacattgcccacttaccctaagccttccagtcttgccaacctccaaagcaccatgccatggggcctaaaatgccctcttctctcccctctgagcctgttcaaactcagctcagtctctcgtcctgggttttggtgtctctccagggtaaaggggtggggagggtgccttcattctgactggctcccagtgaggcagccccccttgaggaagaggctgagatgccaagtgacttgcctggagtcatttgccagcaggcgatggaatagggactacgagacaccctgcagcctctcctgggaggacaacgccccttctccctctccatgcactcttgaggcagcaaagaggaggcatctggacgcgtttacctcctccccacccccacagcttggccctcactaaactatcttgtgtccttcctcctgctatgattgattcgcccaggaaggtggggcttcatctttacctttcaaatataattctttagttctcctaattacaaggtggggggtggggggtgggggtggggtgaggcggggggtacaaaacaaaacaaaactccatgaagcaacttagaaagcacgaccgcaaaggccctccatcatccccacccagaggtgaggacaaggtctgggggtgctgggtggcttcagaccttccacgggtccaagctatctgcttcaagagggcatcgaaaggtaactcatagacttaccgcccccgccccccgacttttgcaggagggagcgctctcccctcctctgggaggctggagactcggggacagaagatgcgctggagggaagagaacggagcgtcggacaccagaaaaactttgggggattcggggtgagaaagaaggcgtgaagagagaagggaggctcagcaggggaggaggggcgggggcgggggcgggagcgggaggagtcactgcgccgcggccgcccctccccgccctccactcggcggccccgggtcttcctccccctcctcctccccctcctcctccccctcctcttcctccgcctcctggtgtggctggctgcggccagaatcggagccccaaccgcgctgccggtgagtgaccagccccaggggacagagacgggaggcctgggaccccccctctccagggtggggcctcccgccgtgtctgggaaagtttgcgggcgccccgggacgcgggcatctccagggccgctcggcgcctccccatctccccgcgcccgccctggccgcccccaggggcgccctggggcccgcagagggatggcctcccggcagggactcctcggctcccctctgttctgagactgctgctgggaccggggtccgactctaaagagaaaactcaaacagcaaaaaaaggaatatcgactcagttccgagggcgggggccggggctcgttctcacccgcgcgcggcccctcgacctctcggacccgggccaccagctctgcgcccctcacgcctccctcggggtctctgtgtctctctcccgctcccggactccctcctccttctgactgctgttatttgggctgttgtccctccccgctccctggtacctcagctcggaccttagcctgtgcctgcagcccggagtcccctcctgccctggaaggcaaggagccaggccacggggccacagccgcgggggccaccacactggcccaaatatttcctgcaggtatgaccattcactgggtattggggttgggtcccttggacccacaaactgaacctcgtgggtacagggaaaaattaaaatatattcctccttaggattgtactgcttctgttggtttggcatctttttatttttaacccttctaactgtgctttcttcgaataataatgatacttcatgtaattagcgtttctaatatctaaagacagaagaaggaagaaaataaacggaagagagagaatgcttgctaaaaatactcatttttgacttcagtccacactcgactgttttcctgggagatagaagttcagtgtagcttgttttcagactaaccgcaaacacgattacagcctcctccaggctagaagttttaatttgcctgacatgcagcacactgtttgttggtattcccagcctggcattcccgtctgcatagctctagtct

SEQ ID NO: 8710 - DNA, 6000 bp, Homo sapiens
aaaacaaaaacaaaaacaaatacgaaactcggctgggtgcggtggccattgtctgtaatcccatccatttgggaggctgaggcgggcagatcacatgaggccaggagtttgagaccagcctggccagcatggtaaaaccccatctctactaaaaatacaaaaattagccgggcatggtggcgggaacctgtaatcccagctacttgggaggctgaggcgggagactcacttggacctgggaggtggagattgcagtgagccaagattgtgccactgcactccagccttggcaacagagtgagactccatctaaaacaaagtaaataaaaatttaaaaaatttaaaagaaattagccgggcgtggtggtgcacacctgtaaccccacctactcgggaggctgaggtgggaaaatcgtttgaacctgggaggcagagtgtgcggaagatggcgccactgcactccagccagggcgagagagtgagacaccgtctcaaaaaaaaaaaaaaacaccgaacaaaatacaaaacaaaacaaaaccaaacctcaggatggctgggaaagctcctgactggctttgcctttggagtgaatcaatcaatcaattaagggcgtgcctgttagtgagtctcctctgacctttagccaagaatgttccgaactcagcaagatgaagcaggaggtagagggaactaagggggcaacaagcaggagacaggaagggcccatgagggtgacatcttccctgagaggtccaggacaaccagcaggaagtcaggcgggtgcaggcaggaggacccaggaaagctcggcctgagggaggccctaggtgtggtggggagtggggtagggcaggcagaggctgggcagcaggtgaggtcccctggattctgggggccaagcctggggcttgaggtaaacaggcctgagtggagaaggggctgctgtggttgggctggggtgggtggagctggaggagccttttcttcttggaccaaattttgaattgtgctacataacatggtacatcagagttacctccttcaccattttcaagtgttcagtacacacacattgttgtgcagctgatttccagaacgttctcatcctgcaaccctgaagttctgtccctattaaactccaactctaaccctaacccgaaccctaccctaaccctaatccattgccccctcccccagtcccaggtaacctccattccacttctgtctctatgaatttgactcctctagggacctcagagaagtgtgttcatatgcatttgccctttttgttattgtttttaagaatcttattttacaggagacggtatttgtccttttgtgactttcatatttcactaggtgtaatgtcctaaccgtccattcacgttgtaacagagtcttctccagggcctccttcaaggctgcatgatatttcgttgggtggatgaccccatttggtttcttctaccttttgggtatatatatatatgcacatatataacccaggctggcctggaactcatgagctcaaacaattctctgacttggactcccaaagactgggattacaggtgtgaaccaccatgcccagccatccttttggttattctggttttcaaattttttcccaattttattaagactgtgataaaccagccaggcatggtggctcatggctgtaatcccagcactttgggaggccaaggcgggcagatgccttgaggtcaggagttcaagaccagcctggtcaacatgatgaaaccctgtctctattaaaaatacaaaaaattagctgggtgtggtggcttgcacctgtagtcccagctacttgggaggctgaggcaggagcatcacttgaacctgggaggcagaggttgcagtgagccgagatcacaccactgcactccagcttgggtgacagagtgaaacactgaaaaaatgtctttcgaaaatgaaaaaaaaaaaatactgttataaacccttggattgaaaaagtttataatgataacttctacagtgtaaaaaataaaaaagtaaaaagagttaaaaaataaaaataaataaataaaattatcaatgaaccctaatcagaataaatataaagttgaaaaacacactaaacaaatcactatatcattcaggaaaacatgcatatgtggtaaaaagcaatcaacagcaaagtcaagattaaccaaaatacaggatagtcattacctctggggagaaaggtgggagactcaaaggctttaaatctttttctcaaaaagatttatccctacagagtaaataagggtttatttttgttattcatctttaaatggaacagatggaaaacatttttttgcatgaccacaacaaatggaaaatatattaatgaagttcagtcactcttctgttttactcataataacagaagccagaaacctgggagttacctttgaccactccctcaccaaccaagtccaattaattttcacttctaatcacacctataataccagcacttcgagtggcggaggcgggcagatcacttgagaccaggagtttgagaccagcctggccttgatggtgaaaccccatctctactaaaaatacaaaaattagccgggcatagtggctcatgcctgtaatcccagctactcaagaggctcaggcagaactgcttgaatcccggaagcggaagttgctgtgagccgggatcacaccattgcactccagccagggtaacagaccaagactcagtctcaaaaaaaaaaaaaaaaaagatcactttctattcttccccacccacaacaccaaaccctggccccagccactttgattctcaccaggaacccaaatccctccctcttccttaacacccccgctctaatccaatctccacacagcagccaaagccaacactttaaacatgattaactctgtctgtcttcaacttgaatctccctcactaccctccttttctatcagaagcaacagagagacaagtaaattgcccaaggccacacagcaggacatggcagagacaggattcagaatctactagttttgacagtccacatgtctcacccacccactatcccattttgggtgatcccagaaaagggtcagccactgccctaacacagggtaatctcagacaaggacagaggatttctcctccaatcaccacttcccttcctttatcagcctaactcccagttatccctaattctcagctcaaaccacacttcctctattttttttttttttttttttgagacagagtcttgctctgtcggccaagctggagtgcagtggcgcgatcttggctcactgcaagctccacctccgggttcacaccattctcctgcctcagcctcccgagtagctgggaccacaggtgcctgccaccacgcccggctaattttttgtatttttagtagagacagggtttcaccgtgttagccaggatggtctcgatctcctgaccttgtgatccacccgcctcggcctcccaaagtgctgggattacaggcgtgaaccactgtgcccggccttcaaaccacattttctaggaaaggccttcctaggccccttgtcctattccagcaactccccacaatttgatggccagcactttgtacatctctaaaaacattcctcttccactagattgtgccctccacaagggcagaggtctgttttgcccacgattgtggcacatgtcacacacccttgagcactctggttcctctccaaatccatttctcctgaatgtgggcccagattggtggctcaagtctggaaccctagcagtgttgaaggatcgcctgagcccaggagtgcaagaccagcacgggtaacagaaagagatcctgactctacacaaatttttgaaaattagcttcacataatggaagatacacgggaggctgatgtgggaggatcgcttgagcctaggaggtgtggcgtgaatgcaccactgcactccaacttgggtgacagagccagcccctgtctcaaaaaaataaataaataataataataaaacagaaagaaaaaaatgatggcaaggtatctgaactgcagaaatactttttaactcagcctgaggctatcaaaacatctgatccccatgtgaaaggctacagttctgggcatgctcagggcccaccgaaaacagagtccgcccaggcaccctctgcctgtgcaagggaacaggtgtcacaatcaagtgcacaagctgctctggaagacccagcccaggcctgtctggccgagggcactggactctcccccactgcgtcgtccaaacattagtgcgagtgcacccacacaaacacatacacaatcaaacacaacatgtaagcaatgggcaggactggcccggccccactcagtgttgtcaccattggccccacagatgcccacagccctggagctctgggcctagattcctgccagccccacctgtccaggccaaggccagatgttggagcaagggggtgccagagcggcaaagccccccatgtgcccctttcccaccgggcccaggctcctggcatcagaaagctgaacccagtatctggcccgggctgtgtgcttccagcctcccctcctctcgacaccagaacagagcctggcccccagctcccaggaaatacagaaaaaaaaaatggtggatgaacgagtgacagggtgtctagttccacacaagacacagtgagcaggggttgggggaggggcccctggcggcaggatgcacactgcactatacccaaaatcccacccttccctgggggacacctggtcccaccctaagctgcctttctcaggaccccagccccagcccagcccagccacaccctgccactcccttcagccagtgtggcttcaggtcaagaggctgggcggggtcaaggtggtaacaaggggaggggccaggacacagttttccctgatttaaacccaggcagcctggagtgcagctcatactccatacctgggatttccgcctcgccgctctccgactgcttccagacatgcaggggccctgggtgctgctcctgctgggcctgaggctacagctctccctgggcatcatcccaggtaatgaggctcccccagctgcccctacacacacacacacacacagggcaccccccagcccaggctgacctgatctttgctctccccctggccagttgaggaggagaacccggacttctggaaccgccaggcagccgaggccctgggtgccgccaagaagctgcagcctgcacagacagccgccaagaacctcatcatcttcctgggtgacggtgagtgagccaggccttccagccccgcagccctcacagccccggcgcccggaccctcagtggttccaggacagccctggggagcaagcctcacacacttctgctccttcagggatgggggtgtctacggtgacagctgccaggatcctaaaagggcagaagaaggacaaactggggcctgagaccttcctggccatggaccgcttcccgtacgtggctctgtccaaggtaagtgctgggctaccttagagtcctccaagcagagaaggggaatcctggctatggagtgtggtaggagggagggaccctaaacagctggggctccaataaggagctggaggcagttggaatcccagaggacagagatcagggtcttgtttgtctgccccagagaagagctcagagtgtctctgtccccagacatacagtgtagacaagcatgtgccagacagtggagccacagccacggcctacctgtgcggggtcaagggcaacttccagaccattggcttgagtgcagccgcccgctttaaccagtgcaacacgacacgcggcaacgaggtcatctccgtgatgaatcgggccaagaaagcaggtgagctggggcccgctgtggggtcagggccaggtgacagacctctatcgcatatcctgacctctatcaccctcaggaaagtcagtgggagtggtaaccacc

SEQ ID NO: 8711 - DNA, 6000 bp, Homo sapiens
tccctgcaagagacaagacttctaaaaactgatatttggtgagtggttggggagggactatgattgaaagagaaagatcaccctgaagaaggccagaagtctatagttttgctcttgagaatagaaagccagataggggccaaaccatgaagagctttgaatggcatcataaagaactttatcctaaaagaaatcaggaacttgaaagatgtcaagggaatataatatggtcagatttattccatgaatcttactcagtggtgtgtcaagaactgactgcctggagatagaaattagagatctcagtctgggactttcaaatatgtaatataagtctgatatggtagctattaaattgcctgctaaagggaatgtcaaattgagtagtaaacttctaagggaagtttcattctttcaatagttattgagaacctgctatgtttgacaccctgtgctagactagagatacaatggtgagaaaaaatgcagttccctggactaatagaggtttttcatctggatgagaagacagttattaatcagaaatcatacaaataaatataaagctacaagtatgacaggtgctacaatggaggggtgcatggtgctataagcgtgtaataggatataatggattctgattgtattcctagcatcgattttaccgatacctcatagagtaacattcatgggatttaggtgggattaacgtaacttccagttccaaggataggccttgatttgccctggccaatcagtgcttgacattctctagaccacaaaactctaggtttaggggcggacatgtgacctaaattaatttaatcacattgaaactgtgaaatatgtgaaagaaactctcttttgatatggacaaagaactacataaccttgggagatcctggccaccattttatgatacaaaaggagtaagccttaggatgaatctgacatcagaaagaaaattgagaggtagaaggaaatcaagttcctgctgatactgttaagtcactcaaatcaacctgaggttcaccttatcttcagacttctcatttatgtgagccaataaattctcttatcatttaaactagtttaaattggattttttggtaattgtaacattccaagggggatttgttcgaatgtggcttttgtcaaagaaaaaaaaaaaacccaggggatttgaaataggcagtccaagaaggctcctccaaggaagtgataatagtggcaacatttaaaagataaaatgggagttattaggagatgattggtgaggaagaaagctccagacaaagagaatacctgtgcaaagacagcaagcaggggcatgagtatgaaaaaagagtgtgcgggtactaagatgcagctggagaggtaggcagaagcaggatgaaaagggctttttaagtcattgaaaggattctggccactgaaatatttttcataacatataggggtggataggatacatcgtataacgcacatgacagcccctcacaacaaattatccagccccagatgtcagtggtgcttaggttgaaaaactttgctctaggaaattaacctacaaagatattggcacacataaaacaacttttgcacaatcatatgtttgaaattacgaaccattggaaatgacacaaatatacaataaatgagttaaataaattagggtacatttgtacagttgatgcaggatttttcttggccactttgacagctggagacctccggccagcaacaccccaactactcggcccaccaggatgtgtctggcttgtgctcaggcacgaatcctgcagccaccatggcctcagcccctggcaggagggggtgtgtgagtgaacgagtacagggcaggagtgggctctgtgcggggcttgtggctggaccaggtgtgtcacattgagggaaatgtggtggcacccaaacaggggtgctcatgaccctgaagccccagaggtgttacagtatgctaagcactcttttagttctgccgtctgcaggccaacggacagtggcatgttaacagctctatcagtcccattgccccactcaggcccgtggcttcaggactggctctgccccactgctgcttcccatcgcgttgtgtgggacggttgccctccaccagcagagggcaaagggccacagtgtgtacagccttctttgtatctgcgtttggtgggtcccgaatttttcttcagcgtccaagaatgaggttacgctgacaatcaaagggtgaggagggtggagaagagttttatttgaactatgaaacagctctcaggagagagaggatgcaagggtggtccctcactcaaagtcaggtggtctctctctcagtgcggctgagtccacagcttttatgggctcagaatgaaggcgtgcatgctgattggtttgtgagtatgcaaaaaaggctaaaacaacagcaccactcaaaggtaggtacaacagtgtaaaaaaacaattaggaaaggatatgtgtaaaataggtgaagggtggggatcaatcagaagaaagcacgccaaatgggaagagaggttctcaatctggtctgtggatttatcctggtcttgtggctagcctttaaactgtcctcagcttgaagggtttcaccagggacctgcccctgtctgcctaggatttgtctgccttttgcggctatcacagtgggatactatgtagccattaagtagaatgagttagctctatatacacactgacccaaaaaaggctgtcctgggcacggtggctcacccctgtaatcccagtattttgggaggctgaggcaggtggatcacatgaggtcaagagtttgagaccagcctcaccaacatggtgaaaccccatctctactaaaaatacaaaaattagctgggcgtggtggcggacacctataatcccagctactcaggaggatgaggcaggagaatcgttagaatccgggagacggaggttgcagtgagccgagatgacacctctgcactccagcctggactgtgtatggaaaaaaagaaagaaaaaaaaagtgggggacaggggttcagatatggtggctcacacttgtaatcccagcactttgggaggtcaaagcaggcagatcccttaagctcaggagtgtgagaccagcctgggcaccaacatgtagagaccctgtctccacaaaaaataaaaaggaaggaaaagaatagtattccattacagtcatgtgtcccttaacaatggggatgctttctgaaaaatgcatcatcaggtgattttttgttgtgtgaacatcatagagtgtacctaaacaaacctagatggtagcctactacagaggtccccaacctttttgacaccagggactggttttgtggaagacaatttttccatggaaagggggagttggattctcataaggagtgcacaggttagatcccttgcatgtgcagtttacaatagggttctcactcctaccagaatgtaatgcccctgctcatctgacagggggcagagctcaggccgaaatgctggctcccctgccactcaccttctgctgtgccgcccagttcctaacaggccctggaccactactggaccactacatacatatctacatataattacctgtatatgcatagaatatctctggaataggactagatacatactttgtgggcccagtgcaaaataaaaccgcagggcccttgtccagaaactttcctgaatttcaagttagtgacagcaaaacattaaaccaagtgcctatctgtacaggtcaccaccatgaagccagccctgctctggcaacatacacaggaaaatggaatagaggtgattccaagaggaaaattctatgagtggcaggagacaaagactaaaagaagacttagttttcactatatatctttgcctttttttttttttttttttttgagacagtctgtcacactgtcccccaggctggagtgcagtggtgcaatcttggctcactgcaacctctgcctcccaggttgaagcgattctcctacctcggcctcccaagtagctgggattacaggcccccaccaccacgcccagctgatttttgtatttttagcagagacagggtttcaccacgttggcctggctggtctggatctcctgacctcgggcaatctgcccacctcgccctcccaaagtgctgggattacaggcgtgagccaccatgcccggcctctctttttaatttcatatgtgtaaaggcattacttattcaaaacaacaaaaaaggaagattgtgggcttatttggttagcaactctttgaagtggaactttgatgactgcctgaagcaaagaacatctgctggggaagatgtggttatggggggccctcagacttggataagcactgagccctgtgctttggaggggtctgaaatccatggaatcatgggactgtagccacctgcagcccactttcccttttccagaccatgctgtgggcactctagtattccctatcccaaacgccaagcctgactccagggtctgcacaatcctcttcccaagttcagtcttcctggggagtaaccaaagggtgaggcttggacagaaggctggagagtctaacatcaggctcaaaaattgtgtgaagcattctctgactcttccaagacagaaatgttattttctctgaggtcaaaatacattttgtccactttcatcacatcaattaattggctctattgttatgtattatattatgatgattttcttcaagtacattttctgaggtctctagattaaaaaaaaaaactatgaatccagattttgaaattatttctatcagcatgtgttctgtacactgacccacgttgtagtgtactgctgaagggtgtccacacttaagcgatctggtcaaaacataagcacgttttaacaagaccattgattagttatgactacaactcccaagatgcactgcagggtcagtgtgcgcgtctcgcctagttttcaccgatcaggctaatgagctgcacagaagtggcagctgaacaagctgagagactgtattaaagaacgaatatagcggggatggggagcaggcgtctacggtcccagctactcgggaggctgaggtgagaggatcgcttgagccctcaaggcggaggctacagtgagtcgagatagcgccattgcactctagcctgggaagcagagagagactatcaaaaacaacaaaacgaataaagggattctaccaagagtgagctggactgaaataaacgacacgctactacgacccagcgcgtgactatatccaccgcacaatgtgcgataatagcctcaatgcagagagaattcctcctttccttattcagtgcaagagagccctatagagaacgcaggaaatgcccgcgagaaactgagaagtatcaaaacaatcacagatatgttaggaaagtagctccccgccacttccctaaacttatcatagcagacttactttccaaggttacaaacacaagaagagcactgtattttcatgaagcggaaaatgtgctttacaatcgccagctactaagagccttaacggtgaagcgctctgcaagaaacaggaaatcgtcaacacactttctgcatgaattgcctggagagttgtgtccatagacaattcctggttagatgcttaattgtagcagactccataacggggtttagcgggtttccattcggcagaaagggctccacgttctttttcacagaaaggtttaaacttatttttcctcctcaggcggacgaagtgagcgtcgttccgtgaaggtatgaaacccttttccttcctttctgtccctggttactccggttcaaggctacgtacttccccggtttgctttgttttttcctcagagctaagttcctaggaacgtcacatactggtgccatccaacaacatgacgacgtgcggaaccgaagtccccttccacctagcggcctctcgcggcgcaggcgtggacggggaga

SEQ ID NO: 8712 - DNA, 6000 bp, Homo sapiens
caaaaagaaaaaaaagaatgtgaagtatctcattaatgattattttattttggttactgtggaaacaaatattttagatatcttggtttgtgtcaactatgttataattaatgacacctgctttttaattactctttaaatgtgactactagaaaattttaaactgtgtatgtggctcagtttccatttctatgggacagtaccgctagtctgtgctgtgagttcagctgccagttgtggctttgaaaccagtacattcccagaggctcctctccttagtggtctggctgagggggggttacccagccctaaccctagactgcctagggtagtgtgtgggacagcctgcttccaggcaaaaagttaataatttaataagcagcagcaagaatttctaaaaatcctttccaaagcaccccccctggcttttttttcttcttcttcttcgtagccttcttcctggaccagccttcttcctggaaatctttttttaaatgcagaactcttcccttctgtcccacatgggacctgtggaggtgatggtgtccagaggggctattgttttattttattttcttgtttaaattgttcttttgcccacaggtcaggctgctccagtagctgccttttaacccttcctctgcaggaccatctcagaaaccacccagcaaagactgggaagccactcttttagaccagttccccctcccttctccctttggagtggttactcaagcgcagacatatattgggaaaacacaaggtggatgtgaaaccaaggaaactcctgctttgagaagtacagaagtgcagacccacaaccaacctcctaatgtcaagctggcattttaggaaaaaggtgtgtgtggtggggggaattccactggtgtctgaaagcccccaagtaattccctgttgcaaggaggagtctcatgttgacttcagaggtccaggcagaacctgttgaattgcacagttcccatttgctagaggatattacacggtgagatctctctgctcagggaccggggctgagggcttctgtcatcagccagtggagcggccctgcaccgaggcacctccctgcttttgccacattttgcccaccctgctgtctgtcatgtactgaacctttgctggaataattgccataggtgtcaacatgtattaagggcttgctgtatgaaggtactatgcaaagtgccttttgctatgtgcagctaactagcataacaaaccccaagatgccccagaggagatactcttgtttccctgttttgcagatagagaaactgcaggttagagagatgaaataagttgaccaagctagaaattggtgggcagggaacacaacttgggccatgctgctttagagctgccgagtgtttaactgttaaggtgtcattctgcactgcctagaccagcccatgtatgttaccgttccattctgcatgagcatttgtctattatcaagacatctgctggtgcaggctgggacacaacaccaagggagggttaaattctgggttgccaaaccagctgagctacgagttgaggagcactgagcgcctctgagctttgctgggctaacttggtgaggtttggaaatgagcaaaggggtaagaaagagccatgtgtctggagtcaggctgcctatttggtttgacctctcaatggcttcataggttgggctactccttctctgggcagcagtttccccagttctaaaatggggatcctaagagcgccttcctcagagaactgcaatgagaattaaagaggacacataaaggcaaagtgtacttggcatgtcaatgtcattaatatcattaatgccatttaatgctctttgatggagcataatctatataacatgtaatagaagatataatcgtggcttgaattttttgttgttttaaggcaaacacttcagagcatgtacctttgcatctgaacacatacgtctgtatttgaatgttatatctttcaaagccatgacctcacctcaggagactcctctctcaacttgatctcacagccatttactggaaacattttcagaagcctttgtggaactcttttcagaagaaaaaaagagagaaagtgggggccatacttggcactagtaagtatttatcttgtaaaggtagatttttaagtttattagagctaagtttggtaaataagtccagaacaagctttgagccactgaaattttaaaaatggtgtttaactaacagtaaggatggaattttttttaatggctgactcattcatgattgactagcctcgaaggcagttccataagaaaggttccagacagcttttgacttctgacagcgtctctggaacgccagtagagtctcctggggcaaaagctttaatgacaggggtttggggatgagtacgcagccttgactaagatctataaggttgagtctagagagaaaaaattagtcttatttacacctacggtattaagtgatactggcacctgagtcgaccttgtctttggggcttgcatagctacaaatgggaccagtaacagagaaggttctctgcatccaaggagtagagtccaaaacgtgacttttgacttaggttgacttgcacaccaggtttctctataccttatgatatacagaattcaaacctgaatatgtgagtgcaggtcaagggaaggaccctcaggttggtatcctcagcaaggactttagagttgggtgtgtaagaagcactcaacctccttgtatagtgccacggacagagcagccagggcagctggaaagcaacacccagctggggtgggtggaggaagaatgcatgtccccatggaacacgataaagcaaagttcaaggctcatgatgactaataggttcatctaggaggatgtgtgaccaagcaacctttgtattatttcctacaggtggaaatgagaggtgccatgttcattctatcctaaagtatctcttagaggactttgctgtggagaaagtgtagtgccttggagtttggctgggtcagattccagccctgctctctattgcagtgtcgactcaagcatagtaactaaggtttcatgagcctcattacgctcatctataaaatggaaacatgattacacttcagggttgtcataggagggaaggtcataggagttacacagatgaggggactcaacagagcaagtgttccacctctcccaggctctgagaatgacaccagaatctatctttttgccacaagaaagtaggcagaggctcatcgttgctcgtcagagtatgccacctgccacaggaaaatggccccagtctctttgtgaggagaggcttgccctcctaagagaattctccttcctctttgcttgaataagaccagctgttagggccccagtactcagcagctatgacaaatttcactgcttaagacccctcagcctcttaaaacaggagtttttctgtagctaacataagctgctctcagcaagatgcacattagcacttaatgctcaggtgggtgagggggaacactcaatggaacacttggtgtatccactgcaatcctgatattggtaaaaagtcacttctcatctggctttaaagtaggtccagcttctcattttaacctgtttgccaagtccctagtttttactatagctctcgtgtcatctttgattgcaccggtaatgtagggatgctcagcctggaccccagacttggaggccctagagagacagataatcaggccaagggggtcccaggaaaggcttgagcagagagcatccagctgcccctgtcctttctcattcgcttacccttgatatcttcctgaactggtatgttaggttctcagagtactaactctcaaacttcactgtacattagaattactggggaactttttaaaatccagaaattcaggctgtaccccaaacaattaaattaggcatgaattaaaacaacaaaagtaacccctccaggtgattccagtgtgcagccacatttgagaaccaatgtgttagttgatggaatgaaaaatcgagtgcagttacttactgggttgacttttgtgcggtcaccaactcttatcatctgaggatcacacaggacacaatgtcacccctatggggccacactgcctgttctggtcactagtgaggtctcagtggcatatagccattttaacagctctttttcctttttaccgtgaaacattgacagagatagagtagtatatgcccccaccccatgtactcatcacccagctgtcattcatgtctcctccgccccacacacacactttttcttgtatggagggggtggactgcagtattttaaagcaaatccctgacatataatttcatctataaatacttcagtatgtatttctgagagataaggactttaaaacaagaaccgcaataccatgatcacacctaagaaaattaacagtagttctttaatctcatctaataccaaatccatgttctattttctccaatttgtctgaaaaatacctttatacatttggtttattccaattaaagcccaaacaagtgttactcacttttagtagtttgactttaaccccagggtaattaaactgtcattgtgtacacaggtaacgatgcatatgcacttctgaaaagaggtgtcaatggaatttggctcagctgatgtttactggatgggctctctcctccttccttccttagcccttctggtgggatcttgacatgttacagaggaaatgctaattgaagccccagccacaaccacttctgtgctctgcttctgcctgaaggcatgttccctttggtaaacttagaatagaaccttcaggatgcatgtggaaagagagtatgagtcagctccgtggacagcttagaatttcctgcccctttgctggaggctgtgtctgagaagtgctgggactgcccccgggctcctctttggtctctgctgaggactgccgctttgacagttacctagggagttgcccaggacttgtgttctgatggaaggaccagccaacacccacacagccttcctttccttggtgtgcagatggctctatgcagtcttatctccagctgggcatctgggttcaggtcagacgatgaccaggaaaggagggggtgagtttctgccctctgaggtaacacctaccacctcatcagtcattgctttgccacagtgttccccctctatgagaccgaacactgttagaatttcttagagtcagacgctgcagctttaatgggtgatgaggctttggggggtcggcaagaggaggataaggatggagaatgggcagcctaaataatcaaactgtatcactcctttcacaaataccaatccagtgctaccacgtatgcatcattcattatcctgacccaacaaatctaaatttggttttatttttctgtagcttttttcttctttagaagggctttgtcttgatttcagatgggtttacagttgcaagattttcttctgtctttgtatcatggttagatggttacagagcagtaaacaagcatcttaatatgtaaaggcaactctaatgtataaggttatttatcacaggattatttttaacagcaaaaagtttggaaaacactaaatgttcattaataagaaactagttaaataaatcatggtacatccctatagtggaatattgtgcagatataaaaggaaatgaattagttgtgtttcaatatggaaagattgtggccaggcatggtggctcacgcctgtaatctcagcactttgggaggccgaggcaggcggatcatgaggtcaggagatcgagaccatcctggctaacacggtgaaaccccgtctctactaaaaatacaaaaaattagccgggcatggtggcgggcgtctgtagtcccagctactcaggaggctgaggcaggagaatggcgtaaacccgggaggcagagcttgcagtgagccgagattgcgccactgcactccagactgggcaac

SEQ ID NO: 8713 - DNA, 6000 bp, Homo sapiens
gcgtagtttcactaattgtacttccatgatggtccacaatattgctataaattttggttttagacagctgcattagtttgctagagctgctccccacctctacctcacctccatccccctccacacactgagtggcttaaataacaagcattgatttctcacagttctggagcctgggaagtccaggatcaaggtgccagcagggttggtttctggtgaggtctcctctctccttggattgcagacagcagccttctctctgtgtcctcacatggccttttctccatgggtgcacttccccggtgtctcttcttataaggacaccagtcaggccaaactagagccctgctttaatgaccttatttaaccgtatacctccttaaaagtgctatctccaaacacactcccactgggagcaggggcttcaacatgaattttggggagacaaaattcaggccataatagcagctctcctctgtcttggctttggaaagtcagcagaagcagcagtgagaacattgctgtggtactgagttaatttgtaggctttttatcatcctgcgtcttcaatggatgacacattctcactttcttgttttctcttctctacccttcccactgctggtatgtctataatgcagtggctttcagttttttttttggccatgacccacagacagaaatatattcacatgtgtgtgcataactctaacaaatattttacaaatcagtagctatccttaggagtttgcatgtattctgttttctatttttttttttgaaaaaaggtattttcagatgtgctactttatgtaatttgaaaaactgctgtagtgtagtttgagaactgtgatatgtgacatatattaaaggactttcccttttaatcttttgcggtcacggacatgcagttggcttgcattgatttgtggaatttgtggaacccatcataagacttctctgcagaggaaattacagtctggaaaatttccctgccatttggcaacttgtgtaggaaatagaagccagtagggtggaaaagtttcatcatattgattgtctttgctgggagaagcatacaattatgtcttatattcaggagcagggtagattggaacaaaagcttactatagctcagtgatagttttttttatgtgtggtttattttctcttttaaggtgtgggtttgtttttgttttagaattatctttctctatgataagctccttcctaataggttagaatgaattttttaaagaataaaagtctagttttttgatgactttgtctcaaatcttaattccatagggatatattgtgttggagcttgatgataatttattcacgttatctaaagttatcattgaggaagacgcatgcggttagctggtatcagttaacggtgttagcccctgtgagcttaatagcaggataaatgaaaacctgtatcaggtcgtccgaaaggatgcatttgggaggatgggagtggagggagacagctcgctgtaagtggaagcacaaagtatcttttttaatgcccagccatagcaagaactgggcctgaggatgatgtaaatgatacttaaaaattcaaattagcagggctgggcgcggtggctcactcctgtaatcccagcactttgggaggccaaggcgggcggatcacgaggtcaggagttcgatgccagcctgacaaacatggtgaaaccccgtctctactaacaatacaaaagttagccaggcgtggtggtgtgcgcctgtggtcccagctatttgggaggctgaggtgggagaatcacttgaacccgggaggcagagttacagtgagccaagatcataccactgaacttcagcctgggtgacagagactccatctccaaaaaaataataaataataatgattcaaatatagctttttatggaaggaccctagagtactttgaagttgtagagagtcatttcatgccctggtttgcccttcatttgatatgattttggacaaatacttgagcctccatttcctcattcagtcttcatcacagatctgtgagatagcatctggaacagactagcaccacaaaggtgagtcttctccctgctttagttcttcttcgttcctgcaactcttagttctctcttcttctggatcaatgagtccatgaaaacaaatagcaaaagatcgaggtcccataaaatgctccctttttagcttattcttcacttgttttttttttttctttattctgagtgacaggttttattgtaatggataataaaggataaagacctagaaagaaaaggtcttaaagtacccaggaaaagcagagccctgggctaccccaggtgcttgtgcaagattatcagcttgggtggaacccgacttagtgatgtgatagagagacaccattgctgacccactggatttagacgagggtgttcttgtggctgacacctacacacctgccacctgggagcactgaacagggcagggagacttaagccagaggcaggtaaaccagatgtacccctaagtcgggccagcatggcgtgtgttacgaccagctgaggaaccaagcagacgctctgggcctcagtgcaggtagggaaaggtcggaagcttcaagagagtcatgctggggagcctagagtagctgggtttgattttgttttaaaataagctttcctgattgtaagagggatggggagcctgaagggccaggggctttgtgacaccgcaggagccctcccagatggcaggaagtggagagcaagaggaccgggacccctcacctcagaggaagcttctgctacacctgagtgggctgctgcttggacttctgtgatccatggagagcatgacacgggaggtgggaccgaggggcagcagggcagggtcattgactaagtgctcttggtgtagggaccggggaagtcatggcctgtgaatagagacctcaggcagagagaagcctgggctggccctcccagctctgatgagaacactggctttagtgatgactgaaggatactgctttggccaatgccttgcccaagaaatacaaaataggcaccactgttttaaactttcattattccttatgaaatattctattagatacttctttttattccttccctaagtgtccgctcagaacaacagtcctactacagatagatgtttttcattctcatggactccaaagcagccacaagtccagagccggtcccctggcaccttcttgtgtggggtgtttatatttacattccagggagaggaaggctgcacataacatgcagagagaaagatgactgagcaaaatgcatgcctggctttttttttttttttttttttttgagacagagtcttgctctgtcacccaggctggattgcaatggcgtgatctcggctcactgcaatctccgcctcccaggttcgacagattctcctgacccagcctcccaagaagctgggattaggggggcccaccaccgtgactggctaatttttgtatgtttagtagagatggagttttatcatgtaggccaggctggtctcaaactcctgacctcaagtgatccattcacctcggcctcccaaagtgctgggattacaggcgtgagccactgcacccggtccatatctggcttttgagtaagtggtgtgtggctctgggcaccatatccctctcacactggctagatgattcagctctgttgttgtctaatttctttgaggttagaatatctcctgcttcccattttggaaacctgcctacagtagaaacacctgatgcccacgtgccttttgttgtccaggaccgtgtgtgcttctagtcgtgtgcttactgagcatctgctgtgtgccaggcccttcatgaggagctggaagtagtccctgtgttaaagtgcccattgtccagtagagatgatgagaatagagaggaaatacagacaactaaaatgactaagctttttgcttaatgctttaataatgtggtgatttaaaaaaattgtcattgaaagaaatgaatttacgcctttgatttaatgcttttgtgtttctattttaacatgtaccgtaagacctctttttatgtatgtttttaacggtcattgctataaatgatatgaagtatgcatttgtaagctgtaaatttcctaggcccttgcttgttgtgttgcagcaatgttgggtgcaagtggcagtccctggccctggcaagaggctcattcctccgtggacttgggctttagtacttcttgaaggcacccttgttttcatgggagaactttgcaaggctgcttaggattggtctgctactcagggcttgttccatgccggagtagctgaatcattagaaatgtttctgtcatttgagtggagatggtcagagttctttgcgttagtagggtgggtgggatggtcatagaacagtcccagcggtaactcacttggccacctggcccatctttgtggcagtgggagtgacgcttgcacatcccagtcctgcagggaggagcaccacggcccctatgggggtgccttccttttcatctggcaaactgtggcccagggtatgagaggcaagatttttttttttttgagacggagtctcgcactctcgcccaggctggaatgcagtgatgccatctcggctcactgcaagctccgcctcctgggttcatgccattctcctgcctcagcctcccgagtagctgggactacaggtgcccgccaccacgcccggctaattttttgcatttttagtagagacagagtttcaccttgttagccaggatggttcgatctcctgaccttgtgatccgcctgccttggtctcccaaagtcctgggattacaggcgtgagccactgcgcctggccaaggccagatgttttaacatcaacatggggatacacaatatttggaaaatgagttaacgttctaggaattacttctattgcattttttaatctctgtatctttttctgtttgaatccaggtgcaacattagaggaaatcaatcagcactgggactggctggaacaaaatctcctccacaccttgtctgtctttgataataaagatgacattgccagttttgtcaaagggaaggtaaaggtaggtcccctgagtttcatgtttctccccatctttccatctttcttccttaagacattccgaacactgtagcatactaacagtttttcctactaactgaacttttggctcaatacgtaatgccaaataagtttcatttatcacctgtcttaactttgtagtcagtctagcaaaatacacctgacatgttaaaaaaaaaaaaaaaaaaagacttggctgggcacggtggctcacgcctgtaatcccagcactttgggaggccgaggcaggcagatcacgaggtcaggaggtcgagaccatcctggctaacacggtaaaaccccatctgtactaaaaaatacaaaaaaaattagctgggcatggtggcgggcacctgtagtccagctactcgggaggctgaggcaagagaatggcgtgaacccgggaggtggtgcttgcagtgagccgagacagagccactgcactcccgcctgggcgacaaagtgagactctgtctcaaaaaaaaaaaataaaaaataaaaaagactttattctcagacttagtttttgttatcctttacaggagtgaaggcctttttttatcccaggaaaaaaaaatagtgttaagatttatgtttccgcagagcaacacattatttgacttcttaaatcaccttttttttttttttgcagttgtgacatcttgtcacactgttctgttggatctaccactttcctcctgctagaagtggatgtttattcttaaaatatgtaaattaaatgtaatgaaagccaattaagttttgagttggcaagagaggaatatttttggaggtatctgtgatacctcctgtgagttacagtcttatataactggcctcactgcaataacatgatggg

SEQ ID NO: 8714 - DNA, 6000 bp, Homo sapiens
ctgtaactcaatcattatattctgatcatgctttttaacagtttacctttaattaatttattttatttctcacaatgcaggttaattacttgtcagtttttactttgatcatgtaatatttcagaccacaaaaaaagatattgaaaatattttctacatacatactgtacaacttaataaacctttataaatacaatgaagcccctgtcttcttttgagcccccctcaagtttgatgtttatcattctcctgcattctaatatttttactacctgtgtatatatccctaaagaatatggtgtattttttggatgttgtgaaacttcaggtgaaacattcacatattgctggtgggaatgtaccatagtatagttcctttgggaaactgcccattcctaaaaaaattaaacttagagttaccatatgacacaggatttctactcctagatatacaccaaaggacaatgaaggcgtaatgtccacacagagacttgtatatgaatgttcatcgcatcagtgcattatttatattagccagaaagttttttttttgttgtttttttttgagacagagtctcactctgtcacccaggctagagtgcagtggcgcaatcttggctcactgcaagctctgcctcccgggttcacgccattctcctgcctcagccttccgagtagctgggactacaggcgcctgccaccacacccgggtaattttttgtatttttagtagtgatggggtttcaccgtgttagccaggatagtcttgatctcctgacctcgtgatctgcccacctcggcctcccaaagtgctggattacaggtgtgagccaccgctcctggcccaaaaacatttttaaaaatccaaatgttgactgggcatgatggctcaaactagtaatctcagcactttgggaggccgaggtgggcagatcatttgagcccagcagtttgagacgaacctgggcaacatggcaaaaccccgtctccacaaaaaatacgaaacttagttgggcgtgatggtgcacacctgtagtcctagctactcgggaagctgaggtgggaggatcacgtgagccccgggagataaaggctgcagtgagttgtgatcacaccactgcacaccagcctgggcaacagagtgagaccctgtctcagtaagccaaccaaccaaccaaccaaccaacccagatgttcatgaactggtgaatgaataaatgtggtatatctatacaatggaatattatttagccataagaagaaatgaagtactggtacatgctacaacgtggatgacccttgcaaacattatgccaaataacagaagccagtcagaaaagaacatatattgtgtggttctatttatatgaaaaatccggaataggtaaatctttggagacagaaagtagacaagtggttgcgtagggctgggaatatgtggggagaatgaacagtgactgccaatgggtatggatttcttttggaagtgattaaatgttctcaaattagatactggtgttagttgtacaactctatgaatatagtcaaaacattgaattgtacattttaaatgtgtaaattgtattgatacatgaattatagcgataaagctgtcttaaaaaactcatgtagctgggtgcggtggcttatgtctgtaatcagtcctagcactttgggaggctgaggtgggcggatcacaaggtcaggagtttgagaccagcctgaccaatatggtgaaaccccatctctactaaaaatacaagaattagccgagtgtggtggcaggcgcctgtagtctcagctactcaggcggctgaggcaggagaattgcttgaacctgggaggtggaggttgcagtgagctgagatcgtgccattgcactccagccagcctgggcaacagagcaagacactgtcgaaaaaaaaaaaaaaaaaagaactcatgtaaatattataaattcttctgctgttagcttttttgactcagcgttataagcccaagcaaatcatattttgagattcataaatttttgttcatttaattttgtattcctcatttcatatttcgttgtatgaatttattaatcaattttcctttttgctattgaaaacagtgcttcaggctgggtgcagtggcctgtaatcccaacatttgggagccaaggaggattccatgagcccaggagttcaagaccagcctgggcaacatagtgagaccccttatctattaaaaaaatttacaaaaccaatgctttattggacagtgtagtgcatatttacttgtatgatatactttctaatttttttaagaggtagagtctcaccctgtcatccaggctggagtgcggtagcatgataatagctcactgcagccttgaggtcataggctcaagcaatcctcccatttcagcctcccaagtagctaagattacaggcatttgccaccatgcctggctaatttttaaaatttatttttcgtagaaacagggtctatctatattgcccaggctggtctcgaactcctggcctcaaacgatcttcctgccttggcctcccatgcctgggattacaggcatgagccaccatgcccggcctggattatacatctttaaaactttcttccaaattagaatttgatgggattattgatacttagtaatttgtttatttagaaggcattttattgctttacctcaagatatttagttcatttaattatacaatttaaaattgaagttagtagaagtacttttgtcttctgaaggtcgtctgtagtatcttcggcaatagaaaaggtaggatttcttaactgttggacctttactggtattttagtgttatatgagatgtgtcctcattgttgtgtatgccaatatattttatagaaaaagccacgaatgagtacaacactacagaagattggagtcttattatggacatatgtgacaaagttggaagtactcctaatgggtaagatgtccagtcatgctcagtgaatgtctaggaacttgataaccagtgtctctttttgtgatgtaactttgagaggaaaatgagactttatcacagttgacccttgaacaacacagatttaaactgcgagggttcacttatacataggttttcttccacctctgctacctctaagacagcaagaccaacccctcttcctccaactcatgatttccttaacaacatttttttttctctagcttaccttattgtaagaatacagtatattatgtatatacaaaatatatgtccatctactgtttatggtattggtgaggcttctggtcaagagtaggctgttagttggctgggcgcagtggctcacgcctataatcccagaactttgagaggccgaggcgagcagatcacttgaggtcaggagttcgaaaccagcctggccaacatggtgaaaccccatctctactagaaatacaaaacttagctggacataatggtgtgcgcctgtaatcccagctacttgagatgctgagacaggaaaatcgcttgaacccaggaggcagagcttgcagtgagccgagatggcaccactgcactccagcctggacggtagagcgagactctgtctcaaaaaaaaaaaaaaaaaaagagtagactattaatagtgaagtttttggggaatcaaaagttatacacagattttcggctgcgtggggtgttggtgtccttaactttcatgtagttaaagggtcagttgttttacttttgggacataaaagttaaaaaagcctgaatgctggatttatgggattaatttacatgaaaaagagttcaactgaaaatctgctatagtaacacacataattaaagccttgacacaataggatacatgataacaatgtataggtgagttatttaaggaattcctctgggacttctatatgtatgggaacttttaaataatgaagtagataacacagtagataatataacaaaaaagtcttcaaataatatacatataaatataatagattaacaatgaaaaaagtgaatataaaaaagtgcttttggggagatgtggcaattagctgaactatatgttagaaatttagaagagtgatgaaagcatttgttttaacattaaagcttttcatagtacattcacatgtttatacttgaacctcttaaaattgtatatcatgttagatttttttcaagataagcttttgctgtttgaaagctaaacctgtcttgaagaaatagaaagatctggtatacgtctcttgtgttgacagatcttttgtgaaatggtttgtctcttaattttggaatacacaacatttgcaacatgctttttttttttaaagttctatgagcctataaacaaaatattgtgtaaaatcattttatagatttattcctttaacaatatgaaatttccaggattttagtttagtttatttttattttatactttctttattttgagacacggtctctgtcatccaggctggagtatagtggcatgacacagctcacagcagcttcctgggctcaagcagtcctcttgcctcagcctcctgagtagctaggagtacagacacatgccaccatgcccagctaatttttaagttttttatagagatgagatcttactttgttttccaggctggtctcaaattcatgggctcaagtgatcctcccgccttggcttcccgaagtgttggaattacaggcatgagccattaaatataaaattatttggtaatagaataataccttaatgtttgaattaaatttatcagtaaatacttaactgtctctctctctctttttttttttagagcgaaagattgcctaaaagccataatgaaaagggtaaatcataaggttccacatgttgctctgcaagcactaactgtgagtacaaggcatgttattatttgacgcaaattttaaatgtgtttttaattacagtaagttaatatttcaatattcatatatttttatttcaattaatagcttcttggggcttgtgtggcaaactgtggaaagatatttcatttagaagtatgttcccgtgattttgcaacagaagtacgtgctgtgattaaaaataaggtaaattttaaaaacagaagaactttaagtcattaaaaaaatgtagattgtgtgtcattataactatatgtggcattactaaagtattataaatgaagtcatttttagatcattgaaatgaaataaactgttctgaaatttgattttttaatgtgtagcaccaaaaactattctccccaaagtatatatactgtaaataatagcaaatcctttttgagggctagtaagtagtcattactttaagcattttacatatactgtcttgttgaatgctcttaactacccttggagcattagattcttggaagttagattcccttatcattcttattttataaatgcaaaaactgagacttagaagtaacttgtccaaggtcatgcagctggtaactggaatagccatgatttacatccaggtttctctggctccattctccgaaacatggaggaaataatctctgaatataaaagatctgttgtcattatagtaagacttaggaattggtgttaaaaacagtcattttgtatgaaacaactatatcacaacatgtaaataggcatctatcaattactcaactaggctagaaatttcaggacttttgttgatgttcatataattaaagagaattttgatggtaattctccttgttaaataatttaagtacttattttaaccgtagatttttgtttattttcctttccttttccttaaaaggcacatcctaaagtatgtgaaaaactgaaatctttaatggtggagtggtcagaagaatttcagaaggaccctcagtttagtctgatatctgcaactattaaatctatgaaagaagaaggaattacttttcctccagcaggttctcaggtgagagatttattcagacccatggttgaccctataatattttgaagg

SEQ ID NO: 8715 - DNA, 6000 bp, Homo sapiens
acagatctgggtcttctgctagcagtggggactggtgtgttgggtgtgggtgcttgtttgctcactcggccttccttctgtcccttgcagacattgctgtcgaactgctccagaaggcagcccccagccctattcgccgactccagaagaaatatgtagctcatgtgtcccggtgagcctggaaatgaggataggatgagagtgtttgggccctagagaaaggggaatcgtcttttctttcttttctttctttcttttttttttttttgagacagtctcactttgtcacccaggctggagtgcagtggcacaatctcggctcaccgcaacctccgcctcctgggttccagtgattcttgtgcctcagcctccccagtagctgggactacaggcacacaccaccgcccctggctaatttttgtatttttagtaaagacggggtttcaccatgttggccaggctggtgtcaaactcctggtgtcagtccacccaccttggtcttccaaagtgctgggattacagacatgagccaccgtgcccagccaggaatagtttttttccaaagataagaggtaaagacaggaacgagcatcataagacttgcaagagctgaaggacccttgggtttaattagtgatcctttctaccacccagggaggcatgcatctccccatgtgctatgatgctggctctggtgtacattgaacggctccggcaccgaaacccagactacttgcagcatgtgtcatcctctgacttgttcctgatctccatggtaagacaccccctccccatctccctaaagagccaagagcctgctatgagctctgctccaccacttctggttcctctgcagatggtggccagtaagtacctctatgatgaaggggaggaggaggaggtcttcaacgacgaatggggagctgctgggggtgtggccgtgcccactctcaatgccttggagaggggcttcctgagtgccatggtgagcagctgttctctctcttgctcagtttccctggcccatctttaaccgtcctttagtcctttgttctctctcagtcttctgttggttcgtcatttctcttcctgtcctcctcctgcctttgtgttagtgtcttcctttcctatctcttcagtactaaccagtttttggagattcgtagagcagtaaggccaagagcagaacatttcctcgcctcctctattcctccagggccccacagggtacactctgagtcagagtttatcctattgggttctgaatatttgtgtccatactttctctgcccctagatgtttagctccctgtggacacagaccattctcagggtcattttctcccctcttgcttagtggagagtataatgtgaaaccaggcaggtggtgattcaatgagttaatgtgtaaaaacttttgagacagtatctggcacatggtaagtgccaaatatgcattagccataggggcggttgtagttgctgctatggctcttattattaaatgactgtggctcatccaagtctggtttgatgtccactctccgtactcacaggattggcatctctacactgaccctcgggagatctttgaggtgctgagctggttggagagctggtaggttctaggagttgggaagaagggctcgagggatttgggggctgagtcctcagccataggagctagagatgagagtctgtgtaactgggggagggaggagacaagaaagagaattgcccagatagtggttcccagacccatctgtcctcttcttcatcacctttgggaaggtgagaagcagcttatttaaaatacatgtattgggtgggtatggtagttatgtctataatcctagcactctgggagggtgaggctggaggattacttgggtccaggagttcgagaccagcctgggcaatatagcaagatgcctgaccctaccagaaaaaaatactagccagatgcagtggtgtacacccataatcccagctactcaggaggctgagacaagaggatcatttgagtccaggatgttgagtctgcagtgagctatgattgcactactgcactccagcctgggagacagcaagatcctgtcttaacaaaataaataaataaaaataaataaaatataggtcttggtctcacccttagtttctagatcagcagatagcctaggaatctgggtttaacaggcttcccagtgtttcctggtgggtcctgagtggtatgagggtgccactgggctggctgcaggacagttgcatactcttgtcatttctccacttcccccagtgtggctgagcagcagggacggtggcgaggctggtacacctacacagacctgtgtgtgctgctggagcagccgacctggcagttggccctgggctccctctgccagcggctggtaaaggtgaggaggggctcggaaggatagggagcttgagcaggccggtgtgtagggtgggatggtgtgaagtgattgctgaaaagcccaggagatggggttgggaatagatgggcagagtggggtgtaaatggctatagagacctccaactggaacacagatttctagagacaaggggtgaatgtgttaaagacagattccttctttcttatctcctctcctgcagctgtcttgcctgttagctgtggcatatgtgagcagtgtggccctggctgtggcatcggtggccgtaatacatcagtctttggggctgtcctgcatccctacacctgggccgcctgaccttggactgacctcccgttgcctcctggagccctgcataccttctgtgccacaatgcctgccgtctctcgctaatgtctccagctgcctggaaggcagcatggggctgcggtcactctggggcagtcttctggcctcactgactcctccaccattgcctcccccagacccccctgcccctcccactcttcttcataactgccacctttgccagaagctccagagagactccccaacctgccatgcctgcctccaccccaaccgtacagtccccactgcgctgtccagcccctggtaccatacctatggcctggctcccccctggccttggagcccggtgctcctttcacttcctcagcctcagcaatgttcccttttcagtgtcatggagctggctcgcctcaagtctttcgttttcccaggctaggtagggctgtgaggaatgcattaagagggtttgggagtttctgagaacctggaggagcaaagcttgattcagatcctgtctgcctcgctgggtccttggcaggtcccctgtcctcctgggtgggagcttatggggtggtggggcagaaggactgaaggtaattcactcctagatcgcagtggctggctgcttggccaggacagtgatgccgccagggagagcttccgcttggtgaccagggacatgtcccagatggacatagaagcccctctctgcctccctgggattttttagacttttacttttgatttccctaggatggaagagtataggtgggagataagggaagtggggtgagaggagaaaggaaatgttggcatgggcctgtgtgatgtccctgaggcagaagagccggggactgatgggttcaggtgggagctgctgggtgaggcagggaacccttttcactcccattccttagctttagtctaatggagccaaggactgctgggaccttcaaccctgatcttttgtcttccagtcttctcttagtgtcctgctcctaggtttccctctcttctggttcttctcccaggtattctcttcccaggcctctctggccactgctttgtatcagggtttttcacgcttttgtagaactgaggtttcaataaacagtttcagttgcatggcctggacttttccttctgcggcagcccttgaagatttttcctccctgtatctgccttccaagcctccctgcttcctgatcctgtcatctcacaaactgttttctcagcctcatctcaggactttcctatcgtttgataggcataggcttccatttccaactttgttcctgctcccaggaccctgggccctagcactgctcaacttgggatgccatgggacacacatggtgactgtcctgtccctgagttggccttgtctgtcacttgttctgggtaagcactctccttgtggatcccaaagcacatctcgtggagaggggccaggccttgtaaccagcagagccttgtgagctcctgagggcaagccacgaggacgcttctctctcctgacctcctcactggtctgacacatggtgatggtcacatggtgcttaacaattccaagaacttgaagaactccaaggctgggtcatcactggaggaaggaaaacagtctgggcagcttggctgagggtatttgggactgctgaggatacttcacggaagaagtggttctgccccctagggggcattttggaaatttatgggctattttttcattgtcaaaaggattcaaggggatggggtgctactggcatttcgtcaacctgggcgggatgctagacatcatgaaatgctcagacctcccgtactgtgaagaattcccaagacaacttttgaatgaccagctttatgtatatgaaaaccctgtttatctgagcctagaactgtctttgcacatgtaaacgtgaaatagcgtttgtgcgttttgaaaagactcagtttgctaggaattcattcccatgtaaattaagacgactttattttgcttggcaccttaaccaagagtttgtttgccattttgaaaatcgggttaccaacatcagagtcaccgataaagcaccaatatcagctggcattgcagctattgcaaccacagcaattctcatagggtgtgggattggactacttcattgtactttattgtcttctggtttagttgtgcttaagccttcacgtaatgaaatacatgttattataaattttattctttacagtgagcatgtttcaggtagttgtggttgtcacatgtgatgtaggatatattgtccacaagtttctttttttcttttttctttttttttttgacacagtctcactctgtcacccaggctggagtgcagtggcacggtctcagctcactacaacctccgccttctgggttcgagcaattcttgtgcctcagcctcccgagtaggtgggattacagggatgtgccaccacatccagctaagttttgtatttttagtagagatggtttcaccatgttgccaggctggtcttgaactcctcacctcaagtgatacacccagttcggcctcccaaagtggtgtgattacaggcatgagccaccatactgagcccacaagtttcattttgaagtagtccaggggccttggttctgaaaggggtgaggactgtggatcaaatagtgatagttttaaatgggagggaataaagtctgcaaaatttccccatattattttgaagagctcctctcctccccacccctcctatcctactttctacagcctggtctaggggcaggaaatctggaagaagattctcgggggagggccccagaactcagctccccagttaatggctgatggaatttgcacaacagctgggcaaaggtgaaagggtggtgccctgccccaaattccttatacctttgctccgcttcattgacacccccaccctctccccaccttctccccaccccaggcttcacccaaactctgacctcttactctctctacttaactctggtcccgggcagccaagacaaagcgaaaggcaaggcagcatgagccgatcacccctcaatcccagccaactccgatcagtgggctcccaggatgccctggcccccttgcctccacctgctccccagaatccctccacccactcttgggaccctttgtgtggatctctgccttggggcctcagctgtcttctggctctgcaggtaggaggcagaggtgcaggagttggtgctgcctgatggtgtgtgtggggaagtaggtgt

SEQ ID NO: 8716 - DNA, 6000 bp, Homo sapiens; identical to SEQ ID NO: 3348

SEQ ID NO: 8717 - DNA, 6000 bp, Homo sapiens; identical to SEQ ID NO: 3332

SEQ ID NO: 8718 - DNA, 6000 bp, Homo sapiens; identical to SEQ ID NO: 864

SEQ ID NO: 8719 - DNA, 6000 bp, Homo sapiens
ggtgtaattcaaaggaataggtacttaaagaaggactaagttttggcatttcttttttattcattatttactaacaaaaaatagccactgtaaaattgcctcactgaggctgtaggatcttgaaatttcaattttaccatcaaaagtaccttgtaggctggatgtagtgactcatgctcataatgccagcacattgggaggctgaggtatgaggattgcttgaggccagcagttcgaggctgcagtgagctatgatcataccactgcactccagcctgggtgatagacctagaccctgtctctctctctaaaaaaagtggattgtttatgcaacatacttcctctctgagtttaaaaaattgacaaaagaaatgtaaccatcatgactatactattctgcatatttcatgataatttgataagctatcaaacgtaagtgttaaaagattcttttacatacttttcaaatgctcttgtgactggtgaggtcactcaagacacttgagattacaatgagggacagtccaatcagagaatgggtgctggtttagttatttcacactgtgtaacaaattatccaaaatgtaactgcaaataaaattacagatattcatgatctcatatagcttctgaggatcaggaatctaggagatgcttagagcgtagatttggttcaagataactcaaagatatgtagtaaagcttgtcagggctgcaatcatctgatagttcaactggggaaggatctatttccgaacttacttatgtgactgtttgagggtttctcatacttgctgactgtgggctggagtctcagttccttgccaaatagacccctccataagctacctgagtatcctcatgacatgacagctggcttcctccaaaatgagagagtgagcccaagaaagaatccacagctatgaataaccttatctcaaaggtgatatgctactacttcttcttttttttttttattttaatttaatttttttttttattgatcattcttgggtgtttctcacagagggggatttggcagggtcataggacactagtggagggaaggtcagcagacaaacaagtgaacaaaggtctctgttttcctaggcagagtgtttgtgtccctgggtacttgagattagggagtggtgatgactcttaatgagcatgctgccttcaagcatctgtttaacaaagcacatcttgcaccgcccttaatccatttaaccctgagtggacacagcacatgtttcagagagcacagggttgggggtaaggtcatagatcaacaggatcccaaggcagaagaatttttcttagtacagaacaaaatgaaaagtctcccatgtctacttctttctacacagacacggcaaccattcgatttctcaatcttttccccaccttgcccccttttctattccagaaaactgccatcgtcatcatggcccattctcaatgagctgttgggtacacctcccagacggggtggtggccgggcagaggggctcctcacttcccagtaggggtggccgggcagaggcgcccctcagctcccggactgggtggctggccaggcggggggctgacccccccacctccctcccggacggggcggctggctgggcagaggggctcctggctgggcagaggggctcctcacttcccagtaggggcggccgggcagaggcgcccctcacctcccggacggggcggctggccgggcggggggctgagccccccacctccctcccggacggggcggctgctgggcggagacgctcctcacttcccagacggggcggttgccaggcggaggggctcctcacttctcagacggggcggttgccaggcggagggtctcctcacttctcagacggggcggcctggcagagacgctcctcacctcccagacggggtcgcggccgggccgaggccctcctcacatcccagacggggcggcggggcagaggcgctccccacatctcagacgatgggctgctgggcagagacgctcctcacttcctagatgggatgggggcccggacgaggtgctcctcacttcccaggtgggatggcggccgggcagagacgctcctcactttccagactgggcagccaggcagagacgctcctcacttcccagaggatgggcagcccggcagagacgctcctcacttcccagacggggtggcggccgggcagaggctgcaatctccgcactttgggaggccaaggcaggcggctgggaggtggaggccgtagcgagccgagatcacgccactgcactccagcctgggcaccattgagcactgaatgaatgagactccgtctgcaatcccggcacctcgggaggccgaggctggcggatcactggcggctaggaggtggagaccagtccggccaacacagcgaaaccccgtccccaccaaaaaaacacgaaaaccagtcaggcgtggcggcgcgcgcctgcaatcgcaggcactcggcaggctgaggcaggagaatcaggcagggaggctgcagcgagccgagatggcagcagtacagtccagctttggcccggcatgagagggagaccgtggaaaggagagggagagggagacgggagagggagagggagacgggagagggagagggagacgggagagggagagggagacgggagagggagagggagacctacttcttctttattttagtggtaaaataaacctaccatggtacaaggtaggaggggacaacaccaagtggtcaataccaggaggcagggatcactgggggccatcttgaaaactggctaccacaggtccacgtggcagatttgcaacttggatttacctagaacttgtgttaaagcatacctcctctagtagtcattgcctgttattgggaagaaatgactagtgaccattcagacaaactgcaaggggcaaatgaaatttgctgacatttctctgctaacattacatagcctctccataacttgagtatactgactgtactaagaaataacaattcaacttttagttacactttttatgggtaccaagatccaagaataatttaaaaaatatacatgatctacgtatagttctgagaagggcagaatgtgtaataaagtaaaacagtatgctgtcacagaaagttaggtgattaccaatcctaagcatttagaaataaagctttaaaaccttcctatgaaaaagatggaaaacaagagacacttttagctttcttatttcccagcttgaataatttaattggattttataatatcagtaggaatcaatgactgcttttagctttcctactttgggtgaaagataagtcactttgaacactcctggtagtaaattgccaggtggagagatatgaccattaaaatgaccatatatagttcttggctttttgtaaaagaaatttctaatagttttcaatgtaggaaagttttctaaagggtatcatataaatcagctacttgaaactcacaaaccataaggtacctgacccaggcaaatcacatacacagtggtaggggataaacagctctactgcacttacttgcacaaataaataaataaacagccaattttaaatataatagagtttttaatcatcaaataacgtatccatctggttaggtcaagacctatttgcaggatagaaaggctgtttagaagagttgtggccaagtgcggcgagtcatgcctatagttccagcactttgggaggctgcggctggtggatcacttgagaccaagagtttgagaccagcctgggcaacatggcgaaaacctgtctctacaaaacacacacacacactcacacacacaaaatagctgggcgtggtggcacacacacctgtagtctcagctccttgggaggctgaagtcagtgggttgcttgagcccaggaggtagacgctgcagcgagctgtgatcatgccactgcactgcagcctgggcaacagtgtgagaccctgccaaaaaggcagagttgtggcaacagatggtgacttcttcccttttctaatcctccaggttatctgtgcttacatcttccctcagtcttagctaggtaacgtatgccccaagatgctctgcccttcaggagagagaattattgtaggtagacagctggtgatttctgcctaactaagaaaaggagataggaacgtattagctgctgactttcttttagcagtggttttccaccttggctgcatattagaatcagattttgccgagtgggatccaggcactaaacttttttttaaagctccccgcgtgattttaatgtgcacccaaaattgagactctttgtcttaggtcagggggtctcatgtcagcgcccattggaatcacctggagagcatgttaaagttacagaatgctaggctccatcctccagtctgattcaggagggctggggtgggacccatcatttgcatatttaacaagttcccagatgctgctgatgctgctgtaccacgctgacaagtcttagaaaaatttggctcttgttatatttttatacaacaaaaaatggagttcagctgtgagtggggtgtagggggaggaatgaaaattggtaaatgcagaggacagatatcactagtctcccctcttttctttccccatcttcttcaaagctgaagttagactgagatctacccctgcatttcccctcctcgattttcatctttcacggattgaggaaacaacctgtgaacggcccaaagccggctagacccaacctaaccatccgttttagcgggtctcttttctcacacaggccgaccgcctctccgccttgacccccacctccactcaaacccgctccatctattaacgttctcttctgcccagccacgcccccggcgttctccgtggttgcgcacctgacgtacatcgttcaaaacgtgcccagtgtttccctccgagggcactgcgtgccgcgcaggcgcaaagggccaggtgctggaggtgctgtcatggcctgcctcaacccggtggtaaggaagacctcaggctctgtgtagagggagcgccctgggactccgggttcacggcagccgaaccctgcaccttttgtttccccctgacactttacagattgtcataaaccctctctcttccttaggggctggggctcttcttcacgtctgtgttggaggaagctgctgagggccagtagttcagcaggaagttgggccagccccgccaaaagaacaagtgccctttttctctttttacccaaactgaggctatctagttggggtgtttagaggtggaactgatcctcaaccctgctggtttcctagatactagaaaacctccaagttcggttgtgttaattttaccgtggacattgttaattccaagctgtattatttactgcttgaaataacaatgtgatatctcatgttacctccccacatgtttttagtgtctttcactacccgcccatttcgttgtcctttaacaacttaatgcttaagtgtacaacctacattaccctcctacctctaacggacacttaatttgcacagtgagaatttctagtctcagtggcacttaggagaccatcaatcttaaaaacctgaatcaaagaacaaaaatcaaggattcatctttattaccaattcatctcaacagacttcacatttcgtgaaaggcaatgtgcctgtccagatctgtgtaattttatgggttccgggtattatatatgcagtataacagctccatttttagagacatgctactttaattatatgtgttttatgatagtgcgttttaagatacataaaatacctatactctgcctgaatataaggttactatgtatgccaatttatctgattgtgaattctatgaaggagtgtctgtattttaaatagaggagttaagatggactagacatagttttaataacagggatgcaatacaaagtctgtggtcatagaagagaaaatatgttcaatacctattttga

SEQ ID NO: 8720 - DNA, 6000 bp, Homo sapiens
aactacctgtttctccctcctgttagaggcccgtgactggctctgggaaggattgccatgaagagacctgtaagccctttctgataaggatttctcaaaggcatttgaccatgggtattttctccacaaacctattaagttttctccatttagagagatggtatcttcaagaatgtcttcaagtttgagctactatcacaaaataccatagaccaggtggcttataagcaacagagatttatttctcacagttccagaggctgaggtctaagatcagggtactagcatggttgggttctggtgagggttgcagatggctgatttctcattacatcctcacatggcagaaagagagtgagctaggtcctccagtggcagtggcggtgtcttcttcttcttcttcttcttcttcttcttcttcttcttcttcttcttcttcttcttcttcttcttcttcttctttcttcttcttcttcttcttcttcttcttcttcttcttcttcttcttcttcttcttcttcttcttcttcttcttcttcttcttcttctccttctccttctcctcctcctcctcctcctcctccttctccttctccttctccttctccttctctttctccttctccttcttcttcttctttcttatttcttcttcttcttcttccttctttcttcttcttcttcttccttatttcttctttctttctttctttctttttttttttttttttaagatggagtctcactctgtcacctaggctggagtgcagtggcacgatcttggctcactgcaacctctgcctcctgggtccaagtgattctcctgcctcagcctcctgagtagctggaattacaggcgtgcaccaccacgcccggctaatttttgtatttttagtagagacggggtttcaccatgttgggcaggatggtcttgaactcctgatatcaggtgatccacctgcctcagccttccaaagtgctgggattacagacgtgagccactgtccctggccctccggcttcttctttttttttttttttttttttttataagaaggagtctcgctctgtcgcccaggctggagtgcagtggtgtgatctctgctcactgcaagctccgcctcccaggttcatgccattctcctgcctcagcctcccgagtggctgggactacaggcgcccgccaccacgcccggctaattttttgtatttttggtagagacagggtttcaccatgttagccaggatggtctcgatctcctgacctcgtgatccacccgcctcggcctcccaaagtgccaggattacaggcgtgagccaccgcgcccagcctccgacttcttatacaggtactaatcctattcatgagggctctacactcatgacctcattaccttctaatggccccatctctaaatatcatcacattgggattcaggtttcaacataggaattttgtggggacacaaacattaagcccataacaaaggaggatccctgagcagggaattgggcacagggatctaagacagggaattatattatcagatccccagggcagaatacaggcatggtcataagttaggcagaatggagacacagttctagaaaaagattcatagcaagttgtcttgatggtaaaccaaggtccagagttgggcctctttagcttcctcctgactggagaaagcaggtgttctaaaggctagagtagggacagaggaggagaaaggaaaactaacatatatcgagtacatttatgaggcaatttacatatgaggtaaaattaatattaccattttacagatgaggaaactgtggctcagtgacctgcttagcaaatttctatagcatctatggcagtgacatgaacatggtatggatacatcatagaaatgtcatgataataaggataaaattctaaaatccgaatacccacccaactccaaatcttctctttgttcatgtaatgaccattttctgggactagccagtttgggttggattctgttcatattactgtcaaagataaacacagctggacattagttaaagtggtgagaatagatttttaattggtaataactattgcaacagggaaaagagtctagcttgaaccaaactcaatttccatttgtacagaggtgactgggcatattagtttttatttttttgagatggagtttcactctgtcacccaggctggagtgcagtggcaccatcttggctcactgcaacctccacctcccaggttcaagtgattctcctgcctcagcttcccaagtagctgggattacaggtgcccaccaccacgcccggctaatttttgtatttttagtagagacggggtttcaccatgttggtcaggctggtctcgatcttctgacgtcaggtgatctgcccacctcagtctccaccatgcccggctaatttttgtatttttagtagagacggggtttcaccatgttggtcaggctggtctcaatcttctgacgtcgggtgatccgcccacctcagtctcccaaagtgctgagattacaggcgtgagccaccgcacccgacctgtgactgggcattttaaagggagaatgagctcaagggagtcagggaagtgaaaaattacaaaaagtgggaaggaggggttggtccatgtgaaatccatctgggtttgcaaactggcatttatcaaagttaggctcctactctcccactgacgctagagggaccctatcttcaggcattgattgaaacaaacattgaattcttcaggcagccttgcgttttctcaggcgggcactttaagaggggctggtgttgtggtggtgtggcctcgagccattggaagcaatattagtgtttgttcaagtcgttacaggctgaagttgaaaggcctattcaagaagcagactctgagcctggctagaatttggtcaaagagagaatctatgtcactattctctaaatttaggaaatgaacagattattagaacaaggtaaaaaaaaaaagttggcacccaagtttatgctggaaaaatgaaggttaaatgccgtaggggaggggcagtgttagggaattgagctggaaccagcactgacaatatttgaaagcatggttaggttttgctgtggtttaatattttacaaatgttattccctgtcacatagctgaactaaataccccacatgtttgcgattaagcattatgagctgcagaacatatgtgctaataatatggttcatgcagcctgtgggcacttctcccatgacctaagatgaaggtgaggctttttgattttccttaaggtattgtgttttctgatgattcctttttgttccaaactttcgctttcccctttagaacgaagccttttacaggaatgatattttatttttatatatttattttttttgagatgcagtcttgccctgtcatccaggctggagtgcaatggcgcgatcttagctcactgcagtctccgcctcctgtgttcaagcgattctcctgcctcagcctcctgagtagctgggattacaggcgcccaccaccgtgcccggctaatttttgtatttttagtagagacggggttttgccatgttggtttcggactcctgacctcaggtgatctgcccgcctcggcctcccaaagtgctgcgattacaggcgtgagccactgcacctggccaggaatggtattttaaatactgtcatagcaagcccttaagaaaattcttcacagctgcatgttaacacactggcctgtccctgactttggctttgtttccaggatatacagttgtttctggaatgtacagtagctagattgcagccctccaatcatacaaaaacagactgagggtttggaaatgctgctaaagtctagttacagtgttgctcttgaggagtctggcgctatagggagtctgagaattccttatttgaaaaacagccaatggaaccgcacagacacactgaaattaagacattctttctgtagattatgcagcattgttagagagcaaagaaaagccacaggaataaaggactcaattcagccctctgctgaaggagagggtgttcctgaggcttgagtaggaattgacccaacagggacagtttggttgggctgataccaggaggctactgagaggtgtcgatgatgccttcctgagctctgctgaatacctccttggcatcagtcctcccccaacatctagcagaaacagaggagccagacattagggaccacattggggcgtgcttttccccacagatgcatactgaagtggggacaaagtcttcagctgccatatgacctggattgctgtttcacctatcacatgcatctaatctgacttcaacaatctacaggagaaggtagaacttcatatttacattttatttgagtggtttatgaagaaaagtagaggaaaactgcaaagaacggcagaagtagactcttgaggttggaggggagtaggggatgatggtgtgggagggatgaactttgcagggagttacacaaaatttggaaaattacagagaatactggaatcgccactaaaagagaggcagggcacctaaatctatttattagacaacaattctgagaaattattcatcactaagggcaggacagtcagttgatgcagtcaagaaggggcaggaaatagggcgagctgagttatgaaagccattctcagaaatgacccaaatttgtactgagctgttgttcttgagcaaccttggggaaaattatcagtctgcttttcccacagcctgatgtccaaggggcagatacgtgtggtgggcttgctggagaaataggctcttctcacgtgagaacagcatccttccaatctagagctcctggctccaggaagtggtggtggctctaccctggtgctatttcattagtgaagggtggggtggtggaaagtgcagaaaaggcaggacccctgacaccagcaaggcattggatctctctggacctccgggtggtggactttgggactggacagacctggtcacagtctaggttctacatcttactggtcgagcaactttaggcaagtagcttaactcctccgaacttattttccttttctaccaaataatgataatattacttcatgagtttgtgagtattaaatgagatcatgcatatacagcctacagcccttagcacaccatgaacacatagttatttgataaatgtttgttagtgtggttaattgaacagaaagccttaaatgtcttcctaaccctaaaatccagtgattctttgaactggggagggcagtagagagatttaatttgtggaaaaatgaaaagaccatttaaaattattcaatcagaaatgtattaagctttgtgtatttgtgtcaggcatttgtagacagtgtggaaaatgtcttatccaatgattctttgaactgggagggaagtagagagacttaatttgtggaaaagtgaaaagaccatttaaaattattcaatcagaaatgtattaagctttttgtatttgtgtcacaggcatttgtagacagtgtggaaaatgtcttaataaatgagacatgctctttccttgaaaaagcttcagtctgactcacaaagagtatatgaattttttcctatgatggcttgaaagattttatcttcaaattcctttttgtgagattgtttttccataccagtgcttcttatttatagggcttgttgcaagtaatttgcaatattgttacaggttgagtatcctttacaccaaatgctcagaccagaagtgttttagatttttttggattttggagtatttgcatccccaaatctaaaatgctcaagtgagcttttcctttgagtgtcatgttggcattcaaaacattttgaattttggagcaattcagattttgtgtttttgaattagagataatcaatttgtaataatatttaaggtattgctgtttgtgaaagatgtatttttaaacgatttagagtcaattcat

SEQ ID NO: 8721 - DNA, 6000 bp, Homo sapiens
ctggccaagctgaacatccccaaattaaccctgagctttggagagagctttattttaccccctctgccagcccgttacactttaagaaacatagctgaaaactgacttagcttcaagtaagatttgtcactgtgtgtactgaaggcccggctctactaggtaacaatagaaatcatctgcctccgccgcctccttgaccagccttcatcattctcatcagtatttaacatagacatttctctattggattgacttctcaaagatgttgatattttccagtaaggcagcaagtgaccaccagaaagacactgtgtatatctaagtacaccccagtttaatctgttcaaacagctggctgaggcttcttttttcaagagaacataactgaaggcagttagaatggtttcttttgtgcaaatttcccctcccagagaccagtcccaggagttccttcaactgcattatccattaatgctgtggattcatttcccccaaataaacaagttttcctgccaaaaaaaatattcagtatgattggatgcggggatatgtcttgggacctgattttgaggcacgttcttcatttttctgggttggccctcattttccttactgagctcttacgggcagcgacagggtggctgtagccctcatttctgaaggccctcactgccttgttaatcctgtgtgtggctattcagcccccttgaaagcatccttcatttctgtttgcttagtttcctgcatgcctcttccagatcatctttcacctcttgcttcaacctctggggacatgtgtggtttctacataatgcacaaatgtgacttcgggggaggggaggatggctgtggactcatacacttcagctggaatcactggactctgaaataggggaggtcctttctgaatgggctggtcaggaaagaggggagatggaaagaccaacaggcaacctcaggcactgtagatttcccctcctaccgcaagacagaaagctgtgtatgtgttttgcattataaggaaagtgtgaactacagatcctgtggaccaaatcactataaataacactcttgtatctgattctaaattgggacattgaggagaataagggaccaacaaccaacatttctgtaggaaaaagatctggttctttattcacccaaatgttgatcactgggggtcaacgaattttctctatgaaagttagatggtaaatattttcagctttggggaccgtatggtttctgtcacagctgctcagtcctgcctttgtagctctcaagcagccatagacagcatataaacactcgaatgtgtggctggccataatttgcccacctctgagagagtctaaattcataaaatttactaataatcattgtcgttgttcacataaattgatgagtgttctgtatgtggccaggctctatgctaagtacttgttgcgaatggtcgcatttataccattcaaaacaattctgtaagattattaatagtattgtacccatcttacaggtaaggaagcagaggcttagagaagttaaataacattaagtgtaggcaaggttgaatttggaacaagtaaatttcactccaaactcatgctttataccactacacaatacagtcagcctacagtacctgcatcattgatatccgcattttcttttagatcctgacataagccagtatttggacttaagttatatacatatatagctaaagttttgctgtatagttacagctagttttgcttcttacctgccgaggatcagtgctaggaaatgaatacatgaagtcctggagagctcagaggcagaagacatatatgtccaggctgctttccaggttctaagaccctgtgctctgaaaatagtgaggtggagccaggccttcagcaagctatactactccttggaatggcctcacccaggcccagcactggcatgagctgccaagccattgcacacaggtgcaggctcctcagctgctggtggcacagagcagcttctgctgtttccctacctctaagccagaattagacctgaagctgctctgtggtcaggggagactagaaattgcataattaagttgttttctaaatagtggtatcattagcatgcaagtcgaccaaacagaaatgtctgttaaagatggtaggaaccatgttttgatgcctttgttgttataatgagtaaaatgtgttctgaagaaaacttagagtaaaagtaaaagatcaggggaaaagtatcgcatatgctatcaccaccaaagttctttcttcaggcttattgggatggtagtgggggttgggggtggggattctgtggtcaaataaatttggaaaatgcaagcctagaaaaacttgaacaatattctcagggatatagtatgatgttttcccaaaatgtgtgcatgtgtgtgtgtatgtgtgtgtgtgtgtatgtgtatgtatgtgtctccccttataaaaatgtttataaggaatatcctttgagaaacccaaacccagaggcatttcccagtgttaacactttggtaaatttctttatggtccaatatttttcaaatgggtgggcatgtcagcaacagtaactgtggtgattattaaatacttaaaaaatcatttttttttgagacatggtcttttgctccatcacccaggctggagtgcggtggtgcaaacatagcttactgcagcttcagcctcccaggttcaggctatcctcctgcctcagctttctgtgtagctgggaccacaggcatgcaccaccatgcccagctactttttgtattttttgtagagacagggtctcactttgttgcccaggctggtctccagcctcaagcagtcctcccacctcagcctcccaaagtgttgggattacgggcatgagccactgcacccaataatctcttttttaatttttttaggaataggggttatatatattcattcctgtgtgtttgtgaatgtttaagtttattttgaaacagttcataattacagaaatgttgcaagaacagtatgaaggactcccctattctcatttccccatttgttaccattttactatctttgccttattctcattgtttgtgcatgtgtgcacacattattattgctattatttttgtatttttcattactgaaatctgaattataaaattcttcaatgaactgtgaacttatttctccaaaatactatagaaactcaaattagactacaagtttattaatttcccccatttctacctgctgcattaaggtaaattatgcttttcaagtgtgtgaaaagttataaaatttcaaggaaacattttgataaggctgcagcctgcagtcctcgtgaggaggaaagaattgtcaaagccaaggaagtcttcagttgaggcccatgcacaatcctaatcagtctggattagtgaggttgtaatttgatgttggatgggactgtcccaaccatttggagccagtttgaagtcctattagacagggtcctttaagaattagagtcagctgtttgctgaggtgtgaacctcagcctgaaacatgcttccatttttaagtttcaggactaagggggccatgcaggagctctgggctttagtgacccctctattttgtttcctgtggtgacttgtcatgttttcacagcgcatcaatatggatagtttttaaagtgacagccagtttcaacagtggttttatttcacatacattggagcttccatatctggattttttttttgtcagccactaaatcaaagctcttcctcctccagatggtttaagacacccaatttgaacattaagtgagtcaagcaaaccctgtgccacattaccaaagggcctgctggtttaagagactatggatgtgacttacataacctctcatggagcatttccaaaaccttgtaaggaagctgggtatagtcacctctccttcataacgttaacactgagccatgaagccagggcttgtgtcctcagagaatgcataaggaaacaatcaccagatcgccctgggaggagaaggcactaggcgtttgttcaggaggttgatgcaacactcacaacagccgcaggatacatgtatcatacctcccagctggaaggcagaaacaacttcaagttcagctcccacactcacatgtgtggtagctctatacctaactagaaaagtgccttgtttaggtataaattagattgcagggactgaaaaaaaaattttttttaatttttaaaaacattttattatgaaaattttcaaagatacttcaaaaaagagaaatacagtcagcctgcatatacgcactacacagatgcaaccatttatcaagattttgccacatttctttaccccgtcccttatttattttttgctaaaatattcacaacaaaccccagatatcatatcattttacccctaacatacttcaacatgcctctctaaaaaagtagacattttataaacacaatgccactatcccacctataaaattaatccaggaccaaaattttgatgtatactttttacatagcttctgcagctgggtaacctcacagcacaagaatcaacaagtccatgcctacacgaattcagctgataactttaaagagagggatccttgctctcaactttggacgaaattctttggtttggggctgggggcaggtgaagaatttgcacttgtggttctccagaatgtaatctcaggtattgaactgtgccatttgcttcctgggcatttcatcctttcatcaatgattggtaatcataacttacaggaatttttaaaacaatattttaattggaaaacgcatctgtcagctgtcaggcttccagtttccacttttgagaagcaggatgttgaatgtgagtaatgacacaacaggcctataaaatgcggactaaccctcggatgactcatccggtacaatgcagtatatttgtcaaggagactgaatcatatatgggggaaaccacttctcaggcagccagctggttctcaggtcagcaagagacgatccatttttatcggaagctttatagtagcaataatgctaatacccagcactcgggctccacaatgtagaggaaatggcatcgcctggcaggtacgtgcttactgtttacatgaactttattttttcattgttctcttattcttaacctttctggtgcctgcttttagcatttttttaaaggagaaaatttatcctagttgtagaggaccacagtgtgtatgtgtttgtatttgtgtgtgcccacgtgcaaggacagataggtaacctctggtctgttgatagacacagagctcttagcctctcatgcctctttctgaaaacaaatttctccttagatattctgatagaaatgttttgttgttgttgttgttgttttttattattaagtcctgaatctaaaagatgctgcctaggaaacagcttgcagagatggtatacctcttgggtgggtagtgtagagctttaaaacaaatgaataagcagaggtgagctgaaggaggtggtctaacaattactattgtgttacgttggatttctttcagtactgtgcttttttcctacccccatgatgcgtgacttaatgcaagaaagctttattcccctacggagtgaatagggtgggttttgtttgtttgtttgtttgtttgtttttataaatcacaatttgctcatactgaattcatgcattaactttttctaggtgggagaaagggtagtggggatttggtagcaacatttaattatagcgttcacatgatctgaaggatcattctgcataattgggaggctgtgtctgcctgtctgaccctctctctttcttcacccactaaatttaaacaatgtctgactagttaaagcacatatcttatttatttgagtgtattaaacattcctatgtgtgttgacagtctattcagtgtctcctcatattttaaaaaaatactttgtgagtcttgcttgttaggga

SEQ ID NO: 8722 - DNA, 6000 bp, Homo sapiens; identical to SEQ ID NO: 3346

SEQ ID NO: 8723 - DNA, 6000 bp, Homo sapiens; identical to SEQ ID NO: 866

SEQ ID NO: 8724 - DNA, 6000 bp, Homo sapiens
caagagcaaaactccgtctcaaaaataaataaataaataaataaataaataaatgaattcttttggataaatacccgtaagtggattgctggatcatatggtagttctatttttagtttttgtttgttttttttttttttttgagatgcagttttgctcttgttgcccaggctggagtgcaatggcgtgatacccattcactgcaacatctgcctcctgggttcaagcaattctcctgcctcagcctcccaagcagctgagattacaggtgtgcgccaccacgcctggctaattttgcatttttagtagagacagggtttcaccatgttggctaggctggtcttgaactcctggtcttaggtgatccacctgtcttggcctcccaaagtgcctggattagaggtgtgagccaccgcacctggccctatttttaattttttgagggccttccatattgttccccataatggctgcaccactttacattgccagcaacaatgcacaagggttccgatttcttacatccttgccaagatttgttgttttcctttctttttttttttttttttttttttttgagacagagtctcactgtgttgcccaggctggagtgcagtgggatctctgctcactgcaacctctgcctcttgggttcaagtgattctcatgcctcagcctcctgagtggctgggatttcaggcacccaccaccacacccagctaatttttgtatttttagtagagatgagttttcaccatgttggccagactggtcttgaactcctgacctcaagtgatcctcccgcctcggctttccaaagtgctgggattataggtgtgagccactgtgcctggccatattatcctttttttttttttttttaaaagaaaataatggccattctaaaaggtatgaggtgatagatacctcgttgtagttttgatttgcattgtcctgatgattagtgatgttgagcatcttttcatatattttctggctatttgtatgtcttttttggagacatgtttattcaagtactttgccaattactaaattgcatgatttattttcttgccgttgagtttattgagttccttatatgttttggatattaattccttataagaaataccgtttgcaggccgggcgcggtggctcacgcctgtaatcccagcattttggaggcagagacgggtggagcacaagttcaggagattgagaccatcctggctaacacggtgaaaccctgtctctactaaaaatacaaaaaattagccgggcgcggtggcgggcgcctgtagtcccagctacttgggaggctgaggtaggagaatggcgtgaacctgggagatggagcttgccgtgagccaagatcgcgccactgcactccagcctgggcgactgagcgagattccatctcaaaaaaaaaaagaaaaaaagaaagacagaaataccgtttgcaaatattttctcctattctttatgttacctttttactctgttgattgtttcctttgctgtgcagaaacttttaagtttaatggtgtctcacttttctgtttttgcttttgttgcctgtgctttgctgtcatatccaagaaatcattgccaagaccaatgttatgaagattttcctctgcatttttttctcagagttttatagttttcaccgggcgcggtggctcatccctataatcccagcactttgggaggccgaggtgggcagatcacgaggtcgggagtttgagaccagcctgaccaacgtagggaaaccccatctctactaaaaataccaaaattagcctggcgtggtggtgcgtgcctgcaatcccagctactcaggaggctgaggcaggagaattgattgaaccagggaggcggatgttgcagtgagttgagatcgggccactgcattccagcctgagcgacagagcgagactccgtctcataaaaaaaaaaagaaaaaaaaacaggtttttttgtttgtttgttttttgtaggggaggagattcactcttgttgcccaggctggagtgcagtggcacaatcttgactcactgctacctccacctcctgggttcaagcgattctcctgcctcagcctcctgagtagctgggattacaggcgtccaccaccactcccggctattttttatatttttagtagagacgcgatttcaccatgttgcccaggctgatctccaactcctgacctcaggtgatccgtccacctcggcctcccaaagtgctgggattacaggcatgagccaccgagcccggccaaaaaaaaccaaaaaaacaaaaaaccccccagagttttatagtttcaagtcttatgtttaaatcttttatctattttttttttgagacggagttttgctctgtcgcccaggctgaagtgcagtgacacaaccttggcttactgcaacctctgcctcccaggcaattcccctgccttagcctccagagtagcttggaatacaggtgtgtgccaccaggcctggctaatttttttgtatttatagtagagatggggtttcaccatgttggccatgctggccttggacttctgacctcaggtgatccacccaccttggcctcccaaagttgttgggattacaggtgtgagccactgcacccagcctcttccatccatgttgagttgatggttgtgtatgatataagacaagcttgtccaacgtgcagcccacaggctacatgtagtccaggacggctttgaatgctgcctaacacaaatttgtaaactttcttaaaacatgagatccttttttttctttttttaactcatcagctatctgtagtgttagtgtattttgtgtgtggcccaacacaattctaattctcctttttctcctcctccttctccgcttcctctttctcctccttctcctccttctcctccttctcctcctcctcctcctccttcctttttttttttttttttttttttttgatatagagtttctctctgtcgtccaggctggagtgcaatggtgcaatctcagctcactgcaacctcctcctctcaggttcaagcaattctcctgcccaccaccatgcctggctaatttttgggcaggtacccaccaccatgcttggttaacttttgtatttttagtagagactgggttttgccatgttggccaggctggtctctaactcctgacctcaagtgatctacccaccttggcctcccaaagtgctgggattataggcgtgagccactgtgcctggccttaattcttcctccagtgtggctgagggaagccaaaagattagacatctctggtataagattacagtttagtttcactcttttgcatgtggatatcaagttttttcaacaccacttttttttttttgtttgagacaaagtttcgttctccttgcccaggctggagagtaatgacacagtctctgttcactgcaacctctgcctcccgggctcaagcgattttcctgcctcagcctcctgagtagctgggattacaagtgtgtgccaccatgcccagctaattttttgtatttttagtagagatggggtttctccatgttggccaggctggtctcgaactcctgacctcaggtgatctgctctcctcagcctcccaaagtgctgggattatagatgtgagccactgcacccagccctctttcttcctttttttttttgagacggagtctcactgtgttgcccaggctggagtgcagtggcgcatttgtggctataaagttccctgtgagtactgttttggtgtgctgtgttttcattttcatttgtctcaagatattttctaatttccttttttatttctcctttgatccattggttgttcaagagtatgttaattttcaaatatttgtgaattttttagttttccttctattattaatttctagttttattccattgtggttagaaaaaatgtttgtgtgatttcaatcttctcacatttgttaagatttgttttgtaacctaacgtgatctgctttggcaaatgttctgtgtgtgcttgagaagaatatgtgttctgctgctgttaggtggaatgttctgtatatgtatggcagtttagttgagtttatagtgttcaagtctattgtttctttagtggtcttctgtctggatgttctgtgtattgttgaaagtatggtgttgaaatctccaattattagtgggtggctatctatttctctcttcagttctgttaatgtttgcttcatatatttgggtgctctgatgttggatatataaatatatatatattttcagatggagtttcactctgtcacccaggctggagtgcaatggcactatctcagctcactgcaacctctgcctcccaggttcaagagattctcctgactcagctacctgagtagctgggattacaggtgcccaccaccatgcttggctaatttttgtatttttttgtagagacagggttttgctatgttggccagactgctctcgaactgctgacctcaggtgacctgcttgcctcggcctcccaaagtgctgggattacagttgtgacccaccattcccagctgggttaatatatatttataattgttgcgtcttcctagtgaattgactcttttatcattatattatgtccttctttgtctcctatgatagtttttgacttaaagtttattttgcttaagcatggctactcctgctctctcttggataacatttgcatggaatatgttttttcatcctttcactttcagcatatgtctgtctttaaatctaaagtgagtaccttatagacagcatacagttggatcatgttttttttttaatccacttagccaccaacagaattataatttttaagcatttatcagaagtaaagacatttagtaatgattccccccttcattttatatacctattttctctttattttatttttttaacagagtcaacctatttgatttcttgacaagaccacaatctgatcccaaagatgtgctccacaaatccaggcaaatgggtcacctttgatgatgatcctgctgttcaatcttctcaaaagtcaaagaattttcctctggagaatcaaggtgtctgtagaccaaatggactgaagctgaaccttcctggcctcagggaatttcccagtggatcttcctccaccagcagcactcctctctcctcccccattgtagatttttatttcagtccaggacctccaagtaactctcctctttctacacctaccaaagacttcccaggttttcctggcatccccaaagcagggactcatgtgctttatcctattccagaatcatcttcagacagcccactcgcaatatcaggaggagaatcttccttactgcctaccagaccaacatgtttatcccatgccttgttacccagtgaccactcatgtacacatccaactcccaaagtaggtcttccagatgaagttaatcctcaacaggctgaaagcctaggattccaaagtgatgatctcccccagtttcagtattttcgagaggactgtgctttttcaagtccattttggaaagatgaaggcagtgattcccatttcacccttgacccaccaggaagcaaaaagatgttctcatcaagaaacaaggagatgcctattgaccaaaaaagcctaaataagtgttcactcaactatatctgtgagaagcttgaacatctccagtcagctgagaaccaagactcacttagaagtttgtctatgcactgtctatgtgctgaagaaaatgcctcttcctttgtcccccacacactcttcaggagtcagccaaaatccggatggtctttcatgctgagaattcctgagaagaagaatatgatgtcttcccggcaatggggaccaatttttctgaaagttttgcctggaggaattttgcagatgtattatgaacagggattagaaaaaccatttaaagagatacagcttgatccatattgtaggctttctgaaccca

SEQ ID NO: 8725 - DNA, 6000 bp, Homo sapiens
gcctctgcgaaatgagggcccagccacgaagaagtacagtctcaccatgctcctcccctataaaaactttcagggaggcctgaggagaggttgggtggtgggcaggaaaggtgaaatgcaggaatgaagggagctaacagcattctccatgttcatgggaagtgttagtttcactgggtgggggatgttggcaaatgacagggcagtatggaaactatttatttttctttatggggtttgatgaactgtttaattaatgcttgttcttgggaaggaggtacgtgtgtgataaggacacgtgtggacaatcaggagaagaatgggaatttgggagccctagaaggagcgtgattcagtgattcagtgtccaccgtcatcctggactgttccaagggactgcagtgccaaatgtcacagtggactgtcctgcagaggtccttgggatggtgtgagtctggactggagaccatatactctgggaagtgtagtgctgagagaaaggggatggatggaagatcacaaaagcttctgtgggttgggagtggagtttccagagtcaggaagatttcatgaggcaggagtcagaggctggtggtgctctggccaaggagtagggttataaacggagagcagccaagatggaatccctctgagggtgcaactctttgggggcttgttttccccacggagcatgggatggttctatatggtgagtgtcgttaaattccctctatcatgggctgtctctctcttaggtgtctcccagcctctcggccgagtctcacacagccagcccacctgcaaggtgcagtgtaggaggaagcaaggccaacagttagaaggagatgagccctggcccctttcatctggcctctgtctaggtgaccaaagctcacttggtcctggatatagttagcagcatgaggagtgatgttcctaggaccagtggacagcatggacgctgccttctagaaggtcttaactccccattaaatccccagcactcagacagtaatccatacatagcagtgattcagtaaatgcttgaatgatacttgatgtggtatcttcactagagatatatgaatatttagcaagggcagggaaatatgctcaaaatcactaatcactacagaaatgtaaataggaaccataacaagacaccattccacacccgtagaaagatgaacgttaaaaaagactgacaggggccgggtgcggtggctcacgcctgtaatcccagcactttgggaggctgaggtgggtagatcttgaggtcaggagattgagaccatcctggccgacatggtgaaaccctgtctctactaaaaaatacaaaaaatatctgggcgtggtggcaggcacctgtagtcccagctactcaggaggctgaggcaggagaatggcatgaacacgggaggcggagcttgcagtgagccaagacagtgccactgcactccagcctgggcgacagagcaagactctgtctgcggggtggcgggggggtgcaggtgggaagactgacaggctgggcacagtggctcacacctgtaatcccagcactttgggaggccaaggcgggcagatcacctgaggtcaggagttcgagaccagtctggccaacatggtgaaaccccatctctactgacaatacaaaaattagctgggtatggtggcgggtgcctgtaatcccagttactcaggagactgaagcaggagaatcacttgaacccaggaaacagaggttgcagtaagctgagagcatgccattgcactccagcctgggcaacagagcaacactccatctcaaaaaaaaaaaaaaaaaaaaaaaacccaaaaacaaaaagaagaagaaaaacaaaaagactgacaataccagatgttggcagggatatggagtaacttgggattcaatatattgctggtgggaatgaatgatgatgcagccactttaaaaacagcatggtagtatttgtagagttaaacatattcttaccatacaacccaacaattccaatacaagagaaatgaaaactttcacaaagacttgtaagtgaatggttatagcagcattttttttttttttgagacagagtctcactctgtcacccaagctggagttcagtaacacgatctcagctcactgcaacctccgcctcccagattcaaacatttcttgtgcctcagcctcctgagtagctggaattacagatgcaccccaccacgactggctaatttttgtatttttagtagagacagggtttcaccacattggccaggctggtgctgaatccctgacctcaagtgatctgcccaccttagcctcctgaagtgctgggattacaggtgtgagccaccatgcctggccagcagcattattcataaaaaataaaaaactgaaagcaacccaaatgtccatcaactgatgaataaacaaattacactatgaaataccattcagccacaaaaaggaatggcatattaatatacgtgtaacaatatgaatgaatctcaaaaatataagagaaataatgaaatacaaaagactgtgtactgcatgattccatttatatgaaactctagaagaggcaaaattataatgacagaaaccagattagtggctgcctggggctggggtggggaaggagatgggctgcaaataagcagcaagaaatgttttagggtgcagggactgttctgtattctgattgtggtggtggtaacataattgtatataattaccaaaatgtatcaacctgcacacttaaaatgtgtgaattttattgtatgtaaataataaaatataaattttaagtagaagagacccccacatctagatataccatgtgcaaacttctggcaaaccaataataaaaataaaatcttgaaggcagccagaaacaatagacagaagaacaaagaattacggaagacttttattcagaaactacgcaagccagaagtcaatggagtaacatccttaaagtactgaaaaacaaaaacagtcagtctagaatgctacacttttctttttgtttgtttttgttttttaaagacagagtcttgctctgttgcccaggcaggagtgcagtggtgccatcttggctcactgcaagctccaacccccgggttcaagcgattcttgtgcctcagccttccaagtagctggggttacaggcacacaccactacgcccagctaatttttatatttttagtagagacaggctttcaccattttggccaggctggtctcaaactcctgaccttaagtgatctgcctgcctcaggctcccaaagtgctgggattacaggcgtgagccactgtacccctagaattctttttttttttttttgagacggagtctcactctgtcacccaggctggattgcagtggcatgacctcggctcactgcaagctctgtctcctgggttcaggtgattctcttgcctcagccttcctggtagctgggattacaggcgcccgcctctgcacccagctaatattttgtattttaagtagagacggggtttcaccatgttggtcaggctggtctcgaactcctgacctcccaactctagaattctatacttctatgcttaataaatatttgtggctgaatttactggaggtggttatagggggacatggaaggaaaactataaaaatgcaatttagtatttgttgataaaccatacagcctgactggcattgaaattggttgtctgtataacttttccattaccaactgaactgtgctagaagaaatattaaaggaagttcttcagacaggaggggtatgacaccagatggcgatttagatctccacaaaaaatgaggaggcctgaaaatggtaaaaatgaaggtcaatttaaaagttataatgggggcggtcgcgcacacctgtaataccagcactttgggaggccgatgcggacggattgcctgaagtcaggagttccagacctgcctggccaacatggtgaaaccccgtctctactaataatgcaaaagcgaggctggtgtggtgtcgggagcctgaagtcgcagctactcatgaggctgaggcaggagaatcacttgaacctgggaggtggaggttgcagtgagccaagatcgtgccactgcactccagcctgggcgacagagtcagacttcgtctcaaaaaaaaaaaaaggttataatggtgttctcattagaagaactacagaccccagagctctcaaatcgccggaaggatttctgcggtaggcctgtgcatgatggacagaggacaggtggtaaagaatcacggacacctagtaggacaactaggcatggctttgtcccggtttcagagcaccgacacagcatttagtcaccatttaccttcttgggaggtgggttaggcagcgggcacactagtcctgctttgtgggagcagaagtgaagtctcagagaaaacaggtgacttgcccaagaagccttattaattaccagccaggacagcgtattttctattccgtgtgttttgggataacttagtgccgtcccctccgatgaaccagtgccttcgaaagcccttgagatttgggaaacaggcggcacagatcttggaggttaccttgttcttaatcagtcctcaggcagtcgcctctaacgcgagcgaacaccggcttcccgaggccgtcgctcggcagaggaggggccaggcgcccgatcccagatcccctttccccgccccgccgcgccccgcctgctctggcacagccgcactcccgcaaatccctcccgcggaacccccactcctgcctgcgcgggcgctggaaggcgggcagggggcggggcgccgcggcgcgtccgttgctaaggccgcgcagccctagtgaccgaacgccctgcggcggccgcgcaggcgctgtggtgggctccggtgcactgtgggatggaaaccggagcggcgcgtcctggcaggaccgggcggcggcggcggcggggccggcggcggccagggacccgggcttaggctcggccaggccggctgaggggcgcgggcggccagcgggcggcggacgccgtcatgaacgcggcggtggtgaggcggacgcaggaggcgctggggaaagtgattcggaggccgccgctgaccgagaagctgctgagcaagcccccgttccgctacctgcacgacatcatcacggaggtgggcgccggggaccgggcccggccaggtgcgggtcgggattccggtgggcgccgaggtcagggcccgggccgggtggcgccgggtgcgagccgggctcgggctcaggtgcgggtcgggggccggggctgggccggagtcggggcccgggccgggtgtgaaccgggtgtgggccgggctcggggtgcaggtcggggacctgttcagggccgggtgtgggccgggcacagggtgcgggtcgggggccggggtcagttccggggtcggggcgagagttctgtgcggcccctgcctgggagcccggcctgtaggcccaattccgcggcgccctccgtgaggaggtcctgcccctcccccggctccgggccgccgcttacaaggaggctccgggccctcaggagcattcttacttcttccctgcctgcccttgtatttccttagagtgcatcttccattattgctggcagagctgcttctgtgactcctgcctcgtctaaccttgcagaacccctctcgcttgccctgaagtatgtagcacgtggaaggcactccctaaatcctgggagaatggaaataatattttttatacaacccttctgccccaaagtttccctccataccacattttgggtgcttaataaatgcctgcgggtggatttagtggaggcggctgtagggggacttggcaggaaagactgtaacagagctgcacagcctgccctacgttgagattggtggtctctgtagctttttccacttgcggatggtgtgctcctccgtgacggagaccctggcttgcttattagcatggctctggt

SEQ ID NO: 8726 - DNA, 6000 bp, Homo sapiens
gatcaattgatggtggtttctgaggtctccctttatggaattttgatctgggagtggtagaagataatttgaagggggatgtcaggaaaatattaaatgcttgctctttttagggtttaatgattccccaccaggcatgtagagaaatcaacgtttttcagagtttgagctgatttgccaagttgctcttgtccttgtcttgcaggtgttttaagatgtgttgcttctcccgtgcgtgtcgtttgtgtcatttgtgtcactctcagtattgctctgaaggctttggagcagcctccaccttagcattgcaagcggtgtttatgcgcagtctgagttgtgcatgtggtgtctttaggagcatggacattgctcagttattaaggattagggctgctttcaagggcttttaggcatcagcagataagtacaataagacctgagtttactgtaattattgtttaattaaattttcaggtaaatttagggtttgccaggaagtcctgttggtttcaaactgttttctcaatgtgtgaattctttctggacccaccatgtgtgttggggacgttttcccagacacccagacacgcattctttgggggatgtcaaattgtaaagcatcccgcgaagatgttggaaatcatcttgtctccagctgctaggaaggaggacactgaggtcgggaagggatccagatctgcccagttgatccggccgggcagtgaggggcagggcctgagctggtgccatggcctcttcctcccgggacagccatcttgtcttgtggcactgcgtctcagggtgtgcctgcccaggggaggtgggtgggcgccacaggactgaccctgagggaatcctgtaaaccaggctttcctgtgggggtcagtataagcccattttgtgatctgtgggtcacagtgggatggggggtgcctactggcaagactgtggttttgttagtaattgaacgtagtgttctacaaggcactttggagttttactatttaaaatgtcactctttccccctccactgcacatcctggagtaatgtaccctatgatatgtgtcatacctggctttccttatgagtcttaggaattacaaagacattccccatcttttgctcctttttagaggtgtaagaaaaaatatttttcatggacctgatttttctgaggcactagtatattcgggtgtattttgctgtgcatgaggcatcctaggaaggggttaaccttcctcagctcacaaagccttcggattgagggtccccacgttatgttccctaaaactgctaatgaggtgactggctttttaagtagagagaaaccattccaaagaaattcttagaggctcggccgggcatggtggctcacgcttgtaatcccagcactttgggaggccgaggcaggtggatcatgaggtcaagagatcgagaccatcctggccaacacggtgatgaaaccccatctctactaaaaaaaaaaaaaaaaaaaatacaaaaattagctgggtgtggtggcacgtgcctgtagtcccagctactcaggaggctgaggcaggagaatcgtttgaactcgggaggcggaggttgcagtgagctgacatcacgccactgcactccagcctgggtgacagagcgagactccgtctcaaacaacaacaacaacaaaaagaaatttttagaggctgatatttgggaacatatcagagccaagtataatggtggttttgtttaaaagcgtctgagaccatggcgaagtgattttttcctactcgaggctgttgcttacttggctgccgtgagatttgcgtggatctcgcatggtggttgtgcttgccaggctcttctgtggacgatctgggggcttcttcattgagccgcgtaggtctgggaggcagctgcgtcctttcctctggtaaaaagcgccaggcaggtgtgagctgctgtgaggcgcctcccgaggaacccctgttcccagggaccttactcacatctacgctggggaggcaagagactcaagttctaaccccggttctgcctcagtcattctttgtcctcttccccattttatttctgtctagtagagaggctgatgagatcctaggctacctcatgggcttttgcgaagaagaggtgaaatagtagatatgaaaacacttggaaaattaagagtgcagttgagaggccaggtgctaagttagactggccatgtgggggtcccaggcccctgcttaactgcctcttttatgggtagcacgtgtgcagtgcccagcttgcagtcatgggtaattactgctgatacaatctgataccttcataattaacttatgaggacattgaattgttgaaatatcgaacaggcattctttgcttttcagtcttcctagaggaaaatctcaatgaagataatcattctactccttctactctgagatatgtcttctggaaaagtgatttaaggcgtgagataagatggtgtttacggttttcatgcagtttatgttatgagagtgctttcctcacttaaagtctgaagcctttgcgtaaaaagaattgccccattctattaataaagttagcctgtgatcagcagaggcggctaggagcagtttctccgtgggtgttggaggtttatattgttcattccctccctcacttccagatccctgggtttcattgcgatatgtttccaggaagttcggtgtggcgtagggattcgtgttctgtgtagcttcctgagagtcaggagtatttgaagtccttgcccacctactctgcccttatgggaagagatctccctgccattggctcggaagactcttggggaacgcaggcagcagtaacaattgtggcgatcagagctggactggcgatgtggtgttctcatgggaagaatgatttcactgttggtcagtgttatagaaaatatcttggcatatttttagatattatggattggaataattctaaagtttgaattttttttttttttaatagtcagcaagctcaggggagatgtctaaaaagttatcagatggaacttttaaagactccaaggctgaaacagaggtaaactttaaaaaataacttttaagagatgtcaacttgtagctgtgttgaaatagtgaatgctgtgcgctccccgggtccactgaggcatggaaggagcacatggtctgggcctatctgtaataggtccattttatttggttgtaaaagtaatcagttaaatgctttacctcctggtaaaatagatgggtgtgtgtattctctgattttctgtggggcactcctgggtttacttatgcctttatatgacaagtgtgatatgtggtgtgatagggctgtcattttggggagaagggggaggtggcactcaggatgagtctggaagaggcaggcgtaagtcaccagacagacggggccagtgggagggacccctccaacctctggttggcctgttcaggactccgcgatgcatttcctggggctgggtatggtagaagctcatcatctccacgtgggccgtcttgtggaggttacactcatcccaagcagtaggggccactgagaggttgaagccaactttcgtaatccaatttgcatttcaggaggtcttcaggaggttgcagggagatgggttaggcatagagtagaggctgggaggccagttaggggagagaggtggtgagactggaactgtgccagtggagggaggaataggatgtgctgtttcctttgatttgtgttctgtttaaatatatgtaaatttttaccttctgagttgcttacaagtgcatttaagtaattaagtatatagcaacagaagtggagtcctcataagcacatccaataagacagtgtttctcaaagtgtggggagcagattgttgacctttttagggctgtacagaatgatggaattctaaatatagtgtgaaaagggttttggcctccgtgtaattcacagtctcaggtcttgagtccttagtagtattgagtttttaaagcatatgggcactattgctggatttcatacttgttcttcctcaagaagagcttgaaaaataaacctgcttatgatactgctgtgtaatacatcaattaatttcttttcattcttttttctttaagactgagatttccactagagcttccaagtcattgacaacaaaaacatcaaaacggcgatccaaaaattcagtggaaggtactgcaaaacttatatatgtagctgaaaatatggatattagttttttttttttttgtcttaatctcaatgtctagtaggaaagaactcctatggctggaaaacagacttgctgtgtctgggaatgaacagcgtgtggaaataatgaagatttgtggctgttacatacacatgcgtgtgtgcacaagtgtgtgaactgatgacatcagggcagagtagcccctctttgctggagatctgtgttgaaatctaaaagttgtgatcaaattttcattttccagaaatacttatcagccatcttcatttcagtagttctgtcctttgcgttggcagtctgcatttaatcctgatgcaggttggatatagagcatgtaggcagataatgtttatgtgtttaaaaactgcagaaattatgattggaagccatgctaaaagccgaatgtacaggcctggcctgcggtccgctgaaggatagtaccttatcatcttgcctaacataagagtgtcaggcaaatgcagggaagccctgttggaggccactggcattggaggcttatttttcattgaagtatgaagttactttgaatgagcagtgctagtttctgaaaaatcatccttttcctaaagtgtgtaagttaaagaagggtggcaagatgtagtagtgggaattttcgccttagaaaggaggcttagatggtaggttccacatgtgcacaataattagtaatgcgtttgtgaccagcttagtgccagaagcctttgctgtcttttggttgaccgctgtggggtaggtttccagaagcgcagtggctggcacaaagggtgtggcattatggctactgcgtgcccttaatgacccttcaccccacaccttctccagtgttgttaaggcatgctgattttgatggacgaaaaacaaaaacgttgatgaccagtgaaatggtccttgtcatcgcgtgtgagtgttttgggcgtctctgacctgcctgttctttggtttctctgggttcttactgatttgcttgcacgtgctgtatgttaaggacatctgccaatttgccagtttttgcatgagtgtttctttttcagtttgtttctactaattatatttggtttggtttctgatttgcctaagtgttaaactgttatgtgcttgaggcctctaatcttttttttggtaatctgtccagagatttgagaggtgaagatttgtgctttatcatacatttttttttacttaatttcttatgttatctcttactttaattcatggtataaggtgaggctctgaatctattttgtcagaataatccatccgtggttccaggatcacttattcattgaatgcttctctcctgctctgtgaagccttttgtagtctgggttacgggcttttttgtgtgtggtgttttttacttccacttttttatttttactattagttttctatcattgttcttttccaaaaagttttaagccatcttatttgcttattcttccggatgaattttaaaaactcttcatgactcaagaattccactcttgcaaaataaactaacgtctcagaatttaactggacttgtgttaaatatatgctttcattagtttaggaagtttaggcacctctaacttcagcttagtgaaggtgtccccctcttctgagaacacgttgcgtgtacttggttgcgtatgttggtcacagtggttgctcgctggtttattttattttattttatttatttatttatttatttatttatttatttatttatttatttattttgaga

SEQ ID NO: 8727 - DNA, 6000 bp, Homo sapiens
tgcagagacacacataggctcaaaataaagggatggaggaagatctaccaagccaatggaaaacaaaaaaaggcaggggttgcaatcctagtctctgataaaacagactttaaaccaacaaagatcaaaagagacaaagaaggccattacataatggtaaaaggatcaattcaacaagaagagctaactatcctaaatatatatgcacccaatacaggagcacccagattcataaagcaagtccttagagacctacaaagagacttagactcccacacaataataatgggagactttaacaccccactgtcaacattagacagaaagttaacaaggatatccaggaattgaactcagctctgcaccaagcagacctaatagatatctacagaactctctaccccaaatcaacagaatatacattcttctcagcaccacattgcacttattccaaaattgaccacttagttggaagtaaagcactcctcagcaaatgtaaaagaacagaaattataacaaactgtgtttcagaccacagtgcaatcaaactagaactcaggattaagaaactcactcaaaaccgctcaactacatggaaactgaacaacctgctccagaatgactactgggtacataacgaaatgaaggcagaaataaagatgttctttgaaaccaacgagaacaaagacacaacataccagaatctctgggacacattcaaagcagtgtgtagagggaaatttatagcactaaatgcccacaagagaaagcaggaaagacctaaaattgacaccctaacatcacaactaaaagaactagagaagcaagagcaaacacatttaaaagctagcagaaggcaagaaataactaagatcagagcagaactgaaggaaatagagacacaaaaaacccttcaaaaattcgatgaatccaggagctggttttttgaaaagatcaacaaaattgatagaccgttagcaagactaattaagaagaaaagagagaagaatcaaatagatgcaataaaaaatgataaaggggatatcaccactgatcccacagaaatacaaactaccatcagagaatactataaacacctctacgcaaataaactagaaaatctagaagaaatggataagttcctcgacacatacaccctcccaagactaaaccaggaagaagttgaatctctgaatagaccaataacaggatctgaattgaggcaacaattaatagcttactaaccaaaaaaagtccaggaccagactgattcacagccgaattctaccagaggtacaaggaggagctggtaccattccttctgaaactattctaatcaatagaaaaagagggaatcctccttaactcattttatgacgccagcatcatcctgataccaaagcctggcagagacacaacaaaaaaagagaattttagaccaatatccctgatgtacatcgatgcaaaaatcctcaataaaatactggcaaccaaatccagcagcacatcaaaaagcttatccaccatgatcaagtgggtttcatccctgggatgcaaggctggttcaacatatgcaaatcaataaacgtaatccagcatataaacagaaccaacgacaaaaactacaattatctcaatagatgcagaaaaggcctttgacaaaattcaacagcccttcatgctaaaaactctcaataagttaggtattgatgggacgcatctcaaaataataagagctatctatgaccaatatcatactgaatgggcaaaaactggaagcattccctttgaaaactggcacaaggcagggatgccctctctcaccactcctattcaacatagtgttggaagttctggtcagggcaatcagacaggagaaggaaataaagggtattcaattaggaaaagaggaagtcaaattgtccctgtttgcagatgacatgattgtatgtctagaaaaccccatcatctcagcccaaaatctccttaagctgatgggcaacttcagcaaagtctcaggatacaaaatcaatgtacaaaaatcacaagcagtcttatacaccaataacagacaaacagagagccaaataatgagtgaactttcattcacaattgcttcaaagagaataaaatacctaggaatccaacttacaagggatgtgaaggacctcttcaaggagaactacaaaccactgctcgaggaaataaaagaggatacaaacaaatggaagaacattccatgctcatgggtaggaagaatcaatatcgtgaaaatggccatactgcccaaggtaatttatagattcaatgccatccctatcaagctaccaatgactttcttcacacaattggaagaaactactttaaagttcatagggaaccaaaaaagagcctgcattgccaagtgaatcctaagccaaaagaacaaagctggaggcatcacactacctgacttcaaactatattacaaggctacagtaatcaaaacagcatggtactggtaccaaaacagagatatagatcaaaggaacagaacagagccctcagaaataatgccacgtatctacaaccatctgatctttgacaaacctgacaaaaatgagaaatggggaaaggattccctatttaataaatggtgctgggaaaactggctagccatatgtagaaagctgaaactggatctcttccttacaccttatacaaaaatcaattcaagatggattaaagacttaaatgttagacctaaaaccataaaaaccctacaagaaaacataggcaataccattcaggacataggcaggggcaaggacttcatgtctaaaacaccaaaagcaatggcaacaaaagccaaaattgacaaatgggatctaattaaactaaagagcttctgcacagcaaaagaaactaccatcagagtgaacaggcaacctacagaatgggagaaaatttttgcaatctactcatctgacaaagggctaatatccagaatctacaatgaactcaaacaaatctacaaggaaaaaacaaacagccccatcaaaaagtgggcaaaggatatgaacagacacttctcacaagaagacatttatgcagccaaaagacacatgaaaaaatgctcatcatcactggccatcagagaaatgcaaatcaaaaccacagtgagataccatctcacaccagttagaatggtgatcattaaaaagtcaggaaacaacaggtgctggagaggatgtgcagaaataggaacacttttacactgttggtgggactgtaaactagttcaaccattgtggaagtcagtgtggcgattcctcagggatcttgaactagaaataccgtttgacccagcaatcccattactgggtatatacccaaaggattataaatcatgctgctataaagacacatgcacacatatgtttattgcggcactattcacaatagcaaagacttggaaccaagccaaatgtccaacaatgatagactggattaagaaaatgtggcacatatacaccatggaatagtatgcagccataaaaatgatgagttcatgtcctttgtagggacatggatgaagctggaaaccatcattctcagcaaactatctcaaggacaaaaaaccaaacaccgcatgttctcactcataggtgggaattgaacaatgagaacacatggacacaggaaggggaacatcacacactggggcctgttttggggtgggcagaagggggagggatagcattaggagatatacctaatgttaaaagacgagttgatgggtgcagcacaccaacatggcacatgtatacatatgtaactaacctgcacattgtgcacatgtaccctaaaacttaaagtataataattaaaaaaaaaaagaaaaaaacaaaacaaaacaaaaaagaaattttgaggctgggcatggtggctcatgcctgtaatcccagcactttgggcggccgaggctcgcagatcacttgaagtcaggagtttgagaccagcctgggcaacgtggtgaaatctcgtctctactaaaaatacaaaaatcagctggacgtggtggtgcccacctgtaatcccagctacttgggagtctgaggcaggagaatgtcttgaacccgggaggttgcagtgtgccgagatcacgcctctgtactccagcctgggcagcagagtgagactccatctcaaaagacattttgagaagagtcataaatcagggcaaatatgtgtatacttcgtgcaatacatattcccctggaaaaaagtcgtcataaatacaaaaggacctgtgaaatatgcctccattaacgtaaaatacaactctttcatggggctaaatgcctaccctagaactgctcactactcaataggattgtgctgtgtgtgacagaacgagagtgtgaatgggtcagtaagagtgtactttatataaaaaaaagtattccttaggagagttttggataaatggactgaatgttctttcatttatgaggcttttgctcaggaagccagtgatgccaagtacgcacaggaaaaccatctgctaaaggtcaaagggatgggtgagctgctacatacaagaccctgtcttgatgcggctctgcagagtcacagcaccagcatatttctcctcttccttacctggaagactgcagatgccttaaatcatccagaatccaacaacatgttttccaaaaacaatagagctacgcctattgtgaaatctcagggacgacagaaaactccacatatgcccacactataccactgccacagcaagtttttatttttgtaaagtaatgatcaatttatgtataaatgattacagtatttgagatccaagatccttggaaaatctgatgttgcaatcaaaacataattgagctattttggaataggaagtctatttgttcttcaaaatgcataagtatctaaaaattaaatgatgacccatttagccatcttgtttagtgcactgttgcttcaccacaatttttttaaggattggctctaagtagactttcctgtttgatggaaagtttctgtattctgaaaccattccccagcccaaccaaggggtgtgtgtgtgtgtgtgtgtgtgtgtgtgtgtgtgtgtgtttgttagggtcaaatgaacattgtcagcagtgatgaattaattaatttcctcaagttacctcacaatccatctgcacatcaatcattttttgcagcctaaataacacatgtgtaggtactattattttttccaatgtgaatatatacctttgtgataaaaaaatactaatttatttaaaagtgttgtcaacttcattgtacatttttgttattgctatttttcaatccaccgattaaaaaaacatagcaactctctatgggcaatcagaacattttaaacattaagaaagagctgtccttcttggattacatgcgttgctctaacctggggtaatgtatttcaagagttactaataaaataattgtaacaagggcttaatagggacatgtaatacgatggagatataatagatataataggattttcaattacgaatgagttccattataagaatcattaagccatttggttatattaagatgaaatgtgtaggcttagccccaaagtaaaacatttgcaaaacaataggtattaactctggggataaaagtgaaattgtgcgaggagctggtggtgcacagggatttcttttcattctctagacctctgtattgtttgaggtgtttacaacaatcatgcattcaaatattactttataatttaaaaaatgataaaaaacaaccacacaaaatgagatcaatagcctatttgggggccagtgaggtgctggctccagggcccctctctcagtctgttttcttccacaaggcttaagttcagatgctgagaatgttttcattccttgtaacttcagaggctgccccccaaattgacaatcatgttcaccacatgctaagtccgtgtgctggacacttcac

SEQ ID NO: 8728 - DNA, 6000 bp, Homo sapiens
gatacttcaaaaatacttcagaatcaaatctgtaagaaaaaaaaattcaattatttatgttcattatattacaagtgatttaaaaactggttatctgtgcatcaaaaaatgcaagcctatagcagctctgattcagtgaattccagttgcggggaggggaggagccctcagatatttttatatcatatttgaaaaaaatggctgattattatttttttaatttatggaatgtatggactttaccagagtttcaaaagtccactttagtacctataagatattttgaaatcagttggccaattcttgccatcaaaaaattgtaactttaaacttgcagaaaaactagttggctctagtcctaaaagagagttcttaattgcagtttctgcatttatttgtctaatagcaaataaatttcacattcatttctgactccctttcaaaagggcaggttaatctcaaaaggaaatatatgagtttatcattttcggctaggatatggtttctatttctaaaatagtggcacagtgttggtgaatgctttgtgagagcaaggaattggtagtagatttttgcagaatgctgcatttaccaaaagaaaaaaaaaaaccactaggaaattgacatctacaaaagcaaagtacttaagtagtaaattacatttaccaaggatcacatcagtagtgtgctttatctgattattccaatcaaaagggggcaaagtcaggatttgtagtgatacagtggtcctgtagatctaaaatcttaaggtctgagtttaaatccaaactctagcatttgctatctgtgttgggatcactccccgacttcatcagaagacctgctaacatctagacttgtctgttgtcaccaccatctcctttgggataccacctcaaggtactcaagttcgcctccagcctccaattcctttcctgcggtgggaagagaggggagacccagcttcatgttgctcagtgactatagattcccaaacaaatgacaggggaatttagaaacatttctgccttaaaactcaaatgtcatttataactctaaacaagggaatctggaactcaaaacataatgatttggtcatcactttgggaaatttttggctaaaaattaagaatggtttccttctccttggcaggcataaagttaattaataaattctcttcataaggcagctggttaaagtttcagaactccacaactccaggagatacacatttgaaagaatatttttgataaccaattacctttattttctatgcaagaaaatattaaagaatattcagatactaattacactaattcctcagccttctgataatgagatagttctctctttgaactctttcaagatctaatggcatcgagagactctcctttatgtcgtaaaactaacagacaaaattacctggcccagctttttccacctgagtgacctcacgctctctttaatacccaaaatctattgacagagattatgtcccattataatattcccttttatgttttggcactgagcagtgcaactgacagagctataacaaagtaacaaccacattcacaggacagagacggagtcttacagagacggagtcttacaaagactaaatgacatcttacgccttcattctcttttccttgttaggaactctcataaaaaagccacagccatgccccctcagcctgtttagcaggttcatgcattacagattgaagtattgtcacctaggaagtaggcagctaattttttccagcttctgaaacaagattacaaaggggttcctggaatggctaactttaccaacgggggcagaggaagattagtttttcattttttgaagttggaaacgtaacagtgagaaagagacaaaattatctctcaataaattaatctacaaaaaaataaataaaatgcaaagctggttccacagggagtttacattctgggagccaaataagatacatatataaaactcttagaacaaggtcaaatgggataagtgtagtagtgacatagggtagcacagagttttgttttaatatcttctgctaactttaaaaaataaatatgtgattttaagtgcatattacactaatttaataaaaatctcatattttgcctttatgctcagtctgaaacatggaagatttaaagttactaatactgtaaaactgcttcagctctgacgaatgaagtatctgtgtacagaatgatgagttgttagttaatagtactctttgggccatgcttgggatattggccttttctaggagtctgtatgagaatagtcatttatctccttatgctcaatgctttcaacttgtcaaatgaccatgtttcataagatacaacataaaattgttctataattaacaaaagaaaaaagaattctatctgctgagaaaatagaaaagacgttggagaagagagaatatttgacccagacatttaaaatatccgccgaatttgctatgtgtagatggatgaaaggtctgccaagagaagtgaaggttgtgaacaaagacatggaggcggaagaaaggtagtgtgcacactgaatgcgttgtgcctttccatatgactgacatgtcaatgtaaactccacaaagggagggttttgatctggtttgtttgccgatgttacttaagtatctggaaaagtgcctggcatatatcaggtgcatgaagaagtgaataaatgaagtgtcagatgcccagaatatgaataatacttgatagatgcagtactggcaactttcttgaagctaatgaagtggttaggactccatagttcaacagaaaccaagttcacttaagcaaacatggagtttgagtttatcatgggactcaacatcaagaaagtgtttggatcttgagtagactggagatggaaacagtctgtctctgtcttttgtcacttcttcctccacatctgtgtggctggctgctatttcagtatcctggtccacctggtcctgagtccccatggtgagggaaagctgactccatagctgccagaatcacatgtagtggctctctttgaccaggtcagctgcgtagataccctctcttgctccagtcctctgtagcaagagggtaggtttaccactaaggatcaggggagaagaactattgggggaattgttaagagcagacactcagaaaaattggcacctataatatgcaattagaattcattaaaacatgtggccaggtatgttcttattttgtgtttttacatatctaatctctaagtactattcatatggaatgtattattctaaaaaaattgcctgttagttcatgcagttcccactctcttttcatctctaacatcttggcaatcgtttaccagttgttgatcacctgtctcctcatcttctttcaactttgccctgactctaccagatactgggcaacatcatttcccagacattgagtaacttcaaatgaatgtgttcatgctactccaactggcttttgggaaagcactggatagagtttttgagctggaacaggaaattatcttacttaatttctttcttttatagataaaaagatggatccacaagatggacccattggtccataattaagggctagtaaatgttttgtaaacatagaaatcaaaattacttttctgtgattctagaacaggaaaaaatggtgaacttttaggtatgttgcaaagaacagtggattattctttgggctcttgggaccaacagccttagttttattgctttgcaagctatgtggtcttgaataaacctcagtaaggctcagaaagcttcagtgttctcaagtataaataggaataattataatataataacattaatagtatttatctcaccatcctgtaataaggaagagaaggattaaatattgaaggttatattgataaatgataaaacacatgcaatgattgtaataagtgtgttagatggcaaaagaaaaataatgaggatgaaatatttacttccaatgactaatctacacataatcgtgattttatgtatgactgaatgtttaaggctgattccattttagaatacaatatataacataaaaagctctactctcagttccaagagttataattagtttggcatggatttttattgtcttagaaaaaactgatattcatggtttttataattctatctttgggtaataggcaattggactctctttctatatatatttgcttattaaaatgtgttattataattaagctttaggctgtgtccacaagatgggaaaacattggagtaaaatatagtaaaaccatagaaattgagagtgggttgaaagtcttgtttaatctgtaattacagatgaagatagtaagaatgtaaatgtccatagaagacttcagtggctttgttaaaggcatgtgttcatcagtgttgaagtaaaactcacattttgtgactctgagctgttcactataatatgaaacctaatcctaaaacacaatattaaaacagaaaaatgtgaagccatagatctgtaataaagggccacctgattgtttcctggtggaataaaaagacagttttatttataagatatatcatttttatagataacaatgattcatattaggaataaagtaacagtttcaaactaaaataatgctaaagtttttcaagtactacttgaaaatagctatatttactttcaaaccttttcctctttgagtcattaggttcatgatattatatagcaatagggaatgaaagagaagcaaggagaagcaatactgggagattacagagaagaaaggaaaaaaggctgagagaaaagaggttgaggaagaaatcataaatctggattgtgagaaagtgtttaatatttagccactagatggcgatgtaatgtaaggtgctgtcttgactttttttttttttttttgaaacaagctatttgctgatttgtattaggtaccatagagtgaggcgaggatgaagccgagaggatactgcagaggtctctggtgcatgtgtgtatgtgtgcgtttgtgtgtgtttgtgtgtctgtgtgttctgccccagtgagactgcagcccttgtaaatactttgacaccttttgcaagaaggaatctgaacaattgcaactgaaggcacattgttatcatctcgtctttgggtgatgctgttcctcactgcagatggataattttccttttaatcaggtaagccatctaattgtttcatcttgattttaagtttattcattccagttattcctttggaaaaagagtccatggaaattcagtttgggcagagcaggaagtccatttttgtatgtgtattcagaccaactgtccccctcctccctctcctcctcttctcctcccctcccctcccccctcctctctcaaccttccatgaactgaaatcaggtttgttttgcagttcagcattttgatagaagatgggattctttggcctgaaatagcttggcatctggccagttcttgcctttgcttgccttcatcctattcaaggtcccttttgatcctgttgaagccccctccttcactggtgctttggaagtggactagctggctgggaatagaggtcatattgttcttaaggacggagcaaaaattagatctcagttttaactccacaggaagaaagaaggcagcggggctgctgctggagcctagcattgcaggggtattcagcttcctgaggctgaggctgggcttttgagaagaaatgcctcatgccttgaacaaggaaggggcaatgatttccgccccccacctctgccaactcctattgagccacactaaaaaagagcttgagcagagtggtaaagagtccccttttctatccaatgccaaataggaaacattgacttacttttacttagacagaggtcacaaccagcaatgatactgcagatactgctcagttcctagtgtgaaccgtcttgcttttcagaacagcataagaattatttctga

SEQ ID NO: 8729 - DNA, 6000 bp, Homo sapiens
gactggggaggataaaatattactatccctgtgtgaggtccaagaatttttaacctgctacttaagattacagtcatgtcagtcatgtgccagataacacttcagtcaaggacagactgcatatatgatggtggtcccacagattataatactgtatttttactgtaacttttctatgtttaggtatgattagacacaaaaataccactgtgttacaattgtctcagtacagtaacatgttgtacaggtttatagcctagaagcaataggctataccataaagactaagtatgtagtagactataccatctaggtttgtgtaagtactgtctctatgatgttaaaattgcctagtgacacatttctcggtacatatctccattgttaggcaatgcatgactgtagttctttctctggcttagggtatttttgttttcacacaattgcagaatgctgtcaagcaaaaacttgaggtctctttctacagatctctggtatactctctgttcagctcccttgtcttaggtgtcctgtcccaaataaacaaattctagctccctcagcctatcaaactcttattttctggctcttcatgtttccatcttcctgagctgtggtttagaaactttgtgtagtatgcagagacaatcacagcctcactttctttctcttctctagggatcactgtcttatagataatgttgcccaatgactgaaaactagtgtttcatatattttgtccccttatctaatggaagacttctacaagggaatgtcgataacaatagttttgatcaaaaataactccacagaaagcacattatcagcaaaaccattgttagggtaagggacccatcagtggactatgacactggggaaaattcttcaggaataagtaatcaattaatatacttactaagcatctactacatgcaagacaaaacatttatttttcttcacatcagttttctggccaaaaaaatccagaccacgtcaaattagacgagcaaacactcagatgccaatacatttaggaaacctcttttcttcagttgtttcattaagcatcatttgcccatctcatcactccaatctatgtctgataatcttcattgtatattctatttctttttagttataatttgaagttctacttttgaatcctactttttagctatgtatacacaaaacttgtaactttattcttctattttcacaacagaataattgttttttcttactttgtaatattgccgtgcagccaatattagaaggtaaaagtatttttctaatcctatttaattagagaaaaacaaactctttcagtattgtattaattttattgccttaatattactgtctattttttgttcttccagaaacttctacagttttgaaaattgcagtggcaattgtggaaaatacagaagtgtggatatccatttatttctcactaagggaaataaaattcttattcctattctggtatggattgtatgatgttagttaatttccatgactcaacatttccacatttttctatctaagttacggaaggtcagttgtaaatatgattaggaacttattggttattggctttttcaaccagacaggctttgtctggttcccttaattcaagcctaccctttaaattttaaacgtaccatctacttatgtctacatctgacgctgtcatttagtgtttaatgaactctcaaggctgtgcagtgtagtatttaataagaaatttggaaagatactttttctgggtttaaaccaagataaaatttctagggctgccaaaagagcaagaaaaacacaaacagctaatgttctgtagactaggaatggcacataaaagaaatggaaaggaaataaatagttggaacatgaaagaaaattgggaaaataatgaataatatacctaatgctttgcctatgagctcacagggaaaatcctgcaagggatccctcagtcagaccaagaggattttatttttggttttatcattttccaggattttatgtttgaagatctctaacaagaacctagatatattgagaatagtaagttcttgttaatggatgcttaaagtggaatatataatatgttatatattatatacaacatatgtattatacataacatatattataacataatatagtaatataatatataacatgttataatatataggttatatataatgtataatgcattatatattccactctaagaatgtatctaacatatgtgttattctagatataacagcaaaggcataatctataagagacataattgctaaggtgaactgcattaaaattaaaaacttctgctctgcaaaaacggacaacaagccagtgttagataaatatttgcaaaagacacatctgacaaatgactgttaaccaaaatatacaaataaagcttaaaactcaacaacaagaaaagaaataacccaatgaaaaaaatgggccatataccttaacagaccaaagaagatgcacatattgcaaataagcatataaaaaggtgatccacatcatatatcacaggggaaatgcaaatcaaataacacttatggtatcaacaatgggcatgagataccaccacatatgtattggaataaccaaaatccagaacactgatgatatcaagttctggccaaggatgtgaggcaacaggaactctcatgtattgctggtgggaatgcaaaatgctccagccactttgaggacagtgtagcagtttctttaaaaactaaacatactctcaccatatgatccagcaattgtgctccttgatgttcacccaaaggacttgaaaacatgtccacacagtaaccttcacaaagatgtttatagaggctttacgcataattgctaaaacttggaagcaaacaagatgtccttcagtaggtgaatgaataaactatggtaccaccagtcaatggaatattattcagcactgtaaagaaatgagctatcaagctatgaaaagccatggaggaaaactaaaagcatattgctaagtgaaaggagtcaatctgaaagggctatattctgtattattgcaactataggatatcctggagaaggcaaaactataaagacagtaaaatgatcagtacttgccaggggttgaaatgggagatgaataagtggaacacagagaattcaggagagaactgaaattactctgtaagatactgtaatggtggatacatgtcattatatatttgcctaaccccatagaatggacaacaccatgagctaaccctaaatgtgaactacagaccttgggagataatgaaacctcaaagtaagttcattaattttaacaaatgtttcattctggtggggaatgttgataatgggggaggctattcttgtgtgggagtagcggttatgtgggaaatctctgtaccctcccttcagttttgctgtgaacctaaaattgctctaaaaataaaattttaaaaataaaagaatgtggcattgcttgcatctaataaaaaagaccattattcctattgcagttgaactcttcttcctatatctaccaccaatcagggaagagaaggcgatttgtccaggatatggcactgagaattatcacaagtgagctagttcaccttcattgcacagtctcagtcactgaagtttccttccttcaatagcacatcttacaagtcaagaatgtaaggtccaaagccccaggacaaatctcagaagcaaagaaagcagcagggaaaagtagaccctgggatttgatttccttccggttatctctaagcatcatttccatgatagaaggtgtggaagcaaataataaaagtgcccgtcactagtgtttatcctgcaaagtggtctgcccttttgagaggcaccctgccctatggccatcctttgatttcttcccttggtggaaatttcctgtttctctttgagaaagataattcaaccctgtttccattgttcttcctcccaggctgctgtaggaaagcgcacgcacacactccacacaaaatgaatttttaaaaaatttattttcacagtcgctcctaccagctctgaaattcagaacccatatgactgatggcatattcagataatcgggtcccaggtctggaaaagcagccttttccccacgtttctttccccacctaggacctcctctgattcttcactgcatcttcgaaagaaaatgtattatttgcttgcctggaagacgctgcaattcaattgattttatatatacatatatataaagaaaacagaaaacatagcctagataccggtcttgagcgtcaccgccccactcgcggttgtgagcaaagccctacggaagaaaccaattcccagcctagactcttcagagcccaaggtcggggaggcgctggcctggcggtgttgtctggctccccagccactgccccagactcagggctttgccattggtccccacctcctctgctccggagtttttctccagctccccaccaagccacacaaagtgacttctcggaaacattagccgattctgctgagcaggaagggaggaaagggatgatgggggcgggggtgagataagggaagggctcttctggctgctggacacacacacacacacactcaaacacacacacgccccacccaatgggtggccgtggatggcaggtcgtgcaaccccctcctccgccttctattagcgcatggtgcagaggctacagcgtcgccaccaccgcgcccctagctgggtccccgccctgcgccgcccgcaggagtggagagagggagggagggagggagcaaggggtggggacccgggcgcgctgggaggagtggaggaggcaaagcggcgcagctgccctcggggaggcggggctgctacctccacgggcgcgccctggcaggaggggcgcagtctgcttgcaggcggtcgccagcgctccagcggcggctgtcggctttccaattccgccagctcggctgaggctgggctagcctgggtgccagtggctgctagcggcaggcgtcccctgagcaacaggagcccagagaaaaagaagcagccctgagagagcgccggggaaggagaggcccgcgccctctcctggagccagattctgcaggtgcactgggtggggatgatcggcgggctaggttgcaagtaagtgccttttcttttgctgcttctgtggggaggggaggagaagccctcggtctttcgcccgtgctcgcctcaaccgccacacccacctgtgtctattttcacatctcggttctggaaccctgtattacgccacctggaaagaagagaggggagaagcttgaccgggtggttccagcaatgggaggaagaagggctggaagcgtagttatttcgatagctgggcagctcctgtgcggttttgactctgtgggtttgctgccaggttctgaaactgtggaaaggaagggtagcaatgcctggtggtttactgtcttttatttctgtttacgctagcagagttgttagatggacttcaattcaaggggcagctcacattttttacgagcaaaaagcatgtgctgtatttcccatctgcaaagctgagcgtgcagaaccagcttagcagatacaacctgtggggacagaaaagaaccccgcaccccttaagagcacacaaacacaaataattgacaggacagctctgcccctatttctcagcgcagattatttatttattttttcgaataagcactttatagtgaaattcagaaaagatgcagaatccttttaactttttatcgaattcaacttgggaaactcatttacttttaggaaaaaatggatattttcgtgccttatattcaagacaaaaatcagaacaagaaactagaaacattaatgccagtttttgtgattatagtaaacatttcactcattattttagttttttttttttaagttggagcgttcatagattatatctactctgatgttaagag

SEQ ID NO: 8730 - DNA, 6000 bp, Homo sapiens
tcataattttctctgtaacacaactaaattgtttcaaattttctcatttctaaaagcaattattttccttgggataaatttctttctttttttttttttttgagatggagtctcactctgtcgcccaggctggagtgcagtggcccgatctcggctcactgtaagctccgcctcccgggttcacgccattctcctgcctcaggctcccgagtagctgggactacaggcgcccgccactgcacccagctaattttttgtatttttagtagagacggggtttcaccgtgttagccaggatggtctcaatctcctgacctcgtgatccgcccgcctcggcctcccaaagtgctgggattacaggcatgagccaccgcacccggcctccttgggataaatttgtttccattttttggataaagattatctcaattcatatctttttttttttttttttttttttttttttttttttgagacagagtctttctccgtcacccaggctggagtacagtggtgcagtggtgcgatctcggctcactgcaacctttgactcccaggttcaagcaattcctctgcctcagtctcctgagtagctgggattacaggtgcctgccaccaagtccagctaatttttttgtatttttagtagagacagggtttcactgtattagccaggatggtctcgatctcctgacctcgtgatccacccgcctcagcctcccaaagtgctgggattggaggcatgagccaccatgcctggtccattgtatttgttttttaacagctttactgagatgtaactcacataccatacacttcattcatttaaagtgtacaattcaatgctttttagtatatttacagagctgtgcaatcatcaccacaatcaactttagaacatttttatcacttccaaaagaaaccccatccccattagcagacactaccattctcctgaacccccacccctaagcaaccactaagtgttttgtctttatagatttgtctattctggatattttatacaaacggaatcatacagtatgtggtcctttgtgactggcttctttcatttagtatgttttcaagatttatgcacattgtagtatatattagtacttcattccttcttattgccaaatatgtcattgtatatactacattttatttattattaatcaattaatggacttacagattgatcactttctactttttggctattatgaatggtgctgctatgaatattcatgtacaagtttttgtgaaggtacatttttgtttatcttcttgggtatatacctaggagtggagttgccaactggttccatttgaccttacctaattttctgggttaacactcctatattgtgtttatgtgcgtgcatgtgtgtgtgtgtgtgtgtgtgtgtgtgtgtgtgtgtgtatggcagaaagacacacagagagagacagaaaagagaaagagaggccgtacctatttgcgtgtcttatctgaaatttttgcatgcatagcagattcaataatcatggagttgaaaagatggcatcaaagtgattggctcaaaacatcctacaaaggaaaaactttctggaaaaaatgtctaacttgagttgagctggtttttgtaaagagctggagagaagagagaagatagtgctgtagtaggggccacagcacaagtaaaggcctggtgattgggctggatatagagtacttggggaataagtaaaagttagtagaaggagaggctggaatgatttgttaggaatcacctcatcaaggtctttgaatggcagcctcaagggtttaaagactacatttttatagctttaggggagccattggagactgtggtttagatacttcaatcacatgatcatatcagatgggcatgatcacagcgatgactggcaggtgcaggcaggatggacctaagcggggagacactaagcaagcccttgtccttaggagtctattgcagcaattcagggctgaggtaaaggctctgagcatagccagctggaagtcagtagcttaaatattgatttagtgggcaaaagccgcatttatcacggggctggttccctaaaaatcctgtgcctatgtgcagggaactcatcatttccctattacacaaattgattaggtcattcggagctgagattgatgccagagatttgctgctaatcaagctagaatagcaagttggaggacaagacaggccttctgccaactgggcaaggaactggtcccagaggcagagaatactgcagcgaagcaccctgtgtttgcttgggaagtctgggcaaagatagcctctgagaggcctggcaatgcccttcagttacatctggagtctccagggcaactcctagaatgacacatctcagggcttctgtcaagagctgaccagccaagcggaatccagccccagaggtccatgacagggctgtcctcactgtgtactgaagctgttaagagtgggggtactgggggaacagggcctagggcagcatctgtggagagtccaggggagccaaagccttggagaaagagttgactgttttggcaataataacaatagtctgcaataacaaaaatttgtgtttgtatacaccttctgctgtgctccagaaaagagggaggttcgactttcttggtggataagatattctccccctcacacaacgataccctaggcccattgtaagaagagccctgcaaaactagccacatgccatccagtgccaggaagcctagttctgaaatggtggtggtggagtttccacccatctgtccctaccacagagggaagtgtacttggctccatctataaactgaggcagcatatctgggaagaaccaaatctccagagcaccctggtttgggacaatcaacaccccaagtcaaatgcctttcagctttcagcagctctcctgtctgcgaccggccctagtttcgaaggcgggaaatgctcagtgagtagtggagggaacacttttagtactatgacccgtaattgactgacgctgctgccaccactttgggttgaccttagcccgggattggaaatgggcggtagggcagggggcaggggtctgctttttgccaccgctcacccacctgggatatctaagtacagtcaccattattatttttattttctgccatcatatcatcaccagggtcttgcttcccgcagtccatagtaagcgggaggacagggaaggagctggctgcccgaagaggatgattttccgcctgtactgagggtgttccacgccagaacttttgtggccccggcaaagccggcttgtgtccagcagaggagcacccgcagccgcgcggggcatccgtcgtcttttcctgccgcggtggggcgtaggggggcgaccatttcccaggggcgttccatagcacaccgttccccgcgccggcctcaggggagctgccagtgagcttcccctacacctcctctattcctctactctctaccgcacccagggtgttattccccgccccgggctagaggggtcggtgagctggggtggcgcgaggagcccggcagtccgccgggcctgggctctttctccctgtggcaccttggccccctacccgcgcttgactcctcccccgtctctattccgcagcgtccccgccctgtcagcagcctgcttcagcgaccgcacctgcctcgggtggcgggtaggggggtgcacacgggaggtagaaaggaaaacagggaaggtttggggtgcacagcacagcggggtgagcagccttgcccgcgcctcggacccctggcagccctagcggcgcccgcccgcggctgcggcaccgatgcgctgtccgcggtgctgacgccggccgcccgctcggtcgggagggggagcaaacgccctcgttcccaggtcgcccggagcccagcgaccgcctctccccgattccccgtttccagtggaacccgctgcgtcctggggctgcggttcgatccagggcaaaggagtgaacgaagggaacttaaacttcggactaacgcccgagaatccagtgtcggcgattcgcgtcgcgcggcctccagccctggagacctcagagcaccaccaacttgagcaaagtttcaccgcggcatgagataagggagagattccagaggcgaagcgcagggaggagcaagacgaggttccccggcggagtggtagcccgcaccgcagtcggacacctgctccggtgccccgcattggtgccgccagagccaccgggaggcgtcgcagcagcccaactctccaccccctccctcctgtccctactcacccctccccaacaccccgccccgggcgccagtgactccgcctctccctgccgggcggctcttcggctggagctgagaaaggagcgcttccccggactcggctcggctccgaggctctgaagccgacgccgccagctcagccccgggggcgggagcaggactgcccgcacagcccgcacctaggaggcgccgatcccgaacgcctcatgggacgcccccgggggctctctccacgccttgctgccgcgtcccggtcctaggcgcccgggatccacggcccaccccgcccgcagcccgcggcctgtctggagaggagtatgaggcccggggccccgcggacgccggccaccgggcggcaggggcctagctgcggagccccgcgcccgagagcggcgggtaaggagccgcgggagccggcgaggcgtcggggcgcgcagaggagcgcccctgcccgggcacccgctgggccacgggactcgcgtgtggcctgagcgccggggaggaggcggaggcgcccctctgtccgggctctgggaaggcgacgaggggctctgcgaaggcggcgaggggctccgcggcggccccggacccctggccaccatcctcacgctcctgctcccgccggggggatgtcgtggcccgggccccgagcgccgccccggccccggggctgagctccggaccatgtcctcccgcagcccccggcccccgccccgccgtagccgccgccgcctgccgcgcccctcctgctgctgctgctgctgccgccgttcgcacctcaacgaggacaccggccgcttcgtgctgctggcggcgctcatcggcctctacctggtggcgggtgccacagtcttctcggcgctcgagagccccggcgaggcggaggcgcgggcgcgctggggcgccacgctgcgcaacttcagcgctgcgcacggcgtggccgagccagagctgcgcgccttcctccggcactacgaggccgcgctggccgccggcgtccgcgccgacgcgctgcgcccgcgctgggacttccccggcgccttctacttcgtgggcaccgtggtgtcaaccataggtgagcggcgcgtcccccgcgcatctttcctctctgtgcctttcacctgccgccctttccactgctcggccgctcggtccgcgtccctcggctctgccttcccttctaatgtccctttgcttactttcgtctcgccctcttctccgccggcccccgttctctctctctctctccctcccggctttcagtgagggaagaaagcccacctctggcgctcaccccgggccgcctgtgctccaacactggccggctctgtgatctgacctttgtgagcctccgttttctcctctaagaatacgtgccaagggctaccggttccttcctgttttccacccacaacccccaggcctcagtttcctctccaggatgatctcaaaagccccttctccctccaccctcggcgcttttatttcttttcatagtctcccccgctttcttcttttaccctgttttctccctcagtggcctctaactcctttaccctggagagggtgaccacttgccccaggatcactttccctacatctccttcccacttgcttctcctacagtctataccgccccccaaagtaaagcccgttagcctgaggccaggacttcagctgctgt

SEQ ID NO: 8731 - DNA, 6000 bp, Homo sapiens
agagaaatgagaattgcactcaggtttcttagttcaaaacgcagtcttcttttacatcattctgtcattgagtgattttagttttagaaagaaggagtggctctagtgaacacagtggaagaggatgagaattgaatgagctgttgaacccaatgaaagtggataagaatggaatttgcaggggacagccaaatttgaagatgtagattggggattgccatggatccctgctgaagagggatccagaagggggagcccataggaaggaagatatttagatagtgatgaatgaaatgaagctctaagtactcaggagggagacttttccactagtccctctcttgggtatctgagtgtctatgaaggttcttaagcttgctggtttttgtggacctgaataaggcaggatctatataatgacaataattggattttataatttttaatgttttaatcttctgtgaagaatattcccaaagtacatttgtactttgacttttgtacactcagctttcaaacatttgcagtttttcagggggttccctgtagtgttctagggtgaagagaatcagtgggccctctttaagtagcttacatgctgaagatctaagactcccattttccagtgacacagattagtctttgaatcagaaatagataatggagaagagaccgtgccttttctaccttgttttaggttatcaggtttactgcagttcagtaacaaaagttgtgacagatatcaattggattttcagtttagtctttagggtagataatttataaggataaattattgtctggctgtgccattataatgcctgtcactaattgttatgggtttaagggtgagtctgcattggatatttcataggttgggagaagtggcagcagaaataggtaactgaaatgttttctaaaatggaagccatatcttaattataccaagaaatattatttaatataaggataactgaccttcctcagactttgttttaccatttgttttggaggggacctgcatgtatagactgacggtttttgttttcttttaagaaatgaacgtgctcatttttttcatatctttttgctctgtaggtgtctctacctactggaccgttttgcacaggctgtgacaaaggataagtttgctttggaatctgaggtagagtactctcttgtgaaattaattttctcactccgaatctcattttttatattattttcttctaaaacttagcaattgtctacctatcattgttttatgttagtattaaaacttttattagagataaccattttaaagaaatagggggggttaattttaatttttttttactttgcaaataagaaatagttgataaatactttgagaggtgtgatctgaaaaaaaaattgctggaaaatacatagtgacagaaaaatgtggttctggaacgctttcccacaacagaggagatacaaattttggtctaggcttatctgagtaagtgtttttactctgagttgtatatcatatgagtatgactaataatacctctgtttaaatgaatctttgttacatcagatgacttattatgggaatcatggaatcaccctgttacacatagcatatagtttcttttcatttcttgtacacctattttaacatcatacagtatttttgcagagagctacttctttatttttattcttggttctatatatttaggctaaaataatattacaaattgtggaaatttaactagacatggtatcatgtgcctgtagtcccacctattcaagagttcaagccaggagaatttcttaatcccaggagtttaagaccaagcttggcaatacagcaagagcttatctctaatttaaaaaattgtggaatattagaaatttaaattctgttctcacatctatagtagagagggcttacactgtgttttccaagtcttttttattgagtatactttaaactctttatctaattgaagaatatgcattttgtttaaaataacaacctgtttgataagcagagactcttcatatttctatgatcagactttaatttcacaaggtttttgcattgtaattaaaaaataatccactcagggtctttgtatctcattctaagtttcaaatttcagaggcttttgtgcttagttattgaaaaaataattgtaaaactcctgcattactatgagccacttgaagctagaaaatctatttgtatgtatcttaagcacccagaataatgtcttgcatgtaagaaacattttattagtttttaatgtgaatcaacaaacagggaaatgggctttttttaaatggaatgttacaggtaacataatatgcctgagatatctaataattaaatctattaaatgtcttgaatgttctgaatttatcttttgttctaatgttgagaatctataagttgaggtgagttatcctgagaaaatatgttatagaagaaaatgaaaattggaaaagatggaaaggaaataggaaaggtggatacagcgtgttttctaatatcttccaaatggaagcttagattaggattttagattaaattttcttaaatttttaaagccccaaccatgttctattaaatacatatttttcaggacatacattactctttttttatttttttatttttttatattattatactttaagttttagggtacatgtgcacattgtgcaggttagtaacatatgtatacatgtgccatcatctagcattaggtatatctcccaatgctatccctcccccctacccccaccccacaacagtccccagagtgtgatattccccttcctgtatccatgtgatctcattgttcaattcccacctatgagtgagaatatgcggtgtttggttttttgttcttgcgatagtttactgagaatgatgatttccaatttcacccatgtccctacaaaggacatgaactcatcattttttgtggctgcatagtattccatggtgtatatgtgccacattttcttaatccagtctatcattgttggacatttgggttggttccaagtctttgctattgtgaataatgctgcaataaacatacgtgtgcatgtgtctttatagcagcatgatttatagtcctttgggtatatacccagtaatgggatggctgggtcaaatggtatttccagttctagatccctgaggaatcgccacactgacttccacaatggttgaactagtttacagtcccaccaacagtgtaaaagtgttcctatttctccacatcctctccagcacctgttgtttcctgactttttaatgattgccattctaactggtgtgagatggtatctcattgtggttttgatttgcatttctctgatggccagtgatggtgagcattttttcatgtgttttttggctgcataaatgtcttcttttgagaagtgtctgttcaaggacatacattactctttcgaattctgaataaaaattctttctccaggtgttaagttgctggaattttattgttttttttttttttttttttttcctctctctgtctctctctctctgtttgtagtaagaatgtttcagctttcaggtgaatgatcatggttaattcttgggatgtgttattttatagtaaacaaattaaactttttattacataagtatttacacaaaacaaattgtcgagtaaatgctaaccagtattattaggcatatattatgaacacaagcttttcttttaagctgatatttgattgactggtcatgtctctttttttgtttgtttctccctccttcccctttgtttaaaaataacttacctcagtctaatattttccttgcagaccgcatgtctttagtgtctattctttcatttcacctctgtttctgttgtcaggatacttagttacagctttctatttagtaactatgtgtggccttcattcatgaatcattgctccataaggtggatggttgctttgttctgtcttttttggaaggagcggaggttatacaataatttgtttttagcttttgacacacagaatagaagcaacttacactgtttaaagatagtactactaaaaactacattctcacattttttcccgcagaaagtaattcacacaaatatatatcatgcctaagtattttgaaaaataaagtgattaattgactttttattattagttttgttcagtcatactctaaattacagatgagtaaatttttgtcccagtttgttgtggttaataaaagaaactaatggatatcatagtatttgtataataatcaactggggttgaaaggagtaacattttgagaatatctgtatcaccaatcataatcatcatcccatgtgaatatgtagataagtaaatggcagacttgaggtttgaatctacatatgagtgacttcaaagtccatcctttttgtgttagatcatgtagtaatggtggcaattatcattattttaacttgctgcatgttattcttaaacctattgtgtctttcttctagaatatttcagaaccatactttacaaacagaaggactatttctcaacaatctgcagaaaagtgtaagctatttgaaacctgactattatattatctactgattcttttttttctttctttttctttcttattttttgtagacagagtgttactcaatgttgcccaggctggagtgcagtggcatgatcttgggtcactgcaacttccacctcctgggttcaagtgattctcctgcctcagcctcccgagtagctgggattacaggtgtgcaccaccacacctggctatttttgtatttttggtagagatggagtttcaccatgttggccaggctggtcttgaacacctgacctcatatgatctgcctgcatcggccccccaaactgctgggattaaagctgtgagcccccacacccggttcttatttactgattcttaattacatgcatttcatctactcttgactttgtttttactgtagtagatgctgcatgtggcattgacaaaacagaaaatggaaccttgtttgaagaccaaaatgttgataaggtaaatgaagatgtggttaaaagccaacatagaataatcagagtccagtcctgttcaccaactcactcttatctgttaatgatctttaattttacaatggtaaattgttttatttggaaaatagttttcccatgctttattcacttgccatctccctgtctttataacgatgacaaggatcctataaaggaatggaagttctcaaggtaataatagaaaagaagtgtgacaacaagggaaatatatgcatgggactaggattcctaaaaggttgtgggagtaaatgattcttaggtttgccattagggaaggaaagaagtagaaagcaacctgaaagaacagctccacaaatacaaaggtgaggaggggaaagaagtaagaatacagagttgaataagagtgtcaagatgacaaagattagtataaaacacctcaaaagcggtgaatttaaatgacagtagaatgtctccatatcatattatagaattattttaaatatagattaagaaaagaaagccaagtaattaaaaaattctcagattcttctgagtgacttacgggtgattttaataaagtattggaagaaaatttatgggtgactatatttaacattctgttttacatttaaaaatagccaggagagaataacttgaatatttctagtttaaataaaacatacatagttaaggtaatgtgtatctctgttaccctcattagattatatagatggatcaaatcatcacacgtacactgaaaatatatacatctatttattaatttaaaaattctaaatggaaagaaaatttcatcctcactttttaaaatttcagtaaagtgatgtcttatattttatctagtgaatgctgtgttcatagataatgcaaaataaaatgtgttttaggctatatcagattttgaatgaatcattactt

SEQ ID NO: 8732 - DNA, 6000 bp, Homo sapiens
tgctcttacttccaatattagagtttatttaacctgtttttatttttatctttcaagaatctggctttgttgtccaggctgcagtgaactggtatgatcatagctcactgtggcctggaactccctggctcaagtgattctcccatctctgcctcctgagtagctggacaggtgcacaccaccataccaaactaatttttatttttttcattttttttgtagagacagggtcttgccatttttcccaggctggtcttgaactcctggaggctcaagtgatcctcccacttcagccttcaaaaatgttgagattataggtttgagccaccacgcccagtcctgtttttaaatttaataatgttttgcttacataccttcttcgtcctcagcctcagatttgtgaaatccagcatatttctgtgggtagctgcagtttttcattttcatgttagtatgatactatagattcagaatacaccacaattcttatatccattctcctgttcaagatatttctgttctttcttgtttgacctgttttcaataatgcttccacaggcattcttgtacacacacacatttctgtcaggtatatgcctaagagtggcacttgctggctcacagagtagactcacgttcagttggtaatgccaaaccatttttctaagtggttatactagtttacattcctacctgaagtctctgacagcttctgtagctctagattctcacaaacagtatgataagcctttttaagttgtagccattctggtggatgtggagtggcacttcattagtccagcagaacagtagtattcctccaatcactgtctgggaaataatggtctaggaaacaagaaaattgggccagagtctgggaatcttttggtagatctatggatgttacaaaaagtattctttggctatgaagcttataaaatcaaatagaaaccagcattatagctcctacccacaaaggctctgaagaccttgagtaatcagaaacagtagacatgcacagagcaacctatgagtcccagctggaggctattagctctcttctagtgtgaatttctgtgatttatgcatgatatgtttacaacatatggtcagacaccactaaggctccagagaccttatgttggtaatcaatgactatttcaccttaaccctctcagaatccactcactgaagatttgcaaactacctgtcgttctgtctacagaaaaaaagtacgaaagtcacaatgaagttagaatcatagcaaatgataccacacctctggtcactcttcctttatataattttctacttttaatgacaagataaattagtttcttcagcaacaaagagtaaagctctctttgctggcatttatttatttttctttttttctatgaggaatatcgccacaataattatcatttacttttcttattttgttcaaaccagttctcattaaaatgtggcccagtataacctaagaaaaatcagttcctcagaagacgtcatcagaaaactctttggagcatctggatacccaaaactgagtgatagaattaatattctattaaatattactagtaatggtaaaatgagtgtggagcagtagggactggcacttaatgaacatttagttgagagacagtgagcagggctagtttgttcatgagtagagaagaaaaagttaaaagtgcctagaaaataggaatctttcatgacagaaagtgtacacaatgaaacaatgaaatgttataaatttacactaaacgtgtgagtatcaatgatctaaattagtggaagctgatttcctttgtgttctttcagcatctgacaaatgcttgtattatgagtgatcttacccgattacaactgcttgtgttgggatgagatgtgaggtgctgtattagtccattttcacactgccataaagaaacacctgagactgggtaatgtataaagaaaaagaggtttaatggactcactgttccacatggctggggaggcctcacaatcatggtggaatgtgaaggaagagcaaaggcacatcttacatggtggcaggcaagagaacgtgtgcaggggacacgttcctctttataaaaccatcagctctcatgagacttattcattatcactagaacagcatgggcaaaactcgcccccattattcaattacctcccaccaggtgccccccatgacatgtagggattatgggagctacaattcaagatgatatctgacaattcaagatgatatctgggtggggacacagccaaaccatatcaggtactaactacgttttacttccctcacatttcattgcttcttcacctgtaaagtgtgtataataatacctcatatgggtgaagtttaaatgaacatatgtaaagtgcttagaacaatgtctggcacatagtaccaataaatgttagttttgttattgttactaatattattaaatgtcttcatcattacctgaggctcttcccctaccctccccaattctggccagatagccaaggctattattgcctaagtggaattgtcgttggagatggacagaagaattgtcaaattcttgtgctttatatttaaattcttgtgttaggggttgaattgtgcctcctctcaaaaagttctaattctgagtaattcagaatatgcccttattttgaaatagggtatttacagagataatcaggttaaaattaggttatgagggcggaccctaaaccaaagtgactggtgtccttataaagaggagaaaatttgacacagaggcatgcacagagggaggagtacgtaaagacagtgatgcagggagtgcaccatgtaaagacagagacagagactggagttatgctgccacaaaccaaggaacatctggggctactaaaagctaagagaagcaagaaagtatccttcccctgcaggtttcagaggaagcatgatcatgctgacaacttgattctggcctctgagtagccagaattgtgaaaaaaatgatttctgtgtctaagcccctcaggatggcagtttgttacagcagccctagtaaactgatacattagacataagacaaaaagatttcaagggaaaacaagtggctccagcttacctttggtacagaaagaagagacccaagcaaaaactcttttgagtctgtgaaggaagttatgaagaaggaaaggagtctctgataagggctccttacatagtttgccaatctaggattagctaaaaagatgaaaagatgagaagtttccatctatttacactattctagtgtggcagagattgtgcctcgcttgcctgaagcctgcagagtgcattacatcccatggtttacaaacagcagaacagagatggctgtgtgaggcgcctggggcagggaggaaggcttaagtcagccaattacagccaagagtgaccctgggaacatgctgctttttcttctctcctcctaaaggacaggaacaaaagtttccttagaggaagaagtgacaaagaggggatgctgccatgcaaagctggagggatgctattcccggggcccagtgggcctgtgggtacgttagtagatatgagggataatgatggtcatggatcatgcaggactcctggcctcagtggatgcccatgtggagaaagggggaacgggatcatactctgctttctctatatatgtacacaatcctgaacttagatcagtctccatgagaaggagagatagaagaggaaaatcatgtattggttgaatgcaaacccaaaatcattgggaaaagcctcaagtaatttagtttacctggaactgactagatttatttttctgccattagacaaaatgggggccacaattgaaaacgaagtatgtaattaacagttcttgaacacatggctgggaaatatggtatcagctatatttgtttttcttctttgtatgagctcctttatggcaggcactgtgtgtttctctctgtgtcttttcaagtctaatataatacttgacatcatttttgtccatccatacagttggtttgtcaatatgaatgtatttatttaattgatgataaactgtaataaaatcatagttgtttgctctaaagtagatatgaaaggtcagatgaaacaataacatacatctggattgagaaatatcttaataactgatggattatttttattttctttatgtattgtgtgcttcaatatcctaataaataatattagctaggttcactgatgtatagaatctttttctacatttagatatttcttgcaaatgttttaccagaaagcaacacaaaaatactatcagtgagtatgtgtttacactgttctctaaggagtcaaattcctcaccttgaaaataattcatcccaggaagagaaaaggttttcaaaagactagagcaggccacaagggagctttcgcaaaactctacacgtaaagggtaatgtaaacttaaaacctatttttcaaacagtaatttatatatcttttaattttagtagtttatgtgtgaaacaatcatgcaaaacaacaaagtgataaaattttttaaaaaaattagtgagatgcaaataactgaatatgtaaaaggtctcatacatatttatatgtagtagataagttacatttttttagtgtgttgggaaattttagctcacatcacctctctactgtcatcttggggcactttcatgactacccatgcttcatgcaggtttactttcctccctgtgacagaggataatgggaatgttttttctttggctcaattttgtgtgtgtccgccagtagatggcggtaccactttgagtgcgatcggcctttttttctttctttttttttttcctcaaagctgttttctgatatatgttgggtaccatagagtgaatctcagaacaggaagcggaggcataagcagagaggattctggaaaggtctctttgttttcttatccacagagaaagaaagaaaaaaaattgtaactaatttgtaaacctctgtggtcaaaaaaaaaaaaaaaaaaaaaagctgaacagctgcagaggaagacacgttataccctaaccatcttggatgctgggctttgttatgctgtaattcataaggctctgttttatcaggtaagctgacaaaacatttcattatctgcaccatagaacctagctaccaggtcattttccttactttaaaatcatcttcatgctgctatttttaacccagtgttgtttaaatgtaaattacaggaaccaaaggcatcgtttgatgtgtaaactgcttactatttctttatctttcaaagaaaatagagcctgtctggaaatggtgatttatggtacatactaggcatcaatggtcttgtgtttttgtagatgcttatgattaattgtattcagaaaaaatattttttattatacttaaagctagtctaatgagtttcctggctgtatgtcatctatttaaatgcccagtgtgtccagtattttttaaacataaatgtatagtgaaattggaactatcattcttgtgctttagttttttatttaacagctttagagaggccatgcatatagggagtgataacaatatagaggtgtttggctttgtgaaatacactatcatttttctctaaaatctgttttcatagagaaaagaacaccaatactaaccatttaaaagaggttgaaccttcaaaaaataaaataatctctatatgttccataatatgctacttctttatcctttaatatattcattttatattaaatgtttaccttttaatttattgatttaaagattattatatattcttaattgttctataagcttgatagattgctgtttttctgtatatatttaataactgtttatttttattaattaccaggaagaaccactggagccataaaacaataatttactttatctatgatccatattgtctgtagttgtatttagaatattctatatcataaccataaatgttt

SEQ ID NO: 8733 - DNA, 6000 bp, Homo sapiens
tttaaaaaatgcttacattgtatttagaaacatttcttccattgtactttttctctttgaaatagactagttttacagtagttttagattcacagcaaaattaagccaaaaatatagagtttcccctttctctacacacgcagagcctcccccaactatcaatatctcgcaccagagtagcacatatgtattactgtaaaaataatctatttagaagagaaaaaatacaatggaagaaaattaatttaggaaaaaaattaattttttccctaaattaacaaattaaacgcagttcaaatatacctgtattgtatataggtatattttaacatatgtgctatattatatgtattagaatcaaagtcctctttgattcaagagctattttagagacagtgtttaggtattgtatatagttacaactgatgaacccaatttgatatatcataatcacccaaagtccatagtttacattataattcaatcttggtattgtacattctatgggtttgcacaaatgtataatgacatgtgtccactattacagtgtcatgcaaagtattttcactgccctggcaatcactgatctttttattgtctctgtagttttgtcttttccataatgtcatatagttggaatcatactgtatgtccattttagattgcttctttcaattagtaatatgtatttaaagtttctccatgtcttttcatggcttgatagctcatttcctttaatgctgagtaatattccattgtctggatgtaccacaggttatttatccattcacctactgaaggacatcttggttgcttccaggtttgggcaattatgaataaggctgctgtatacatccgtgtgcaggattttgtgtggacataagttttcaactcctttggttaaatcctaaggtatgcaattgctggatcatatggtaagagtatgtttggtttttaagaaactgctaaactgtcttccaagttgctgtaccattttgcttgcccaccagcaatgaatgtgagcttctattgctccatatcctcatcagcatttaatgttgttagtgttctggacttcgaccattctaatgagggtgtagtgctatcttattgttttaatttgcatttcactaatgacatatgatggatgtggggcatcttcttctcatatgcttatttgccatctgtgtgtcttctttggtgaagtgtctgttcaggtctttggcccattttttattcagattgttcattttcttattgttgagctttaataattttttgcatgtttggggtaacagtcctttatcagacatgtcttttgcaaatatttttcttagtatgtggcttgccttcctattctcttgatagtatctttcacagagcaaaatttttcattttaatgatatcagattgtcaattcttttttttcatggatcgtgcctttggtgttatatctaaaaagtcatcacctgagttctggttccaaaatggcagtgaagaagcaagctggcacaattcctcctcaccatcactcctagaaaaccaaaaacaaatatatagcactgagaatatcaccagaaatattccagaactcaaatatgaagatgagacagttccaagaaaaacagagaactaaaaagttatcaacaaatttagtcaactaggttttctccaatattatcttctagtagttttttagttctgcattttacatttagatttgtgatccattttgaattattttttgtgaaaggcataaggtctaggttcattttttttttttgcatttggatgtctagttattccagcaatacatgttgaaaagactatcttttcttcattttattaccttgcttctttattacagatcagttggctgtaattatgtgggccttcttccacactcactatcctattccattgatccacttatctattcttttgtcagtaccacactgtattgattactgcagctttacagtaagtcttaaagttgggttagtgtcagtcctccaactttgttcttcttcaacattgtgttggctcttttgggttttttgcctttccaaataaacttcaaaatcagtttatcaatatccacaaataactgctgggattttgacagaaattaaattaaacctttagttcaagttgggaagaactagtgtctttgatatattgaacactcctattcaaagacatggactgtctctgcatttatttagttgttctttgatctctacctcactccatatagaaaataaattccaaatagataaaatatttaaacttataacattaaaccaccaaaatactaaaaatacaagagggaaaggtgatacagatgcatgtgtgtgtatgtatatattttatatcctttttcctaccccttactgcccatctctctggatgcctttctaagcattatacagtatccagaagccaaagaagaattagataatcacctaacaattttaacatttttaattaaatcttttaaaatctgtagcacaaagcaccataaagtcaaaaaatatacatttttaaaagaccacacatcaaaaaatcaagtggctaatattttgtcttaaaagatgctatagattgaaaaaaatagaaggaaaaaatgggctgtttttaaataagcagttgcaggaaagaaaataaaaaataattcttaagtataagaaaaatatattccacttttctcatagtaagacaaatgcaaattaaaattataatatgctctcatctttgtccctgtcagattggaaatatcaaaaatatgataacatattatattggtgaggataaataggcactctgttacattgctgtcaggagaataagttcatacaaactccatagaaagtagttttgcagtaactatcataaataaacattctgtacaaagccaagtctacctttaaaaattaattttataaatatatccacatatatttgaaagtatgtgtgtaaaaatgtattacttgcaactttattcaatattagctaaagattggaaacaacccaaatactcacattcagggaattggttaaataaattatggcacataacatgcaatggaaacccatgtagccagtaataggtacgagtcaaatctataaaaattaagataaatgaactctaatatacattttaagtaaaaaatgctggtgtaaaacagtttgtataataagattccatttgaatatgtattttaaaatagaatatgtatacatacactcatgttctagcatatacctattgaatacctggaaatatatatgggagataagtagtagtagttgcctctaggaaggggaactgggcctggggaaacaaggtaaaaaggagatattatactgcattttcttttagatatttgcatttatatcatttacatatattttctatcaaaaagctatttaaaaataaaaactatatatatacatcagaatattttatttcccttttgagaaaagttactatatttgttatccctaaacttttatttgcaaaaaataaatgttagtattttcctgatgccttgtaggggaaccagagtttgtagacagaacattcagttttcattgatttacagacaacctattcttgcaggtactaaataactgcaggttaagttctaagaaccgctgaaaacttcacttagtagactaagggtacaaatttaaacttgagtcctcccttcttttgatcatccactctgaaaaatatggttataaacctcacaacaatgagaacctccttgaaatttgaggtctctgtccctcacaaaataattatgcctgcaattttcttattgtagttcatatacaccaaagctataattaactgtaccatagcttgctgaccttaatgagttaatgcagtctccaaataaaattcatggccaagtggcagcttaggctctggaatattttggctcagtaatatctgtgaaatctgagctcatattaaatatgccttaaaacaatacatttgggatttggcgtctggcatcagatcaggtctgactctgctgtatggggttgacggttttgcctcaggccttcataatatggttagcactataggactatagaatcagcaagaatttcattattgcttcagtgaagaaaaacacttagtttctattgagtttatggcaccctgacttctttctgatcatttttcttgaaacaggagactcctgctgtctcctgcacctacagctatcttcttccacccccacctccatctagcaatttctttacagcctagttttcctctccttcttactcacataaatgacatttgtccaaccgtggactgtctttatctttatgtgttcaagtaagccaaccatgcatggctagtgaagtgagcaggacatagttccagttgtctcaaatcttagaagaggttaaagcccagtcaagacagcaataactatttgattggtcattaaggttggtcactgcaaactatcctgactatcttggccaggaatcacttgtcagacctagagggttagattttatgtcctctcagagacaattccttttcccctcatccttgttaaatgagctatcctttgcctttatacgcacagtctccatcttctgggtgtgtcacagactgaataactcattagtgatatagtgttaattagcctaatgtactttgattaaggccatatttgaaccacttttaaaactcatggcacagttcctgtatcagtaaagcacaagaattaataaataagtgatgcttaactaaactcaacacagaaaccatttgtgttaaaattttttctttagaaatcacctttcaatttaaggagaaaacagactttaaatcctctagctcatgtttcatgacaagaatttatttatattaacatctcttagtccactctttaaaatatctgtattccttttattttaggaatttcatatgcagaataaatggtaattaaaatgtgcaggatgacaagatggagcaaacagtgcttgtaccaccaggacctgacagcttcaacttcttcaccagagaatctcttgcggctattgaaagacgcattgcagaagaaaaggcaaagaatcccaaaccagacaaaaaagatgacgacgaaaatggcccaaagccaaatagtgacttggaagctggaaagaaccttccatttatttatggagacattcctccagagatggtgtcagagcccctggaggacctggacccctactatatcaataagaaagtgagtgttttttatcaggcatattttgctgctaattgcctactgcattccttggactgttgtagcaccaacacatgccaaattagcacaaaatcttaagtatccttctgtttaagaaatgaaacacatttgtgggtggtttatgcatatacatgagaaatgaattgattatatcataacatatgcaactgtcccaaatgcaccatgacaaataaaaagaggccaggtgcggtggctcaagcctgtaatcccagcactttgaggggccgaggcaggcagatcacgaggttaagagattgagaccatcctggccaacatggtgaaaccccttctctgctaaaatacaaaaaatttgctgggcgtggtggcacacgcatgtagtcccagtcactcaggaggctgaggcaggggaatcccttgttgaaccctggaggccgaggttgcagtgagccgagatgacgccactacactccagcctggagacagagcaagactgtgtcaaaaaaaaaaaaaaaaaaaagaaagaagagagggtgggagggaaggaaggaaggaaggaaggaaggaaagaaagaggcagctaatttaacaaattgacagattctctccacagattcgatttactatacaatttttttgtactttctgtacttggaaatacttggaaatctcaaaatcatgagttataaagactatacaaaatattagtactaatttttcatgcaaacaaatttga

SEQ ID NO: 8734 - DNA, 6000 bp, Homo sapiens
attcctagaaggaaaattatttggcaatataaacgaattcacgtgtttaaggcttttgatagatattacaaaattaccctcaaaaagtttgtacactttatttatttatttgagacggagtctcgctctattgcccaggctggagtgcagtggcacgatcttggctcactgcaagctccgcctcctgggttcacgccattctctgcctcagcctcccgagcagctgggactataggcgcctgccaacatgcctggctaatttttttgtacttttagtagagacagggtttcacagtgttcgccaggttggtctcgatctcctgacctcatgatctgcctgcctgggcctcccaaagttctgggattataggcgtgagccaccgcacccagacagtacacattatttattactttcatccagacaggcaacactgatttcccctataacctctctaatatcactattacttttgttaaaatctttgctaatgattaataggccaaatttggttccccatgtttattttaatatttgtttctttgattactagtgaggtttgacatggttacaagtgtttattaaccatttgtatttttagataattatgttttttactaaattttatgagatatattaatatctttattcattaaaggaaaagcacttcatctgtcatttgtattgtactttttttattttgtggatgccttccacttttaaaaaccttcattgttatgagattaaatctagcattctttatctttttcgattttgcctttggtgtaatgctttacaagtcctctctactctcacattaaataagtattcattttcacttttattagaatgtttgagctttatttttccatttaaatatttactccaccagaaatctcaaatcttaaactaaatgcctgactaatgaaaactcctgtggcctgtttatccagaagactaagggaagaggaaagaagttgtagtcacacataggtcctgccccatcattgcatcttctttgtgtgtgttggtgaagtgtgaggctccatttttacttatgttgccctctgtaaccctgtcagcctatcatcttgccaccccactggcctggtacaataacttccaagcaaactcagatgccaactaaagctgctcttcttcaaagctataaaattagtaaaatgaaaggaagtttcacctctccaaactagaggatgatgatgaaatctgatcaaggtctcttcaacttccatttcacagatcatgatgttaagcaggtgcttagtgtcttcctttaatttagcttgatcagggaaatattgcccatgcatggtaccactagcattgaccaccctttgcctctgcttttttcatatactttagtcattctggagctgtgttgagcatgtgcatgggggttgggggagacagagacagaggagaataggaatattggaagaatcaaactggtaatggacatctgagttcacaacatctttgtacctagatttctgtcaaataattcttgaaagagatggtaccctccagttgaatgtagaatctacaaaaacaccagttattcaagccaacttttcttcaagagccacagtatgtctacactgaaagtctagtgaggcaagttatcccgtcttctcacctttatgatttccaaaagtgttgaggaatctccaaagcacaagtggcaactgctttgatttgattcattgatttgtttcctttttactaaatctcttcctattctgaggacaattttcacatattttaggattcaaaattcttaatgcatattcatagtagttttattaagatataatttacacaccataaaaaatcaccattttaaagtgtatcactcagtggtttttagtatgttcacaaaggtatgcaacaatcatcattatgtagttttagaatatttttatcaccccaaaagaagccccatactctttaaccattaaccacataaccatcaataatcacttcctattacacccagcctctgacaaaaaatactctacattttgtttctggggatttgcctattctggacatttcataagatggaatcatatcgtatgtggccttttggctctgtgttctttcacggggttttcatcacatccatgttgtaacatgtacctatacttcatttgtttttattgctaaatactaattcagtgtttgaatatcccacattcctttatccatttattcattggtgagtaatgaggttgtgtttactttttggctagtatgaataatgctgctgaacattcatgtaaacgttcttgtgtggacatatgttttaaattcccttgagtctgtaccaagtagtggaattgccgagtcataacttactctttacctttcagaatcatcctacttttgaatgtgtatatgaaatatcccttatttttcactacattctttaaaaacctttatcctaactttggtttccatcaaaatacaggcatacttcattttatggggctttactttattgcacttcaagatactgcattctttacaagttgaaggtttgtggcaaccctgcattaagcaagtctgtcagcgtaattttttcaacagcatgtgctcacttcatgcatctgtgtcacactttggcaattctcacaatatttcaactttgtaattgccattatttaattattactgtatgtgttatggtgatctatgatcagtgatctttgttgttactgtggtaattgttttggggtgctatgaaccacatccacataagacagcaaacaatcattaaatgtgacgtgttctgtttcagcatccctatctctctccctttcctcaggcttccctgttccctgacacacaacgatgttaaaattaggccaattagtaacccattcccacccctaatgttcaagtaaaggaagaattgcgcatttctcactttaaatcagaagctagaaatgattaagcttagtgaggaaggcatgttgaaagccaagataggccaaaatctaggcctcttgcactaagtacttagccaagttgtgaatgcaaaggaaacattcttgaaggaaatcaaatgtgctactccagtgaacacatgaatgataagaaaacaaaacagccttattgcaaatatagagaaagttttagtgatctagatagaagatcaaccagccacaacatttccttaagccaaagcctaatccacagcaaggccataactccaattgtatgaaggctgagaggtgaagaagctggaaaaaaaaggtttgaagctggcagacggtaccccatgagattgaaggaaagaagtcactgccataacataaaaatgcaaggtgaaacagcaagtgccaatggagaagatgcagcaagttattcagaagatctagctaagatcattgataagagtggttacattaaacaacagatttgcaatgaaggtctaacagccttctactagaagaatatattatagctagaaaggagaagtcaatgtctggcttcaaagcttcaacgaacaggctgactctcttgttaggggataatgcagctggtgactttaaattgaagcaaatgctaatttatcgttcagaaaatcttagaattatattatttaattattcagaatattaataattatttactattcagaaaattacataataattatattatttactattcagaaaattacataataattatattatttactattcagaaaattaaataattatattctttactattcagaaaattaaataataactatattatttaattattcagaaaattaaataataattatattatttaatcattcagaaaatctcttaagaattatactaaatctactctgcctgtgctctataaatagaacaacaaagcctggatgacagcacgtctgtttacagcatggttcactaaatattttaggcccagtgttgatacttatagctcaggaaaaaaaaaaaagatttctttcaaaatatcactgcctattgacaatgtgcctggtcactcaagagctctaacggagaggtacaagggcattaatgttattttcatgcctgctaacgctatccattctgtagcctatgggccaaagagtaatttcaacttttaagtcttattttttaataaatacattttataagactatagctgccatagatagtgattcctctgatgggtctgggaaaagtaaattgaaaatcttctggaaaggattcaccattctagatgttattagaacattaatgatttgtgggaggagggcaatatacaaacattaataggaaattggaatgagttgattccaactctcatggatgactatgagaggtttaagacttcagtgatggaaagaactgcagatgtggtggaaatagcaagagaattagaattaagagatggagcctaaaattgtgactgaattgctgccatctcgcggtaacttgaatggatgaggagttgcttctgattgataagcaaagaaagtggtttcgtgagatggaatcttctcctggtcaagatgttatgaacattgttgaagtgacagcagaggatttagaatattacataagtttagttggtaaaacagcatcaggctggagagtggtgctaccaaaggcattatcataaagacttttaaaagaggaaagttgagttgaattgcaccaaaggtaaatatagacgaaaagaaggggaatttaggaaaatttactcagaaaattgtcattttttactttaaagctatgaagcgtaaacttcaaatttctgagtataaagatggttagaaggcacgaaagataagtcccgcccattgcctgacacatagtaatcccttaacaagctgataattctagaacatgttaccttttgtagttgaaactaaaaatctgtttatgttgttattattagtttttaatgggcctttcttggcaggcaaatagttaagtctttatttctttgtttccatccaggcctcttatgtgaggagctgaagaggaattaaaatatacaggatgaaaagatggcaatgttgcctcccccaggacctcagagctttgtccatttcacaaaacagtctcttgccctcattgaacaacgcattgctgaaagaaaatcaaaggaacccaaagaagaaaagaaagatgatgatgaagaagccccaaagccaagcagtgacttggaagctggcaaacagctgcccttcatctatggggacattcctcccggcatggtgtcagagcccctggaggacttggacccctactatgcagacaaaaaggtgagtttattttgacttcagtggtcagtttctgttggcttccttctgtataaaaattattttaaattgagattagtgaaatttagtgaataaccatatcatgaccagaatgttaaattaaatatatatatatatatatatatatatatatatatatatatatatataggatattcagaatctgtactttttcaaatttttcattgaaattggctctggcattggcatactacttttaatttttttttttaattatactttaagttttagggtacatgtgcacattgtgcaggttagttacatatgtatacatgtgccatgctggtgcgctgcacccactaactggtcatctagcattaggtatatctcccaatgctatccctcccccctccccccaccccaccacagtccctagagtgtgatattccccttcctgtgtccatgtgatttcattgttcaattcccacctatgagtgagaatatgcggtgtttggttttttattcttgtgatagtttactgagaatgatgatttccaattgcatccatgtccctacaaaggacgtgaactcatcattttttatggctgcatagtattccatggtgtatatgagccacattttcttaatccagtctatcattgttggacatttgggttggttccaagtgtttgctattgtgaataatgccacaata

SEQ ID NO: 8735 - DNA, 6000 bp, Homo sapiens
tcaatagtctggaaggattttgtctacttttttgtagagaggtccaagtgactcttatcatctatgacctgttctttcatttctgagaatccctaagaaacaagttgtttatttttctcctctgttatttgcaaacagctctttacagttttgttctgtttttttcacggatcaggtacagattcttatagttctggaacttaggacagggttgaagattgtggtaaggttttctagagtaattccaaggaaagcaaacacgtaagtattaatagaatcataagttgaatgttgtacacataaaaacaatgacaagaaactgattctgggcagtactgtgtttgtgcaggcatgtaaggatgataaaaaactgaaaggaacaaataatatgtatttctacatgttctcatgagtgggagctaaacaatgggtacatatagacacagagtggaataagagacattggagcctacaaaaggtgggaatgtgggaaggagcgagggttgaaaattttctcaagtgagggttacactaaaagcccagacttcaacacaatccatataagacatctgcacttgtaggccctaaatgtatcattttaaaaaaataaataaaagataataggtatttgccagcaatattgcccattgcacttgaaaagataacctgcatttgcaaaagaatatatgaagtattaagaatcataaaaggccaggcatgtggctcacgcctgtaatcccagcagtttgggaggccgaggagggtggatcacttgaggtgaggagttcaagaccagcctggtcaacatggtgaaaccccgtctctactaaaaatacaaaaattagccaggcatggtggcacacgcctgtaatcccagctacttgggaggctgaggcaggagaattgcttgaacctgggagatggaggttgcagtgagctgagatcgcactactgcagtccagcctcggtgacagagccagactctgtctcaaaaaataaaataaaataaaataaaaaatcataaaattcaaatgattcagaagacaggattctacaatatgattcacattatattcatctttcaataaatctaggcttgcattgtgacagcgaaccaaaatgagtctctattttatattatcctataataaggctgtgggaagtatccattcacactcttgacactgatgtgtttgaggtaagaataaacaacccttatttaaatgggctaaaaggaaagtaaagtctcccagggcctatctggttcaagtgcagtgtgatagaggaggtttctctcttgacaaggcagaacatctgggtctagatcttctaccttctgaatgcattccaagaagcacagctcccttttttgcattttattttattttactttatggtaaattaataaataattgtatatttatggggtacactgtaatgctttgatttgtatatacattgtaaaaaattgaatcaagctaattaacatatccattgtctcaccagcttatcctttttttgtagtatgttaaaaaatctattctttaagcaattttcagatatacaatgttatttttagctgtagtcaccatgcaatgcaacagatcactaaaatgtattcatccattctgagactttgtactctttgatcaacattttctatttccttctccctccccttcccaacctctagagacgacatttctactctgtttatatgagattgacttttttagttccacatataagtgagatcatgtggcatttatcatttggtgcctggattatttaatttaacgtaatgtacaccagtaccacctcgtcttgaatgacagaatttccttctttgtaaaggctgtgtggtacttaattttgtatatataccacatttctttacctagttatccagcaataaacatttaggttgcttccatatcttggctactgtgaataatgctgaattaaagtaggactgcaactatccttttgacatagaaatttaaattcctttggatatatacccaggagtgggattgctagatcatatggtaattctatttttagttttttgagtttactattttccaaaatggctgtactaatttacattcccaccagcactgtacagggttctcttttctccacatcctcacccacacttgttatcattcatctttttgataatgtcagaatgagatatcacctcacacatgttagaatggctattatcaaaaatagcttaggtttgaggctgagtgctttatttctctgcatcccttggtattccccatagacatgactggactttcttattaccatttcttttcaggcaggctcatgctttatatcaagattctgaaaccagaggaaattctcacacctgtatattatagaagctttaaagcatccaagcaccaggttttaagaatgaaacagatcaacaaacaattctcatgttctttagattgcatgtgatctatggtctattcctatagtgaatctccacattttcccacaaagcatagagtggattaggtatgaataatgctcaatactttagcaaatatactgggtacctactctattacatcctctcttacaagtgctattgtagagcaggaaataaataagtctcagctgtcatgcagaaagcagtctagtggaacaagacagaaaataaacatataagcaatagctatttcacaggccagataagcactaagaagaaatacaaagcagttgctaactacaataggattcaaattgtgaaagtgggaattgatagcagagatgatttggagaagaagataatccattaaggatgaaatcagaagttaggctgttggatgcttcatccaaatagttgttggtattcaaatggatgagaaagtttttaagaaggaaagcaagagtttgaatggagggaaagactgtcaaccacagaataaattcttaataaataagagtgtccataaaggcagaacataatggctaccatgtagccaggtagaaaaagatgatgaaactggagaacatatctccaaagaaagagttttgggtttgtttgagtgtgttttgggagagttgtttgcttgtctttttatacagggttttgtcaactctggatgtagagacttttttgagaattaaaacatcgagtccatccacacttctgacactgacatctctgaggtcacaataaacagctcccatttaaacagactgaaaggaagctaatgcccacagtggcgtatcgagttcaagtgtagtgtgatacagccagcttctctcctgacacagaagagtatgtggggtctagagctcccacctactgaatacatacttagaaagtagagtttagaaatatgcttataaagttcttaaggcagaaatgttgaaaacagaccctccactatgtagttcctcctgctgagaaactcagtgggggaggaaggatcctcagctcattattaggggcacgataattgccaaaacttttcagatccaacctggtaatattacataaccgttatataaccgtagtgccaaatatttgtcccaaaacaaatatttgttccaaaacaagaaaatggctagctaactcagaatataaaaccaacaccattagtttcccatctatttgcctctcatttatgtgattggtttgtacaatatcttgggatcaactgcctgttcattacacattataaaaagcagtacttctttttatttattttaaatatcacatggaaactttgaaatatttgatattaagttcattaaatttatattgtgtttgaatgtacagaaaggtgtgtagaattttactgggtgaaaagggatatatgtgtcagactgctctaagggaaggttttatgctctagaaaattcatttgcatcatcaccagagtgtggagaagagaagcctgcagtcagtcaattgtccattataaagaaatcaagtgaatgtttgatgctacaaaataattattgctaattatagatgtgatcagggtattgagttaaaatcttaagttcttaccattcagagacatatgctgatatatttttgaagtaagtgatgtgatgtgtgcataaaatagggttacaaaatgaaggttctatggtgtggcctttgggaagaaggtgcaacccctctggccttcactcccaaactacactgtattgccgcagttttctaaaataaacataatttttcctctgtccctcgtgtttcaaatcactagagtgggaaactgatccagagtaaaagccagctccagctgactcttgactctcctaaaaacagctacacacatactcacacaacaacaggattacaaactcttaattacagcaatgtccagatttgaatgctgcaggctgacaattgcccctctaagttctgctggggcacctaggcaaggggagagagaatacaactggaggttaaagaaccagagttttctgtcttcctctcctctccctcattttcactctcccttccccctcagctgcaccgcgctgctccttttcctctcctccttggatgttccctagccccttcattccttcacgctctgcaggccctctcccctctacccctcctcatcagccccccgctcctcttcctccctcccttcccggcagctgctggaggagacgccacagctgctgctgttactgcatctgcagcaggtctctgtcaatatcacccgcccacgcccgatctggatgctgaagtcgctcactggcctggagattagggcgggggagagagtggagtggctgggagaggggagggaggagtggaaaggagacaaaaacagcttccaagcagcgggcgcggctccactggacatctgggtaggaggggtctctgggtcagtggctggagagtcgccccagtgagtcggtgtctaactggccatttagtggggcccatttactgcagagccacagctggtgaggacagacgccagcctaacagcagcttctgtacaactagagctcagaaaacccgagagatccgtggagaaagagaagcccaggaggaggaaagggctccaaggagccctgctcctgaagggtccctcaggcactggtggagacctgtcgcttcgtagcaagtaagtgcctttttcttgctgctgtgtccagtcccagaatggtgatagccgctatccgctgccagcctttcccatccactcccacctgccccatcccatacacacccttagggtccccagcaggaggacagagatttgaaattgtggacgtgcattaggagagttacttcaagagtatacttcaagagcagccgtggtctgtgggtgtttgcatggcatgtgccgtcagttttctaattccatcaggtaagcttctgaaaccaacattctctgttagtgtaaaattctagaaaccctatatgacaatgacttacattacatggtacaatgatagtataaaatggaggaaaggttatgcagattgttgtacacttcttctaagaatcctatctcttattctaaataacagagatttcaagattgattttcccaaaggaatagatagtataaaagtagaggcattgatgtgattggcagtggtgtgctcagtttagtcagttgggcattttggtattgactagatcaacagagattgttgttgttgtttttgcattgttttgctctataaaatgcatctcttctggaggttttcttttagaagtgatagtgtgactggttgtgttagcttcaaaacttagaacattggtcaaaacaagacaaatgatgagtgcatgtggaatgacacaccgatgggcccctttcattaacgaaaatgatgggttccagtttggatattggactgaaaaatatcttgaaatgggaaagagtttgggtggtgcttcttgtggatactttaccccactgctgttcattcaggagagcaatttatggcaaagtagaaggaaagtgggccctgtaataaacagaatcc

SEQ ID NO: 8736 - DNA, 6000 bp, Homo sapiens
cacccaccttggcctcccaaagtgctgggattacaggcgtgagccaccacgcccagcctccaacttaatgttagttctcttctcttttctgcccatactgattcctttgaccttatcctgttgtggctttaaacaacatctactctagatttcccaaactactgactcaaaaatccaactgcctgctcacatttctaatggacacctccagttgatcacaccccaggcagaacccttgaattttcccccctttaaacctgctcatccacggtcttccttaatccacttgttggcatttaaatccttccttatgctcaagccaaaaccctgcaaatcatcttaaatgcctccctttttcttgcattctagatcaaatccttcaggaaatcccattaaccctcacgtcaaaatacatttcccaaatctaacgacttcttaccaccttcactgcaaccactctggtccaattcatcaccatctacctcagggattactgcagtagtagctcctaatttacacccccacagcctggtgtccccaaagcagccagagtcgacctttgacagcatatgtcagatggtgtcacccttcggctcaaaatgctgcagaggctcctcatctcacagagaatgaaagtcgaggatgcgtgttgcgtcccccttccctgggctgctccctgacctcatctcctagcagtttccccatctctcgccctgctccagcctgccagcttcctggctatgcccgagatcaccagtcccattcccctcagggactgcgttgctgctcactctgcctgcaatgctcctgcacagatatctgtctgcatctccttcaaacgccacctcctcagtgaaacccaccctacctgctgtgtttaaaattgcaatccccttccagctgtcctggtccccttttatcctgctctgctttttctttttcctatagcaatttttacctgatgacacattaaacaatttacttattagttataacaatttacttatataaattatatatatcttatttatataacatataagaaaaaatatataaaaatatatattttatataaataaaaaatatacatctttttacaatttatatattatatatgtttacatgtataatttattgtatatgtttacatatataatttattgtatatgtttacatatataatttattgtatatgtttgtatattatatataatatataatgtttatatattatgtatgtttatatataatatatgtatttcatatataaatatataaatatatttatatatacatttatatatattttatttataatatatgtatatgtatatataatatatgtttatatataatatatgtaaacatataatacatgtaaacatatatgtaaacatatacagtcaaacatatatgtatatatataatatataaccatatattatataacatatgatataaaaataaattgttaaaaggatatatatcttatttatgtaatatataacatatgtaatatatataaaaataaattgtaaaaaatatatatttttttaatcatccatctcctccaattagaatgcatttttcctgagaaccaggaatctttgtctgctgtgtttattgatgtattccaaatgcctagaacactgcttggcacatagcaaaacccagtgaaaaaatttttagtgaatgaatgaatggaatgcatggaaacagggtctgaacagacacaaactaaaacatcaaaataaatattctgggtagaaggatagcaggtcttttcattcatctgttctctaatttctctaaaataaattcaaattacttgaataataaacttttaaatgaaaaaaacagtttactcctgaggataatattaatagtagttttagtaattttttttagtctatggtttcaactgttcacctttagaagagatttttttgtttaaattgtgggagatcacagtttgtttaaactgtggcaataaagggggaaagcctccaatgatatcactgtgaagaccccatgccaggcagtgggagaaattctgtcttgagttgaggtccccctgaccctgtattgagttgacttgagaggtggcagattggggagaagagacagagaaggagaggaagccaataaagggagggttattgagccatttccatcatgggcaacaggaactcactcccacagacatagagtgtagggcacgcttgggggttacccagtccaaggggagatggggcggggatatttatcctccaacattggttgaggcctgtttctggaggcagtaacactttagcatctcaggcttgtttcatgtgttcccatggccaaaaaaaaagaaaaaaaaatccctcggttacagggttgcaggcattggcagtaagcagaaagccagggtaggcacagagaaggtctcaacagattcctcgattcgacccgattctgctctgtgggtggaactcccttgtccgttgctgtttgaggttcctggctatgccccggggaggttcttccttgcccactttccctcacggccacaattgaaggaggggatggagaaagcaccctttttggaagactgtgcagatcttggagcctgctttctggccgtgtgtgtttgggaactcaaggactgctttaagccttgaacaaccaaaacttttgtagcctgggttaatgaactctttggcaatataattccttcaaatactgagtaagcttctgcaatatttgtttccatcattcccatgtgcctatatacacacatggtcacaattctttaatctgattaatttctttgcatcctaaccactatacctctctccttcaacttaatagcagccatcttgaagccatctgaaaaaaaaaatagatttggctgtgaagaaagcacccttaaagtgatctttgctgtggtgatgaaactgcctgtttaaagagaagtcttaacgggctttggttgctcaaagcctttattccatgttttcacttactcttttgaagttcaaaacagaagactccacatttctggactcattctatttcttttcatttctgctcttgaaccagcacatttttgcctgagctcagctcttccttgtactgacttgctaaacaaagccagaaagagccatggtgcactaactttgggtttaccagcctctattctgggagctacaggctcagtagacacattgttcaccaagtaattgaggacaacagtttatgaaatgatttgataccatataacatgggtcttcatattttcagcctccagtatcaattttcttgccttctgctgcagtgctacatattttagaatttatttttaacctcaggatactagtgcaaaggattacatattttattaattacggaacactagctgctgtacaaataaacccaaggattttgatggctcagcacgatgcatgttttgttttcattgaaatagtgctgggtggtgagcaggtggatagggggtccccctccatgcagtcattcaaggattcagaatgtcaaaagcaacaccaccttcagaacatggtttctaaggttaactttgggaccatgtccattctagccggtcagaagactagaagggcggggctgagctctggtaggtttgtgagtctgagaacatttttccactcatgccactggccagaggtcagtcccatggctccatttagatggaaggggctggtcagagggtgggggttgtatttctgccacggggctattccatggaagggagagaaccaaatttttttttagcaaacagttaactgatctcccacagtttaaacaaaaaatataaatagtatgagcttgcagctctctcctctaccctccaagccccttctctaatgatttgtttggatccactggaatgagaggatctgtcaggatgttgttgtgggcttgaggtgagaggacctttctcacctagttccatgtgggaaggaggcctggaaggaacaggcagggtacctttaagtaactgtctccttctgggaactcacctcacaccctgcaaagaagcacagctagggtaacaatacttctcagactgagaaattactaactgctggtttttaggatgtttttcaagcaagataattgaaaagctgaaccactctgctctttgcttccctgagtgagagtaggcagagggacggatggaaggaggcaggaacccggaacgactgctgatgcggtgggacactttttcccaataattactcttcgcttgaatcacagtgcataggacgtgggcaatttgctccagctaatggttcgtgtgggataggtattgcctgatacagaggcaggggttggaacagccactctgggggccagtaaagccagttttatggaagaagctgtctttgttaaaaaccaaacccaatcaacgtgggggcttcccagcagcagactcaacaccagctacacttttctgaaatccaggcagtcagaaaagcccccggcaccctcagcctaacactgaagcagaggaaatgaaactgaagccatgtttgcagaatgtggatttttgtggtttaggacaaacagctgactatctactcagaccaaatgaccctaatcaagtcaacccacagagatgaggttctggtttacacaaaagagaggcagtttgctcaccatttaaaataattccttccttcctatacatttttttttcattaagatctgactactggtgcatttaaaatataatgcagttcatactcagcttgtcaagggtaagcaattgtgtaaagtgaggcatatctgtaatggtgtacagtcccagtaactccctgggctccagggctgagggcagcccagctgtcgctcccacaaacaggtggtgtaaaacaatagctctagtgagccgactcgctttccaaaccctccagcagacaagcacccagccagagtgccagtgagaagcacaggccaccactctgccctggtccacacaagctccggtagcccatggagccctggcctctcctcctgctctttagcctttgctcaggtaagtgctggggtcaggggtggggagagggctctcctttgaggctaaagtgctggaggcccccaaatcaaagtcttgcttctttgatgagaccacagaatggcagagcctccccaaccaggggctgctctgtcagtttcttcctgatgttagcttgattgagtttttggataaagatttttagtttgccttatctaattaaaatagaaactgcctggtcaaagacttcaagatagacacgcatgtctctccctccatcatgcctggcagccgactcatccctctgaacactcggcaccatttgtaggacctggaccacttgtggatcatggtagtgtccgggggttcatatttaaacaactatggatacttagaacagtgccttataatcacatacaatggagttaacaagtccctttactgctccaggagaattctaataataaagaggactgattgacagctacatgtgctggagatagaaaccagttaataatcataactaaactctctccacagagacaaatattttttaattttttcaaaatttctgaagttaaaaaaaattccatatgaatacattcctacctactttttttttttaagatgttactatatataggtttgggtttgaattgaaactataaaaccttgcacagcatttgacctgcattctactctggaatgtgtcctaacacagcagctgaaacaccatcctgaatcccagacttccgctagagggaaacaggagatgtttgctgattgcttcacataaaagtttactggtgatatcatcccaactgagaaacaaggtggctgacatcctgtgatttttcatttccaatattgctctgaaaaacacaggccttctggtcaagaggcaaaaagctttattattaatttttttcaatatcagagttgagtgaaagagcctaaac

SEQ ID NO: 8737 - DNA, 6000 bp, Homo sapiens
atttagaaggtgacttcagtcacaaaaatacacatttccaattactactaatataactaaaaattatactgcatctaagcaatccccaaaaatattaaaataaatcccttctaaccaaattgattacagatttacttgtgtaaatttggatgggtgggtgggtgggagtgccaaggagaccattatctttataagttgtgtgtgtgtgtgtgtgtgtgtgtgtgtgtgtgtattcctgatataatttaaaataaataacaggtcaggcatgttggctcatgcctataatcccagcactttcagaggccgaggcgggcagatcacctgaggtcaggagttcgagaccagcctggccaacatgacaaaaccccgtttctactaaaagtactaaaaattagcctggcctggtagtgtgcgcctgtagtcccagctactcaggaggctgaggcaggagaatcacttgaacccgggaggtggaggttgcagtgagccgagattgtgccactgcactccagcctgggcaacacagcaagactccgtctccaaaaataataataataaaataaacataaataaataataaatattaaagtcattcatgggcagtttagaagatgacatctaagttcccttcacgtctaaaaattccaacaattcatagcaacggagactaaaatgagtgagagacagttacatggcccttctcagcattcaaaatcaaaggcttcctccttctgtaacgtcagcaccatgacaaagttgactaaccaaatactgtatttcagttgacttacttttaaaatcttaacagatttacaaacaagatgattttaaagtaaaccttattgaattatttacaaactcatgcctgaaccaaatattcttaatctacagtcaatgaatgagctcagggctgtgaatccttgcactggacatgcactttgtgctggcatgctttcttcttctttcagggaaaagggtctacagctttcgtcagaattttaaaggtgtctgtgaccctcaaaaggcaaagaaacacaaattttaaatgtatttttttccattcaatatagcaaacatgactatgaggaaaacgatatattttatgtccttacgttaaaagcaaattatgtaaaggtgctaaaatacatacgtactacatatacaatttccccagtggcaataaatacttggttgtttcaatcttagtttattaagtccaaataggattcatctaaaaattaaattaaattaaaatgcagtgttagtttttgcctggtctaactgagtggacttcctaaggagaaagagcagtaaaagggcacctgtgtgcatgtttgacccacggccaaaaatagtgtttatggaaaacttcagatggagcaaagaggcactcagccaacaaaatctacagctgtgagacttggagcttacaagtgcccaatctccacaagctccacaagcaaaagtggaattatgggacagactttgaagcttgtttatgtgcaaattttttaaggagtgactttgtattactctgttcagatatatattatctgatcaacaccaaaaaaaaatctaacaccaaagaaaatggtgaaagggcatcccactcaagtgttgatatttaccacccctctcccctacaattacttataaacaaaactcagggtggctaggacagagcagtttaacttctgtacccagagagttacgactttctccctgaggaataaataacctgctcagctggttaacaagagtcctgaaaaaacagcagagactggagaaactgcagtgtatcagaatctctgaaaaaggtcctcaggccatctgaatatgtaccacaaccctacagccctcatgctcagctgtctgctggtacatacccagaggctgcctgaaatctgtgggaaggcaattcgtagttggcttggacatgtggaaatggaaagagactaggcatcttcaaaagaaagccaagtacactatgtaagcaagaacatggagaccagagctaacgttttaaagctgtgagattacctacttacataggccagaaatcgcactccaactgaagattttactgttctcaagaaaaatgtgatacatttatagatatatagtgaattatttcagtcagaaagaaaatcaaatgcctttagggacagaggactagatttaatacaggataattaaccaggtcttggtaccttgtttaatttaatcattataattttggagacacaatccatcaatctatgaacaggtatttaccatttatgttcattcaccgaagaaatgttttagagccatctccaattaccttactgtgaaacagctacaacagaaataacaaattgtctagatgggaaggaccatgagtttctgggtgaaggtggcatatcatctgtgccaatatccgtgtcatctcagtgaaggagccccaggaaacaccaccccaaaatatactgctttggtatgctcattactgcaaactgagagaacttagggaacagcaagcacagggaggggccttctctgatgcccccttatctcaaaaaattcctttgtcccctccctagaatttcatcaatcagggaagattaaccttatcacataagagattaaaaggtctagtagcgttcttcctcaagttaattttcaatacctgaaagactttatctcaataactagacaacttttgttcatcatacatttcctcccctcattttcccacagcttgtcaataccttcccccaggacctccacatccctattccaatgctataagaacttcaatcatctggtccttcctcaagtctcatgttttgtgggactcttgtgcataaggatgtaaactgtttttcttctgttaagtctacctactgttgctttatattatagactcaattatcaaaccttcaaaaggaagagagaaggtcttctctctcccctacaccagctaacctggtaacttcaaccagaaatgactttaaatgctcaggctattgtaatgggagagctatgctcctaagtgggcacttcagagctggtctacaatattcacagcagtaggaatcactgtttatagaccatagcaagactttcaaattgtagagatccagaaattagcttcacttaagacatttctttcttaattgaagatcattttgccaaatcatttttgtctcaatatattgaaaccaagtatactatggaaaaagacttttaagtttaataaaatccttaactgtcttgcctactataatatgtattctcaggccaggtgaagtggctcatgcctgtaatcccaggaatttgggaggctgaattgagaggacagcttgagcccaggagttcaagaccagcctagacaacacagcaagaccctgcctctacaaaaaataaaaaattagccagatgtggtggcattactgcagggggtgggggatgaggtgggaggatcacttgagcctgggaggtcgaggctgcagtgagctgtgatcacaccactgcactccagcctgggtgacacagcaagactctatgtctaaaaaaaatgaaaataaaaaatatacaatgtatattcaaaacacatgacagatacactcaagtgcttctgctttctagaagcagtattatactatacttgttctagtattttgttgttgtgttgttctgtttttctgcaatttgttagctgggaattgatacacattataattcctaccagtacatgcagggaatgagcatcacaccacaaatccttctttatactttaccttccctagttctgaaggtcagtgtttctaatgctgtgtctgaacttgtgttgaagtatttggtactaataaaacaaagaaggaattaatatattttttaaattgtggggcgggggggggacggagaggattctacaaaggcggatttcactttctaagtagcattatattggtctacattaataattttcccagcaggccttccaagattttactttgaacaatcacagtctttgtttctcagatcctcttacatgtgacatttggtcaaagttttaaaatcagcagctaacggaggaggagaaaagtactgttcactaaggcactgcacaaagccataccacagcacgtttcagggttccaacaagctggatcacattttccagctaaacactatttcaatgttgtgttacattttctgtacactgtacactatgttttattaacactatacttcatcacactgatcaggaaaacatcttctaaacatcattaaaataagccttaagaaaattcttcggttctttcccacaggtgtgcattttttaaagtatcaggtacagaacaattaattttattcctattcaaggtctttgtatacagcctttaaaaaaaaaaagtttgtttcctaaccaaaaaaataaaagatttcacgtaattatctatattactagttctggaactaatggtagccattctgatgagacatgagaagaaaactaagaaaatcaatgcattaatttatgcctataagtccttatccaaataaatcttccccaaagacatggtggaaaaaaaaaaagattagtaaaggaaatatctcacacttcaacatgctatataaggaaagacggctgaaaaatcttgcagggaattttatccctttgaactttcaaaaaaactcttaagtaagattatgcaaacttactaaagaccggtcctgattagagggaaaaaatgcaccccttctccaagtcagttctggaggctttctccagagttgttaaggtttgtgttgggtaaagaaagacctcctaacaaaccagcattcttttccacatgatcagagctaattggcccccctgcaggctaagtgaccaatcacatcaacctcagctgaaaccagcccccacaacattataaacagaggaatgtaagctgtaaaaccagtccaagaagagaacctacaaactagacttgtagattaaaattatctgatcaaaaaggcagactctgtaaatttccttaagacctaccttggcataaaggctgacccagcaaaagaactggtgagtacatgcaataatatccattcttctttccttatgggaaacagggaaagaaactgactggcaaatagcaacagagctagattacttccaacagatttttaaaacaaagacattatctatagtgtaggatagtaaggtttctatattcttttcccttaaatcttaaaaatgcaataacagccatattgaatgtattactggaaattttcttaactgttttattaaatgtatactaattttctattacaatatatcagtagaggataaaggccttaggaaaaaaaattcagtggcttgaggaaaaaaaaagtctttttcttttggaaggaatttcaaaaacccaaaatgagcataaaaaaacaaatgccaaaagaataagccactttgtttttacttctgtaatctaagaagaaagtgatgagtatcctaatcgtaaatttttaagcatggaattattgcggaaattaatagatacttctgcaactgagaaattaaaatagaatctctgagcttatataacagggttagaactcaatagtgtttgccctaattgtggagggcaggagaaatcattataagactttcaatatagtcttaaagtatttacaccagacatgaacaaatacatagtaatgccatcttcatttaatgtttgttagttatagcctttatcttaactcctcagtatgaactatactattttttatcatggcaacagaaaatacatacttttaagtgctacaacccaatgagtagaatgaattctgatgatcagtgaagctgcctatcattttttaataggtactatttttcctccaaataatttataaatgggcaaatattttacagcccacacacagcaatagaagcaaaccttcccaaccttccacctcactttctattgggatcagctgatgagactt

SEQ ID NO: 8738 - DNA, 6000 bp, Homo sapiens
ctttctccccaacccacagcacgactgggcggggctaagaacagggccaggtgtccagactcccagccccgtgtgctctcccccacagcccgcagagcctctctttgttaacagttgccttttgtgtttgatttgggcttgagatgttaaacaaatagtgtctcttgacaaatgcaagccggctgcactgggaccagttatgctccataaagccaggctaatcccctgacttctctccctacagagatacaccaagaaacaccccaatcatacccaaagcaccctaaatctgattgacctgcagacagaggccatgatccctggtgcagcgctcggtgtcagcaatgtccttctgggctttctgcagcagcttctgggcttctctcccccttctcaggcctgaccctggcttgatgtcaagatggctctggaccctgcctcctacatgaaccatgggccccaggccctactgacccacctgagcccaccaggccaactggaccaaatagaggggtgtttacaaacaccttctctgtgtcagctgctgtgccaggagctgtggcttacagacatgagtaaggccctacccctgccctacaggagattatggtctgctctaaacaaaacgaacttgaatttcacgtgaggatctggtctagaaactgatggagtcaggatctgaacttcagcttgtctgactcagggtcctacctcattgatcctgcccctatcctccagccaaactgccaatacagggggctggaaagcaatggacagggaggtatttgggcctctcatccttctggccacattcttggccattgtacactgaccactctggtcaaatggccagggctctcgttaacatcccagaatgtcagagcaggaagggacctttggatacagccaacgcttttgtcttatagaaaaagaaactgagacacatagaggccacgtgagtttcccgagtccacccaactagttggtggtagttgatggcagcactgggaccaaactccagcctctggactcctagttcaatgctgtctcccacatgcttccttgggccctgggacacacatctgtctttatcctcctctcctaagctagacagagcttgtcccagctttagaactatctctcttcagagaaccacagaagcagattgccagggtttttctgcctgcagactcagccatctgtgcccctctccctctgacactgatggtctctaactcaggtatagagatccttaaagccttcatttgagtgagtcacccaaggaaacatgtggagcagctctaaggtgcaaagtactgcggggagagtagcatgagtgagaagggtttcctccaccctggagaagataatgagccagtggggaagatggatatgaaagaacagctaatcttttaggcaggaggaatacctgctgagttgatgcttagatagggtgctgcagaagcacaaaaagagccagtggttctgatcagaggaaactgggaaatgcttcatggagggagtggtctttaagctgggtcttggagcctgaataggagttcaacagacagaagatgggaaaggcaaggaggcaccagcatcccaggttatgggagccacatgagccatgtgaagcatggaagtacttggatgtgtttagaacttagagaagaatggactggaagataaagctggttaataattgtgtatgatgttagtatataataaaatatagtaactaatgacacattctgttcaatttatcctacctaactctgtgtccctttcctcacaaactagaatcttaaaagtagtgctatttcctctttttgtctgattattgggagaactagagaaacagagtccgggaaggtcatgggatgctataaatgaagggagtgtggacatttcctggtccagacccctccactgatggatgagcagcaagcctcaaggagaaggagcgactggcccccaatgccagagcaaacaggtggcagagacaggttgacactgggcaggcacaggcaggtctgaggagcccaggatgggaagaaatgggataagctgatatgtctttggcacaatctgacccaggttgcctacaagtcccaggggctactcagaaacctagactggtaccaacatggctcctattccagaaccttctccccaagagaaggagagaggaggggcaggaagaaggagacctaggctgccctctgggcttcagggcctccccactgataggtgccctggtcccacacataataggtgcaacaagaaagtgccaaccttgggacatgagtcctggttccccctcactcactgtgtgaccttggacaacactcttcctactgtctgggcctcagtttcctcatatgtaacatgagaaggttgggctaaatgatctctaaaggtcctttcagtattgaagtgctcagagaaaaagcttcatcatgattaataatacatgccctgcccctaaagacagctttttcccttttccaaagctctttcactcataatatcacctttcatcggtacagctgtctggcctggcagtcacaagcaagcagaacctggacacagccttttcaccttgaaaacctggtctagcaaccctcttgctcatctagacaggctttgggggaattcgcttctggggtgactgtcaccaggagccaatacatcagaaatgcacagaacctaacttgtaccttcacctctgagaagctgggaaaggcagtactttccttccagggagccagaagatgcaaaggggaaaagcctgcaataggctgagttgctggtcagagggcaagaccagaaattctgtgcctgcaaagaaacaaagatcttcccttgaagagggagggggaacatggtgctataaatgtaggaccctcccattgggctctgaagtcattagagagcctcatatcatctgatttgcacacatgtgttcttctttgatctctcaaaacaaatggttcaagacgcgggtagagctaatattattatctattccactttacaaattgaaaaaaaaaaaagagagactcaaggagtcatggcaaagagcatgggcttaagaggcagacagactgaagcctcttcccagctgagtgaaatttactgattctctacattgcctttagcctcagtttccccatctataaaataggcatgaccacacctacctttcaggattgtggtgaggaccagagatgatgaatccctgacacacaacagatgcttaataaatacttgttgaaggaatgaaggggttggtggcacttctggggtgtcattggaggagtgtagtgtccggcagtgacaggtcagcccagcctgtgggtagacagtgctccagcttctggctgactgcctcctgagtctgctctcagtcaggggccttggtgtctcttccctgtctctctgcctggcccatgccagggtcctgtgaaggactttttaacccttcttggcactgagatttgcattccaatcattctgctcactcagcccatccaagtctggagttgtttagagctgggcaaggcctgtgggatcatctgctacgacacctcgttgaaaagataaggaaacaaggctctgagagggtcagtaatgcctgagtttccactacccttcccacctcaccaccatagccaccatgtttgacaaatgaagaaactgaggcatagggaccccctctcctgccccagttcccgcagtctgccagtgagcctcctgctctgggccccacctgcccaattccagctagatcccggttctgctgggatgccctaaggtggtggcaggtgctatctctggcaactcagcctaagcccagcctggtgcacgggtgcaagacaggaaccatgggagtcgggacagcctagaagcccctgggagcgaagcaggaggcctagactcccagcctgtgccttctcagccagttccaagaactgtgctgacctgggaaggcacacattgcctgagaacagggctttcccttgggtgtcagctcatgtgtgcccaggtccacagctgggccctgcctgcttccaagacagccagagtctggcccaagggaggaaggagtgtggcctgggaggaaggaacgcttggctgagtcccagtgctgtcacgaaatcactgcgtgcccatgcgtgtcacttgacctctctgggcctccatttcctcatccataggataagggcaggacagcgaggccccaagtgcctcctggctgcaatatgctgtgatgagggtggagggtggggtggggaggggctcgctctgccttccttgccttcctgtctgtttctctgtcattagtttatctccagcaatccaggcctctctgtctcagtctgttgctctctctgtttccatcttttgctctgtatttttctgcccgcctctcttctttttctgtctgagtgcacctctgattttatctcctcctctgtcacacagcccccttccctcagtcctacactgcctttctcccattctccgtagttatcagcgtttcgctgtctagttttctctgtctctcgggctcgctctctctctctttctctctctctgtcctgcccgggctctctcgcggccgcccctcccgtcccctccgccagcccccctcctccctcctcggcgcgtctccccagtccttatttggctgggcgggagggctggcgggaggaggcggcctgcgggcggggggcggggggcgggcgcggggccgggcggaggagggcggtgggtggtgctgaagggacagctccgcggcggcggcggcggcggcggccccgggcgctgagcgggtgcccggcgcggagagcggcgagcgcagccatgccccaggccgcctccggggcagcagcagcggcggccggggccgaggcgcgggccgggggcgccggggggccggcggcggcccgggcgggacgatgaagcggcagaacgtgcgcacgctggcgctcatcgtgtgcaccttcacctacctgctggtgggcgccgcggtcttcgacgcgctggagtcggagcccgagctgatcgagcggcagcggctggagctgcggcagcaggagctgcgggcgcgctacaacctcagccagggcggctacgaggagctggagcgcgtcgtgctgcgcctcaagccgcacaaggccggcgtgcagtggcgcttcgccggctccttctacttcgccatcaccgtcatcaccaccatcggtaacggctcgccgggcggggggcgggaacccagggctgggcgcggggctccgggagtcgtccggggccggctggggctgggggcgggggctcccccgagaggggctgggcgccgaaccctgcgctcgcagaaacccgagttcagcctggcgtgtgtgctccgcggggacggaactcggggaggcgtcgattcctggctccggacctgactctccggccgggccagccctaacttggccctgccatgttgcataggcccccagggactccgaagtgtgtgagaggggcagggacgaccggcggaggctcgggcaggaggggtgtggccgggccaggccctgaacagggcgctgagagtgagcggcgggagagcgccagtgctccgtatccctgaggatcggcttccacagcctagcaggtctacacctgctgggctctggggaggcatgaggatgtcggaatgcggcacttcggggcacttggggccaccctataacggcggctgtgagtgtacgtgtgtctgcgtgtttcagctccaggagtttggtcgccaccagtcagtgcctgtgattttctcagagcggcagaattggtgcgggaagccagatctggccttgtcagccttcttctctgctgtcccagcaaaacagtcacctcacaggaataaccccagttctttccaagccagggcagatcaccatgtaggaggccacacgtacacccagactgtcagacaacacaggcataggcaca

SEQ ID NO: 8739 - DNA, 6000 bp, Homo sapiens; identical to SEQ ID NO: 892

SEQ ID NO: 8740 - DNA, 6000 bp, Homo sapiens
ctggcttgtagggtttctggggagaggtccactgttagtctgatgggctttcctttgtaggtgacctggcctttctctctggctgcccttaacattttttttttttcagttggggtcctgctctgtcacccaggctgaagtgcagtggtgcaatctcagctcactgcaacctccgcctccccggttcaagcgattctcctgcctcagcctactgaggtccagtggctcgctcctataatcccaacactttgggaagccgaggcaggcaaatcacttgaagttaggagtttgagaccagcctggccaacatggtgaaaccctgtctctactaaaaatacaaaaattagctgggcatggtggcataagcctgtaatccctgcccttaacattttttccttcatttcaaccttggagaatctgatgattatgtgtcttgaggttgatcttctcatggagtaccttattggagttctctggatttcctgaatttgaatgttggcttgtcttgctaggttggggaggttctcctggatgataccctgaagtgtgttttccaacttggttccattctacccatctctttcaggtaccccaatcagtcataggttcagtctttttacataatcctgtagttctcagaggttttgttcattctttttcatttttttttcctctaatcttgtctgcctgtcttatttcagcaagatagtcttcaagctctgaaattctttcctctgcttggtctatttggccattgatacttgtgaagttctcgtgttgtgtttttcagaaccatcaggtcatttatgtggctctctaaactggttactctggttaacagctcctgtaatgttttatcatggttcttagcttctttgcattgggttagaacgtgctcctttagctcagcaaagtttgttattacccactttctgaagcctacttctgtcagttaatccatctcggcctcagcccagttctgtgcccttggtggagatgtgttgtgatcatttggaggagaagaggcactctggttttttgagttttcagcatttttggcagattctttctcatcttcatgggtttatcttgttttggtctttgaggctgctgacatttggatgggatttttgtggaaactttttagttgatgctgttgctgttgttgctttgtttatttctcaatagtcagacccttcttttgtagggctgctgcagtttgctggggatcctctccagaccccattcacctggatccctcctgcccctggaggtgttaccagtggaggctgcagaacagcaaagatggctgcctgctccttcatccgggagatccgtctcaaaggggcgctgacctgatgccggcaagaacgtgcctgtttaagatttctgctgacccctgttgaggggtctcacccagtcaggaagcacaggatcagggacccacttaacaaagcactctggctgactcttagcagagggcatgcgctgcacttgcgggggatcccactcatccagactgcccgattccttaaagccagccaggggagagaccaagtccactattcagtggataccacagcagcccctccccgcaaggggctccatcccagggacatccagcccctggctggggttgctgaaattccagcggggaggccctgcctggtgaggagggatgggtctgggtttagcctaaagaggcagtctggccacgatctgccacagccgctatggtgcactgtggggaattcctcctgggcccaaactgcccagtctccacgactccagcaggggaaaatggcagactggaactccagtgatggcggccacccctttccccaggagctcggtagtcttaggcagtctccagtgtagaggccgccaagaatctgcacagctctgtgcttgagacccaaggccctggtggtgtgggctcacgagggaatcgcctgatctgtggatagcacagatccatggaaaaagcgtggtttcctgggtagggtagcacaatcactcaccgcctcttttggctgagaatgagaggtccccttgccctgtgccgctcccaggtgggcaggcgctccaccctgcttgtcctcactctccttgggactgcctagtcagtcccactgagagaacctggacacctcagttgctggtgcaggattcactcaccattttcattctccttggtgagaacctctgacatcagctgttttttttcttttttttcttttttttttttttttattgagacagagtctcactgtgtcccccaggctggagggcaggagtgcagtggcgcgatctcggctcaccgcaagctccgcctcccgggttcacaccattctcctgcctcagcctcccgagtagctgggactacaggcacccaccaccacgcccggctaattttttgtgtttttagtagagacagagtttcaccatgttagccaggatggtctcaatctcctaaccttgtgatccagccgcttcggcctcccaaagtgcggggattacgggcgtgagctaccccgcccggctgacctcagctgtttctagtcagccatcttggtccctccccggatttattacttttaatgagtacaatttcttatgttggtcctaaagttttgcaggcatctcaaactggaatcattctctttctctaacgtgcttcccccctagttccctgtctcaatgggcaggcaacaccccccatcaccccagctgttggggcactgtgttcagcacctcttcctccccaccccttatacctaaattgccatgtcctggcaactctacccacttgctatcactaccacaaagctagttcaggcagttgttctctctcccctaagaaactgtggcaattttttagctgctcacctcacagggaactcatgttccctgaatacatcctccctggtctagccagagtggcctgtacacacctgaccacattcctactgggctttagggtaaggcccaagctcctgggcacaacctgcaaagcctgttgtagcacctgccccactgcactgtcagatccttgagaacaggcttcgttttatttctctttatagctcctatgatcagccagaaactcactcattgttacataagtgaataaagtgtttaaaaatcaaaacaatgtttgatctattgagaaaaccagaatatttaaactcatagacttaaactatcaaacatcagagacaagtcaggaccctgctgagccgatggctgcccttttgtaactggcagagggttggccaaatgtgcatggccacaccaatggctcctgtctctgaccttcctttggatttggaattaactgagtcctggagtgagtccctgggctatttctagaaattgccatctttctccggagtggtctccactgacatctgacacacttaaacgatgtggctgctcaagagagcctgtgctaatctattttagagaaaccatcctcagaaatgcatcttccagtgaaagacttatccaaaaatcatggaactggccaatcacaccagccctgctctcacataggctttcttttcaatcacaggggcaccttccaatgtttgccaaagagaaaatgttcatgacctgatttctggcacaagtgtaactgcccaaggggttcaccttccccactgcctagacagagccaacttatcaagacaggggaattgcaacagagaaaaagtaattcacacagagctggctgtgcaggagaccagagttttattattactcaaatcactcttcccaaaactcagggatcagggtttttaaggataatttgttgggtagggggccagtgaatcggaagtgctgattggctggcttagggatgaaatcacagggagttgactctgttctcttatgctgagtcagttactgggtggaggccacagaactggttggtaggtcaaggtgtggccatccggttgttagaaatgtgaaaacctgaaaagacatctcaaaaggccgatcttaggctcacaatagtgacgttgcctttaacagtaactggggaagttgcgaatcttacgacctctggaataatggctgataatatttagaattccagcccctctcattctaacttggtggctgttgggcttttagttgttttacaaaaacagtttagctttgggaaagggctttaatttaaattataaattaaattccttcccaaggctagttcggcctacgcccaggaatgaataaggacaatttagaggttagaagcaagatggaattggttaggtcttatgtcgttcactgacataattttcttagttacaatttttcaagacgatttcacaaggattgtgccacattgacaggtggatctatctttcattggacaagctacttaacatctctgacgctcagtttattcatctttaaatgggaataaaaataataagtacctcacaaagttactgtaaggattaatgagatgaatcgtgtattgggtttagcattatattgtaaaggttttctgaatgtcacatatggtcctttttttacatgttgtcttaaagcaagatttgagggagcagtggaaataggtgccaaattataagataaaaataaggaaacaagaaaaccagggtcaagagggacactgcatcatctcaaagaatcatgagggcttcaccttccttatatcacataccaacttggcccttcatttatttattcattcactcattcagtacttaactctgagcatctcttcagcatggtagcataaacaaatgagtaaaagactttgtgccttatgctagaaagaagagcctggagatgtccaactaaaactcactgcagcaggaactacaagagacagcagagggtgtgcctgccagggcttgcaggggggccgcgtgcggtagcccttgcccttgatgagctgggtttgcagttactttcctgtcctgatgacgtgtctgctttgtgttcacattttagcaatcatctggggggctaaatgtgacaaaccgagaagatggccaagatcaacacccaatactcccacccctccaggacccacctcaaggtaaagacctcagaccgagatctcaatcgcgctgaaaatggcctcagcaggtaagatgggctaagatgggcttttcattttatgcctggctctggtcatttccacagctgatctagactgtgggggaagaatgccttcacgttggccagccacaggtcagagggcaggggaggtattcacagcactgccaacttcatttttcatctcacttaatcctcacaacccccagaaagtagtctgtattcttgttttagagatgtggaaaagcaggcttaaatagtcacttaattgctataaggtaagaaaatgaagactcaaatgcagcagactaaattttactgtaagaacttcctcaaactgacacactctcccatgtattcatcaaaaatgtgttggactcttgctgtgcaccagccactgaactgggtttgcagtctgagctgggcaccaaagatgtagcatgaatcagatgccctgccctcgcttccaggggaagatctggaggcaggccatgcccagggcctgtatagggagtgggcagtgccccttgtcagccaagccatcaaccccatcaatgacatcctgacacaggtaggaaatggaaatctggagccttaagctctacttctaaccctcttcctaacttactagtagacctgggaaaacgcatttaaccactccatgcctcaatttcttcacaatgaaacagcattttttccaagctcctggtataatagtgaggacacccgaagggacctatttactgtacatagagctaaacccttatgtttctttgtttttagttttttcctttttgtttttcgtgacagagtcccaccctgtcacccagactggagtgcagtagtgcaattagtgcaatctcggctcactgggttcaagtgattctcctgcctcagcctctc

SEQ ID NO: 8741 - DNA, 6000 bp, Homo sapiens
gtataaaacacagaatcatattcttcatttttgaagttatagttattcatgatattactaattttggacacagcaaataagacactgccagaagtactttccaggcagaataaatatgtagcttgctcctagccgagtttgttaaatatagctttgatcccccccaccctcatgaactgtatggtagttttctcgtaatctaccaccctatctttaaatgttagactccagatgattttgtattctgcagttacattttccagatcttttctggctttgtggcctggcctgaaattgtgtgcctctctctcctttgacccattctgcttgcagtgtttcacttcagttcatcagacagcacctgattaggaggccttccatcatccattccccacacatcctcctggcctctgcacaacggggctggctgccctccagaacctcatcctggaagcagctgccctcacaggaaaagatgagtttggttcatctgtgaacattttcaaggagttgaactcaatgtcacaaataggtcaaagcctcagtgacatttaaagtgtgacaaaatggcatccttaaaaatatttaatttccctggcaggactgtgtcattaaaagaatagaaatcttgacaataagcagatgtgttttggaatccctgcttcactgcctatctgtgtaatataaatgctaacctgtacagttctaagcacattacctggcacattaaagtaggttcttaataaattttggttctctctaaaactctatcaagtgtttatcatgcgtaaggccagtttggatcatggaataccggatggtaccaaattattaagaagtcgatgctcagggtgctcagagggaatcttcataaattctaagctgaaataccagttagaatgtgaaaaatgccacattgcaaatctagggaaatgagagttcagaggagggatgtattactcttagtgggagtatataaggaaaaactttatgacatcaatagcaattgaaataaaatatgaagaagtccttccctttccttacatactagtgcctattatttgaactttgcaggtgtagaaaaaagatattctaagtgatgagaaaaaaagtgagcaaatgaagataatatagggcatgtttgagaaatacctaatagtcaaagttggctagagcaaagtgcccattaaaaggaaggtaggagataatttggaaagctagattatgccatgtgttggagaatcttagatttcacctgcatgagaagctaggcctataaaggaagaaggcctttgccacgaatcaggaatcctaggctcttttcttactctgccactacctggtaagggacggtagagcatccaggttctacagtcatattgttctgtggtcaaatctgtttccacttatcaactctgtgacattgaacaagttatttcgcctttatatccccaatttcctcacttgtaaaatgagaggattagactagaccatgtctcctgaagtataaacttatttgtttataaatttggttgctagaaaatggcaaaggtttttcatgaaaaagtgtttttcaaaaagtgggaatgttttaagatcttccagatgaaataactggagaacttttattttctataacaatactaaacacatggtttaaggtgagagatctagtactactatcctgggcagtctgcaggagaggaaaaccaaataaagacaagaaagttatttgagttgggcctaacttgaaatgagaatttgaagaacagtagtgactttttttttttaaagagagggggaattatgagggatattgcagcaataacaataaaaaagacttggaacctgattcagtatcatttctaaagctaacgagcataggaagtattactctttttcaacaaaaacttacatgttttttatattgccatataagtgatctgatttagtcattacttttatttaattccatattactcagagagcttcaatgcatgtaaagtttccagtgatatagattggcacatattattgatctaataaatatttattgtggacctagtatgtgatacttttctaggtactggagacatagcagagaacaagacagatgaggtccttgctcttgtacagcttacatgctacaactgataatggtggaagagaaagacaacaaacaaatgaagaaaatggtagctaaaaaaaaaagtgagatgaggaacatagataaggttgatgtgatgggaatacctgagatgctagggaaggcttccctgagaaggatgcatttaggttgagagttgaatgagtgaaggagcgagcaacacggagcggcagagcaagaactttctaggtagagggaacagatctagtgcaaaggcccagggctggagctatgctttggtgtgtatcaggaattgaaagaagccaagctgccaagggcataatgagcttgggggagagtagtcagagatgagatgagagtataggtgttagttcacagcatgctgccaactccaaaagctcatttgtaatctcttcttggtcttgttgcaactttatagcccactatataacatccttcatagcagaaataaaaaaaacacatttactctcttttttcataccaacactaggaaaatgttcaaactcccaatttctcaggggagaaaattaggtctcaaagttgttcagctacttgctcaaggtcacacagcttgtaaatggcacagacgcgactcaaatcaggtcttatgattctaggaccagagaagtttccacttcccacggtgtcactttcccttcttatgtaattttaagagaacaaacagatagttactgaccttttatcagcgaactggcaggagaagcatctgtaactgaggatagatgttttaaccaaataacagtgagagtcccctgcttatggctgacaacctgacatgcactttcctgcagttggtttataagtagagaggtagagaggagtacctattggcagagaatgcatagagtaattatgtacttattttcctttccatgggaatcttatagcagccttttgcttttataatgccatgatttgatgattttccaacaaaatcaacttcatgtatctgggctgactgaaatatgccttaagataccatggcattttaaagcaaacgtgaaatgtggtaaacaagctggtatttactcatgggcactctattagctatttctgcactttgcccctccattaagttaactgccaggctgaggccattaaaatccagccttcttccttcaattataggcacacattaactctagatattctgagcctttctaatagagccatttgcagaaaggatttctattagtgtttctctcctttctgttctcatcctaaggcccctcctgcttcctgcaactttgagttctgaatatgcctatctgagagccagttgggatctctgtttatgatgcaaccccaaatccaggcatccgtttaaacgagtgcccagttacagagacatattgtacttctcttccttcagagagcagcatttgctttttactgggggctttctgactgatgcagggggcgaggaaggagagttggcgggcgtttgggagcagatttagagccgcttctcattggaggggctcgcttttcctgagctgccagacactgcaggctcaactgaggctcggaggtgcaattcaggctggtggagcagcgggggaaggcagggacaggcggggctagcgcggctctgcagctgatcacacgcaccaccacacacaccacattcctgctgccccggcttgcgcctcgcatcttccacccggggccaccgaggcgctgacaaggagtgggggaccgaagaaggaagaggcagaggaaaagctagagcggcgctactgtttaacctgaaagtctgaccggcagcccaaggctcgaaccccgtccagcagcaccgctgtcgcctggaaggagggcacagcgccaaggaacccacgagcccccgctcgagtcattctgtgctctgtgcgccaaggatctttctggcagggacagcgcggtgccctcagggaggtgcggagcttgggggacctgcattggcgcccatcgtggtacaccaggaaaagtgggaacgaggaaaacagccgtgagcgcagagtgcgaggccaggctgccgctaccgcccgctgcgccgcctcctgccctctcccgctgggtgagtgcccaggcttcgcgcactgccgtgtctcagctgagcgcgggggcggcctgcgggcccttgagggtccgccggagggccccggtggcgcccgcggaaactcggcggtcgggggacgccaggcggacaggtctctggagtccggaacccgggaatctgagcccggagggcgtgggtagggggcgttgcaccagtgcccggcagacatgcctttgggcgggattttggctaaaagataggagacaggtgcgccgggggtgcggggagcggtcccagggggcgggagattggggagcggcggggaggggggagggtctggtccaggcaggtaaaggcagcttcttaggcagccagcgagttggcaggtgggttgggactcgcttgtcaactcattaattttaagcagtcagtttgggggtactgcaggataatcaggagggccgtggggagtcaagaggtgacccgggatgccggtggtggggaaagaaaagaggagcctctggaagcttggaggcaaaattgcgcttgggttcctgttccttgcatccctcctggcttgagtgcgggagaacactttttaaagactcaccttggaaagaaggcctccgtcccaggggagaaggagaggcgtctgcagggggcagagaccgcagctacctgccgggtgcgccccccacccaggagcgctcgcttcgccccctttcctcccccgcccccacctccttattggtgctagtttgcagcgcccagctcctgcgccttcgcttcgcgtttgaatctggctcgccccttcgtattatgtctgcactccgaaggaaatttggggacgattatcaggtagtgaccacatcgtccagcggctcgggcttgcagccccaggggccaggccaggaccctcagcagcagcttgtgcccaagaagaagcggcagcggttcgtggacaagaacggccggtgcaatgtacagcacggcaacctgggcagcgagacaagccgctacctctcggacctcttcaccacgctggtggacctcaagtggcgctggaacctcttcatcttcattctcacctacaccgtggcctggcttttcatggcgtccatgtggtgggtgatcgcctacactcggggcgacctgaacaaagcccacgtcggtaactacacgccttgcgtggccaatgtctataacttcccttctgccttcctcttcttcatcgagacggaggccaccatcggctatggctaccgatacatcacagacaagtgccccgagggcatcatcctcttcctcttccagtccatcctgggctccatcgtggacgccttcctcatcggctgcatgttcatcaagatgtcccagcccaagaagcgcgccgagaccctcatgttcagcgagcacgcggtgatctccatgagggacggaaaactcacgcttatgttccgggtgggcaacctgcgcaacagccacatggtctccgcgcagattcgctgcaagctgctcaaagtaagtgctccccgccccttccccaccgggagacctgcgtcccccaaacccgcggagtaactcgtctgagaaccagcccgggccccctcccctggttctacctatagccacaggtaaacttccttttggggggttgggggttggaggactgggcaaagaatgcggttgacagttctgttccttttccactcactctcgtgctcttgtttatattcgtcatttcggatctgcttgtatcacttactggactagtaacacgtgaggactgctg

SEQ ID NO: 8742 - DNA, 6000 bp, Homo sapiens
tgggcaacagggctatctgctcagtgcaacccccagaattccaattgtctgtgctgtctccactccataccataactaagcctaggaagcgcctcctgaagttcttcactgggctgaattaagaacaggatcatcgttctctatctgggtgttttctaccccactgagagaggtgaaattgtcagaacaaaaatttaggaatttaccaaatgcagtttttttttggctgataattactattattaacaataatgacaatgataagcttagaaaaattaaacactaaacaatggctgccgtaagaacactgaaatgactttatagtttacaatcagtctttcgtctttcagggatatttttgtggacatctggtgccacattttagtatggggttcagagaatatcaatttacctgtttcttcatcatgctatattgagttatttactccacaataaaggtagacctactgatgagaaatgtcagggcaacctttgtgtatttcagttaccctcagcaaggtgctaccagctagcattagtgtatttctggtgttggtaacaggatcatgtgagccttgtagatgagaactccttgttgctcaggggatcatggaatgctgctctctttcagacagccatcttcggggaagagaagggtctctggcagagctctatgggtcctgcacttctctttcacctctctgccttgttctttcactcattaatttcttgacaatttattttccttaataactctagttccttctgtttatcttcttctgtcaatccttgcatccattgcaaatccatcacctgctctgaaataccacactgaagggaggtactcctaaagaccttccttcttttccactcttgttttacccttggcttacacaactgttgaacaactggagctgaggacaaaaagcacataaattccaaaggtcaacggaatcacttcttcatagtttacatctcctgtgtcttaagtagaactcaaatagaacataagcattgagaacagaggtctgagttggaggtcaagacatcgtttactagctgagggactttggctttatttttctcatctctaagagggaaaagataaaaatctacttcacagacctgttgctgggaataatgagataatttatgtacagtacttagcacattgcttggcacataaaaagtgctcaataaatgttatatatttataacattatttgtaacacctcgtctttcaaggaattatgggaattattctgtttgtcagactttgtttatggaaattatgtccttttgatggcccaatttttcttttccttttcttcatcttttgataacatactattaaatgtcaacaattcatactaattggaactagtgtaataagctgtcctcctcatcagtattagcagtctttgaacatggcataaaaatatgcccattttggcttacaggtccttgattctctaatgataatagtgcaggaaaaacattagatatggagttcaactttttaaaactgtcttgatgttggtgaccaataatttaaaagaggttagcatattttaaggtgactaaaactgtacaaatgaaattgccatttaaaaatgtctgttcatttgcttttctccaatgcagatattttaaataagaagaagtgaggcaagaaaaatgtaaacaaatattaggtataaactaggaacttagtcttttattttctgaatcagatggatgatatttaaaagtctgggtgaatgataaatggtagaaaaaaattaaataacagtcaatatgcacaacttaatggaggtaaaataagacttacttacttttatctctataaattaaaatgattttgaaaatcaagctgccaaaataaaggtgtggattttatcattaaagcaatgcccaagagacatgttattgagaaattatgtggcattggtttgttgttactagcgaaatgaatgcctaactgaagttgatttcataaagatttagtgtgtgtatgtacttgtgtgtctgtgtgtatatatgtatatatatatttgtatacacacgcacacatgtctaccatgtgacatgttgctatttttacaacttattttaaaacagctaaaattttctagatgagattaaacattttccataaaaataaaattacaatagttacctcaaagtttgtttatcctggaaaaaaaagtgctaacataagagttgttcaataatattttaccaaaattttgtcagaactccattaaaaacaattcaagaccacagtggtctaatttcaacactggcatcattaacctaacatatttatggaatattcactatatgttctgttttctgcttaagtatatgaattaaacatagtttaaatagtttactcaaagaacatgccatttgcttcattgatttcacactctctgacgtatgtattaataagaacataggaatccacacacagaaataatagcattcctatggtgcattaataaaaatgtatgaattttctatgtctaggacatgtattcattatttgggtgggtcttatatttcaggtactgttctgtgaaccacgtttatggaagtgatcaaaacaggcaaacatctctgccttcatggaatttacatttttcttggaggaggcagacaatagacaaaatatttagtatgtcagctaaatactaaagggaaaaaccagaggaggggatagtgtgtggtattgagggtcaaggccagtctcagtaagaaggcagctgtgagctgtgacaagaatgagggaagtgagccatacggagcccatgtaagagatttccaggcaaagagattaaaaggtggacgcctcctaaggaatggacatacctgccatgtttgagtaatgagaaagaagataaaatggctaaagtagagtgagtgagggcaagaataacatcagagaagtaaaggagtctagattgtgagcattgtgaacactggggaaggcatagactattcacaaggagatgggtagctactaaaaagttttgagaagaagagtatgtgatatgatttagggttgaaaaggattgctccagtttctgtgtcatataaccctatggtcttgaaactgggatattgtatccctgggggcatgaggtggcgtgcctagaggtacacaaaatcccaggatcagttagtcacatcttccctaaggataaaatttaccctcaagactatggggaaaaatgattactgtgttaagaaaaacatttaaattttatataaattattgtaaaattcccgtgattttaaaaataaagtatcaataatatttcatatttgtggcatcttaggctttaatcttacaggtttaagcttcttggccatcaggagtaatttgttgaaattgcaaattaatttggcaaaattatcataattatgtgccctgagagcttatgtatcttatgatagtgcaggaaacttgtgagatgaaatagttgagtgtatacattaaaataatttgatctaccaagtcactttaattatttatttgttcagtgttaaaaatatattttcataaccaaactaatacatcttaataatgttgtagaaatggaagtaaggtaaaatttaagaaactgggtttgttcttctgacttgcttattaatactggataagttactgaagagtgggctttggtttcctcgtctatttaatagtgtgggaacaaccttatgttaaagcaatctattcagtataactttagcacacagaaaataaaatattatgaatccaaagaaagtgtagcttgcaatcatgtattttattaaatgtatttatcagcattttggcttctgatggacatgtgtatatacatattttgtggataaaaaaattacttaactatttttatattagatactatcaattattctggctgatctggggacttttaatggtaaattttatatcaaatctgacaaagacagtatttcagacccgtttaagacctagaactcaccatgagttctaaaattggttctcagcaccatggacagcgttactgcaataggaaattaaagatcgatttggccccaaattaaaatggtgttgtaaaaaagtgggagaaaaaaaatgcctatccttttacttcaaattttaaaaaaatgatcctggccttcacaactgttcataagaagaataattaattaaacaaacatatattgagaacatcatatgctcagtaaaactttgattctataaatggtgtcatttaccaaatggattcttttgacaatttaattttctcttatctctctaagaagatgtaactacacactatagtatactactacaattatcaaatttcatgttgcatgtaacttgtcgtctgtatttttgtagttagattagattaactaaagatttttcaagtttgcctttaagtcatttaattttcctgccttatctttaacctttcaacattcctccaaacaatagcaacacaagtgttatgtgttaacttctctagtgacaaaaacttatacttctccacaaagagatgtgatgttcattatcaataagcttgacatctaaaattgttttataggagatacatattactttttcagatggtatataaagttaaataaatcttaagttttcaatgatgggaaaagcttccatttagtttaaacataatgtaaagaaatttgaatccccaaaatagaattataattctaaaaattcatactataattcttcttaaatgtttaaattacagttaattaaagtagttgatttcaaatagagtggaattatgggctgtacatcatttaattttatgtgctgactgctacatagccaaaggaacgtgaattaagatggttccacttttgaccaggagatggagctgtcatgtaagatgctgcctttatttatttatttttctaatttagcatgctgttttctaacagacattgggtaccatcgaatgactgtcagaacagaaagctaaggcaaaggagggaggatgctgtggtcatcctttcttgtttttttcttctttaatgaggatagagcacatgtgagattttactttctactccagtaaaaattctgaagaattgcattggagactgttatattcaacacatacgtggattctgtgttatgatttacatttttctttatttcaggtaagccagcatgattctatttttgacttatccacggattgttatctatgttaagaatgacatttaatataagatgtgtgctttgttagcttgtattcagatctaagagattcaaaagctctaattctagctgttgtgcaatttaaaatcttcctaggctgaaatgagctctgactatgacataccgtgttttattatttctttggctttctagctgttggtctctgtctctggctgtatttgtttaccttttaaaggtaaagctttcaaagtgaaggatgggttttcctttcacaagggaaatactgctccttaatgcagtgaacaaattgtagagatataatgaagcagattaacatggcagtggctctgccaaagctcagggctgagccttctgattgcagcctcagaggcaagccaatattctgagtccaaaggccttttgaacgatttctgctggctatgatggtacagattgtttatgtctttatttttacctcttagaaataatacgtaagtcatttctcccacatgaatcaagatttatgtaatgtgtttaatagacttggaatgagactatagaccctccctcctcccccagtatggatgtgaggagtatgctgaacacaaattaattgccatgaaaattgattttttctgtattttattggatttgggataatagaaccgtggccattttaaatagttgatattatagaaggtgctcacattttaaattattttaggtcatgtgacattatctgtgttaaagagtggaatgactcaggaggtggaagttgcatgcaacag

SEQ ID NO: 8743 - DNA, 6000 bp, Homo sapiens
aactggcaaacatgcaattacccggccccgcctgccacccccgctccccttccccagcccctcctgctccccttccttccctgaggctcccctctgccgccatggccacctctgaactgccctgggctctggtgtggagggagtgggggacctcacacaccccaagtacatcctgggaggctcagagagcaggagggcagggggtggtgaggggtgtctgagttcaaggggtgatctctgggaagccatctgccctccttccaagcccacacccctccccatgaagaagccccctctgaaattgatctttgccacagcctgggcactacaaggtctcggtgccagcgctgatcgctgcggcacccttgtgctccactggccacctcaagggggtgctgtgtgttctcagtctagccttcagctcagctgctagggttggcccctgccactgcccccacccccaaatccgcccgttctcgatcctcggtagtgcgtccctctgctgcccctgacatgcatggggtgtggggggcgggggctctgtcaatggcagaaaagtccccctctcctaggacagaggagagaaggatcaggaattccttctctcctctccccgtcgatgaccacctcttggcccctgatgaaaccctgccgtcttcacagccctcacttttcccacttatctccttggccctagtgtcttgccctcaaccttctcctccctgccccaccccccaattcccacaccgctccccacatgcccctcggagctctaatccctcctgctgctgtgccgccttatctgctcccagcagctttcgctgctgcaaagccctctccccctccttcctcagctctctccgctctctgaccagcaccccctcccggccagcctgtctctgccactcaggcccccgctgtggctactggctgacaccgcctctgtaccccatgccctttgccctctgcagcctcagctccgaggttgtcggctgcacacccactcccacgatggctgcgtccatcccagccctcccccgcaggccccacagactttgttagtttctggccagccaggatttttcatcttcctgccctccctttcctggtgtcttccccacttcctcctgatgcccccatcccatcttggacctggtgtccttatagtcccagggacccgttgccttggcttgggagtacccgaaaggagatgggaagtgttggtatgaaactcgggagaaggtgctgggctgggttggccctagaaagatggggtgggggtgcaaggagtactggcggacagtgggggcagggcctggcggtgggacgctaaccctcttcagtcgcctcagatcacgttcgggactccccaccccccttctctgggactctcattaaccgcttctcctgcctcgtccgcggcataaataacccagataaatcagccgccgtccgccccccgcccctcggcccctgcacagcccgtttgtcaccgctgtgtgctcaccagccaggcctggaccagcccagccccagcccccccatccttgtcccttaccgcccacatctgtcccacactggctcatcacttggtccgcaccagggccaggtgtctgggctggggagggtgtcctctgggtgcagggggagggaggctgggcatcttttggagaatgctgtctaggagttcagggggtcacagcatttttgaatggggccagccaggcaaggaatctgggcatcagcttgggggttcctgtgctttgagaaagcacccttggaaccccccaggttggatcctgggaggtctctgggtctgcctttggggcactttgcccaaacaaaatctccatgcctcctcccaggaaccttgagccagaaacccactgctctccctgtctctccccccgactgcatgcactgccccccccccacattctgccctgttaccaaacctcgtcccagtccatctaccactcattctcactgtcaggaagctcatcccctggggggcggaggcaggtgaattggactgggaataaatctgaggaatggggacaaccagagagcaaaggaacctgggatgaggcttcacattctgaccccgcaacacccagctccccggcactcccagtccagggtccctaacagccctgccccctttgctcacacccagctcagggcctggccagccacacttgtccctgatgcctcactgcaaggggcagctggtcccccgggagtgggtgggggaagcagggaggggtgggggagcttgggcgcagggccggggtgggggtggggaagaagctgggccgggccccagggaccagctgggcaatgagccggggaagcagccgggaggctaaatgagggagattatcacccaactgcagccgggcagagagggaggcaggcagggaagcggggagagggaggagagaggggacggggccagaggcaaagggggtatagagagacagggagggggccagagggcctggtgagaagcggagggaaaggtcaagagatgagctggaagtatgggggcactccctcagaacatcaccagattcctggagatctgggagactggaggctgggggcttggggacaattggagacagctggctgtggggcagtggtgggggtgtgcatgcagctaattgctgctccacttcctggcagcctggagctcccctcacagcaccccccgcatgccccttatacccagttaccacccgatttctttccttatagaggttgaaggcatcctgcctaccctcaggaggaaagaggatgtgatttgtctcatgatggaggccagtatgttgtcggggaagtgtgaccccaagatctcaatagatggtgggtgaatttagagatatgtatgcactccagggtagcaacgagtgctgcggagagtttggggggcagtttcccgctttcttggcaaagccccagactaaagtaaccttaaaaagcaattaaatcaccttttaaaaaaaacagtaaagaaaaatcaatattaggagaaaggagaagagagagaaggatggggaggaacagtggggggagttctggaaaggtttggaagtctaccagggaggggagagcataggaggcggctgcctgggcatgggacagagagagggggctgtctgtggtcacttggccactttcagtgctaactcagcggctttgtccaatgccaatcccactttcccttctgggacactatgtcccagccagatgcatcaccctgccccaggggtcttatcttcccagcttggggaaccagctgacccagactcattggaggcttgtggggaagcccagctgtggggtccctggggaagccactttgcctaaaggctagggacaacctaagcagggcaccacgcatggtcagggctgggtgtgtgggcaggctccatgctggggtgaccctgatggggcctgacctggccttgcagccagggtgggcaaagtggcttccagctgctaagggagccatccctaggcccctcccctggggccaggcagaggctgcggggccaggcctgacgcagggggcggggtggccgttgggcagcgggtggacctcgggctctaatccccagcagctgccgtttccctcagatcgattcctttctcactttttttctcagctgctggttctgcggcttggatcgatggagccacctccccccgcccgtccacgcttcctctccctgctgctcattagcgccccgattaatcagcccccctttcctcccggggacaagggcttcctcccccgtgagggcacatgctgtcggatggggccccagagcacaagcactgattcttgccacccccaccctgggggcatggatgcatcccctcctggccagtcaactgaggctcccacccccacctatgatgatggcccacatgcctgttcccctccacgagaacacagcagaccccttagggctctcctgccccactctgccaggcacccctcaaacccctttctttaggagagcattcgctcccattgacgcccagcacatcttcctgctcccttccacgcccccactggggctcttcctctccctccattgcatgccctgtccccctacatatagagcaccccggaagcacacctcccctttgctccctggcttgcttacccaacagccctcccccgaagcctggttgtggcaagggatttggggaacatttggggaagcaaagtggccacagatatgcaagctggccagggtgctgtctgtcccagacatatgaatgactgagattggggttgggggcaaaatgagggtgagggcagccagcctcccagagggggcaggggcatggtgggtgttgaagtctggagcaaagctccagggaagctgagaatcttgaagtcacagttgtcccctggtctgtctagcctgccctcctctgcccccctccctccgtcattcaaacaagtggctctctcaaggagtttctggaagctgctgtgagtcgggtagtgggatcaggtggtggctgggtgctggagtcaggagtctcagaggccaggaggtggggggatagagttggctgacccttcatggggtgtgggccaggaaagtggcaaagaatgagctgaggaccctgggcacggcacccttccctgggtggccaggaagtggggagatctggggacccagtgagcggctagggtgcagcaggagtttgggggatagccccagtcttgggatctctgtcctgggctggggactgccccctcccctggcctggctcctgacgcccgtgctgccggtgaaacgctgttgacatgtcctgaattattaagcgtggggagggctccggagcacatgctgagcggagcggctggggctgcgcggcgtggcggagcagcgctcgctccctcgctcactcgctcgctcgcagggacacacgcaggggctgacagctgtgctggtgctgataagggaagccacaaggagacgatcgaggagagagacaagcggcagcagaggcagcagcggcagaggcagcaccagggctgcggagctgctgggagtgggagtgactcccccacctcgggcccccaccctgtccctgtcctcttcccgcttgccctgagtttagaagagcagccgctgccaccactgccactcgggagggcaccagggctgctggctagggagggacagggcagggaggctctggccagtcccagcagccggggacagatgccgatcgagattgtgtgcaaaatcaaatttgctgaggaggatgcgaaacccaaggagaaggaggcaggggatgagcagagcctcctcggggctgttgcccctggagcagccccccgagacctggccacctttgccagcaccagcaccctgcatggactgggccgggcctgtggcccaggcccccacggactgcgcagaaccctgtgggcactggccctactcacctcgctggctgccttcctgtaccaggcggctggcctggcccggggctacctgacccggcctcacctggtggcaatggaccccgctgccccagccccagtggcgggcttcccggctgtcaccctctgcaatatcaaccgcttccggcattcggcactcagcgatgccgacatcttccacctggccaatctgacagggctgccccccaaagaccgggatgggcaccgtgcggctggcctgcgctacccagagcctgacatggtagacatcctcaaccgcactggccaccagctcgccgacatgcttaagagctgcaacttcagtgggcatcactgctccgccagcaacttctctgtggtgagttctgccagctgggctgcctggccttggatggccggaggctggggagtggggaggagtggtggcagtggtgtacaggggcatcctcaacagggcttcccttcattccaccaccagaggctggcctcgtgtttccccaagcctggcgtctccctctggc

SEQ ID NO: 8744 - DNA, 6000 bp, Homo sapiens
tgtcccaggctggtgggtctcccgaggcagggctcagggctggggccaggaggatgaggctgaggctcttccccaaccacgcatgattgtgtgccccctgtcccagcagttctgtcggcccaggggactcaggcgttgcaggcagcccagaggagcgcccagtgggcaataaaccgagtggcgatggagatccagcacagatcgcacgagtgccgaggtgcccaccctgccccccgtgccccagtgagcttgctgcctaccctgggcccattctgctgcctctgtcccttcccttcagtcttcactctcctcttgggggcagagactgtgttgggccgcaacctagactacgtttgtgaaggtctgtctctccgagtggaaaggacacgctaggcttggggcatggcctgtgcaaaggcagggaggcggaaacactctgggctcctgtggtgaccaggagaagttcatggttgctgaaatagaacccgtgtgggctggagggctgagcgcgaaaggagagatggggagagagaggctcggcccagcctggggtgaggacaggcgagagggcagcagtgagactcaaaggtctgtttctctgcaggatctgggcgccccaggcctcaagctctcctccaggacccacctgagccaggtgaggttgaaaaggctcgagggggcaggcctgagagccgggtgggcctcgaaggcgaggatggccagaacatgtccctcgtgacaccccttgcccctttctagggccgtgcggcgagaggcgtccgagcactgccaatgtgacgcgggcccacggccgcatcgtggggggcagcgcggcgccgcccggggcctggccctggctggtgaggctgcagctcggcgggcagcctctgtgcggcggcgtcctggtagcggcctcctgggtgctcacggcagcgcactgctttgtagggtaagtaggacccccaggccttgcccagctggggtccccggcgctgggccccgcacctgccgggttgtccggcgggcgacgcgcgggaaaggtggtctctgctgccccctggcggcggccggccccgggcttccccatctcaaggcgccgcgcccgccccgccaggatgccagcccggagggggtggcacggccgggcgagttcgccccctctgggacgggacccctccccggcccgccctccgtgcccccaggtggagaaagcccggcatgcgggcggaggggcagggtctccgaggggcctgcggggtgtgcccctgtccttcctgcgtctcagctgccgctcgacccgcagcgccccgaatgagcttctgtggactgtgacgctggcagaggggtcccggggggagcaagcggaggaggtgccagtgaaccgcatcctgccccaccccaaggtgagaaggcagtccccaggcccccaaggctgggcaccgcacccccacccgtgcttccttgaccctgcgccgcctccccctcctcagtttgacccgcggaccttccacaacgacctggccctggtgcagctgtggacgccggtgagcccggggggatcggcgcgccccgtgtgcctgccccaggagccccaggagccccctgccggaaccgcctgcgccatcgcgggctggggcgccctcttcgaaggtactgggcgtgggtgagccggcgcgtggtgggaagaactgggggtccgaggtaatagagtgtagggaggccgggttgccttggaaaaatgctgcctgctctttcaaagggggaggaatcaaggggggtggtgggaaggggaccctcaaggcggggctcttgccctccaaacctgagccttccaccccttccctgcagacgggcctgaggctgaagcagtgagagaggcccgtgttcccctgctcagcaccgacacctgccgaagagccctggggcccgggctgcgccccagcaccatgctctgcgccgggtacctggcggggggcgttgactcgtgccaggtatgaacccagtctgatgagaaaaggccggctgagccttcccagggccactacggcctcttttccttccacgtctgtctgtcactcgacttctctgagcctctctgtcctcatccctaaaatggacacaagtggcaagctcacacctgccaggcgtaaggcaggcgtcatagggggcaggtgaatgcagcgtcctctctcttggccccgcagggtgactcgggaggccccctgacctgttctgagcctggcccccgccctagagaggtcctgttcggagtcacctcctggggggacggctgcggggagccagggaagcccggggtctacacccgcgtggcagtgttcaaggactggctccaggagcagatgagcggtgagcgccctctttccaatgccccgtccccagtgccccaacggacaaccgtgggacaagcccgtttccacccggcccatgcccattcccagctcccttctgcctcgggaaagcctgtctccttccggggaaggagtgagggggctagggccccaaacagagggtgagctgacccctgtcccgcccgcagcagcctcctccagccgcgagcccagctgcagggagcttctggcctgggaccccccccaggagctgcaggcagacgccgcccggctctgcgccttctatgcccgcctgtgcccggggtcccagggcgcctgtgcgcgcctggcgcaccagcagtgcctgcagcgccggcggcgatgcggtcagttctgttcacccggacccggacggggggcagaggggagggggcctggccagcctctgaccgccgctccgactcctgtccggtccgcagagctgcgctcgctggcgcacacgctgctgggcctgctgcggaacgcgcaggagctgctcgggcctcgtccgggactgcggcgcctggcccccgccctggctctccccgctccagcgctcagggagtctcctctgcaccccgcccgggagctgcggcttcactcaggtaccccgcgccctccagcccagcccagccctggcccggccccacccgcgcggcacagccactttctccgccgaggcggtaccctaaccctgtgcctccccaggatcgcgggctgcaggcactcggttcccgaagcggaggccggagccgcgcggagaagccaacggtaatgacgccccctgccgaccttcaggaggggataggctgagggcctggacgaggtcggaagcgcttctactgcagctccggaaagggcttaccccatggggcaacagggtggactcgttctcccctccccgccatagagcgtatgactcttttggagtacttgtggttttagctctcatcagtgtcaaacagagatgctttgcctggtgttactgcttaacttctccgagcctcagtttccccacctatagcataagaggataagtgtgtcccctgggaggccatcctgaggtgctggtgggagtgccacccccagttccataccgcaaccgttcattattcccggggcctctcctcttcctccaggctgccctgggctggagcccctgcgacagaagttggctgccctgcagggggcccatgcctggatcctgcaggtcccctcggagcacctggccatgaactttcatgaggtaggtccccaggcttccagactccttcacgatggcctgggaaggctgagacccagcccagggaagatgcagagggcccagcccagataccctcccagcagcctggggtcgcctctgccccagctctgggggtaggtagagggtccgaggggaagggagtggggcctgcggagtgtgagccaggccactgggggtggtggtggggagagtgagtagaggggtgggtgggagtgtccacatgagcgggaaatgagcagggtttccaggtctaggtgagagtttctggggcccagggggagagggggtgacctctggggtttcaactcaggagtgagtttctgggcccctgatccccactcctccatctgtaggtcctggcagatctgggctccaagacactgaccgggcttttcagagcctgggtgcgggcaggcttggggggccggcatgtggccttcagcggcctggtgggcctggagccggccacactggctcgcagcctcccccggctgctggtgcaggccctgcaggccttccgcgtggctgccctggcagaaggggagcccgagggaccctggatggatgtagggcaggggcccgggctggagaggaaggggcaccacccactcaaccctcaggtaccccccgccaggcaaccctgagccatgtctgggcccccagcccctggggaggacctactgctcccaggggctgagaggggttcgggagcataatgacaaactgtcgctgccccagtggctgggtgtgtgtgggtgggatggggtgggggtcctgggccccccgtgtcttcccaggtttacaatcagagaatcacagctgctttaataaatgttatttataatacacggaaacaactctggagctttcttgggatgggacctggtgggtggacattcagtctcaggggtggggcccaggcagggctgcctctggaagcagttggcaagggtaacagatgctggaaaggggctgtaaggcccctatctgagcctatctcctgcctcctgagaagcagcagcagctggcctgcctgttgccccgcccccgtgcatggctgcccagcgctggccccagtgcccagcgtctccgcccagcacccccccggccctccctccccaccccccgcctccgagctgcggggagtcccagcctgggatctttgcctcatgtccttgggctcctgccctggctggcccgtcccccaccgccatgaggtgtcagattgtgtttccggctgcctcttcccgttgaccccctcctcccccaacacctgtcccctctcccgcccaccctcattccacagccctgtagacaggaggggcagatgcacgtcccagtcagagggatgggatggaggggccagtgctgacactggggctgctggctgccctggcggtgtgtggtaagggaagacaccctccccaccctggggtcccccgtgatgcttacccaggccccacaccgcatggctcctcactcactccactcccactctgccatctctccctgtggggggccgccttctggggtccccactcccagggagtggttgggttcccccctgctcatcccaacctcatggtccagcaggacctcagggcagcttccttcctgagtcccctgcccagggccccattcagtccttgtcgctgaccctccccaggcagctgggggctgaacgaggaggagcggctgatccggcacctgtttcaagagaagggctacaacaaggagctccggcccgtggcacacaaagaggagagtgtggacgttgccctggccctcacactctccaacctcatctccctggtgagaggccctccggtgctgggttgggagggagggcagggatggctttccagtaccaggatagccatggaggaagctagaagcccccacctggcctatggccactcccttcctgggaaacgtgctgcggctgctctgtgccctgagaggctgctgtcctgcccctccagtgtcagctctgcggtgtcccccaaccacacccatagcatgccccatctgtgacacacttcagaggccactggtcctctctgctccctggcggcctacccactcctgactgcgagtgatcagggcccagatgccacggtttccctgggtgccaattgacagtgggtgaatgtaggctgggtgtggtggctcatgcctgtaatcccagcactttgggaggcccaggtgggtggatcacctgaggtcaggagctcgagaccagcctggccaacatagtaaaacctgatctctactaaaaatacaaaaattagccgggtgtgatggtgtgggcctataatcccagctactaggaaggctgaggcaggagaa

SEQ ID NO: 8745 - DNA, 6000 bp, Homo sapiens
ggcagcagccctgacttgctgagatgggggagaagaagagaggggtctatccaccttcctcagcccctaggagagacccctgggcctcagttcctctctagccccagagccctgtgctacagcagagagggaggctatggtctgttcccgcctcctcaacagagtgatcagccctgcctgtggccagaggggcctgggaccttgctggggacaagccagcattatcctgcaagcccgaggcagcctctgcaggcacactgagccgccctctgcctccatggctgggccccagcttgggggtggggctttgtggcctgaggcccttctcaccccactctctctgcccctacccacaggagaaagacagctggaaccgagtggcccgcacagtggaccgcctctgcctgtttgtggtgacgcctgtcatggtggtgggcacagcctggatcttcctgcagggcgtttacaaccagccaccaccccagccttttcctggggacccctactcctacaacgtgcaggacaagcgcttcatctagggtgggcctgttggggagccaggagacagcagggtctgagagaggagccacagtccctaatgacacccactcctagccctgaggctcgtgcccctcagactggggaagagtccaaggaagggagggagcagccactcctcaatgctcaatggctcccctgaaatcaagacaggggccacccgagatggtctgagggtggacatcggctacagtgggtgggcaggacgatttggggggaggcccgaggctggctcaggggccagggaggaggccactcagggtggcctcagggggagagctctgataggggtgagacagatagggccccttctctgcttctcctcccccaaggtgtggggtagagcaggcaggaatctgcgccttcactctctggcccctccagcctccctcttcctacctacccttcaacctcaggcttctgaggcctcacctgggactgaggttgaggacacctccctccctccagaccccagagtatcctttcctagctctttctgccttgacctctctgcctaggtccctttgggaagttgaggactggagtggaaaggtcaggatcgacatccacaaagacttggggtcagcctgaggttgcacacacaatcctagaggaccagaacgcagcacctctccccaaagggtccctgccccccagcacctactcctctccaaattagggttgtcatgcattatttggggcatacatattctaaaaaatcattcgttgtttctctgaaatttgtcccctatttttatttgctaaatctagcaaccctatcccaaaggcagcctccactcaatcttatcctgagggccaaaggccaaggctgcaggaattgggagacaagggtctgtttgtatggtggtccacctccaagatggccccagtgatgcccagtattcacacccttgtgcagtcccctcactctgtaccagggtgggtctgggtaaccaatagaatgaggcagaagtgatggtacctcacttcccagatttggttaggaaagacactatggcctctttcttgctcattagccctcattctcacatcagttggatctctcactttggggaagccagctggcatgttaaggagccctatggagaggcccacatggcaaggaactaaggcctcctgccaacagccacgtgagtgaatgtggaagtggatcctctgccccagtagggccttcggatgagatcacagcccagtagacatcttatgtgcagccccatgaaagtccctaagccagaaccaccagctaagtgactcctggattcctgacccccagaaactgtgtgagataataaatgtgtgttgttttaagtgacaacgttttggtgtcatttgttacaccagcaatgtgaccttgagtgagctgctcctcatctcactcctcaccttccatcttctaatctgcaaaatgtgtgtctagtaagtcctagtcatggggtgttgtgaaaattgaatttctagtaggagcattttcatgtgacctgcacatttaatgggtggtgatttaacccatttccctcaggggggaattggtgacctcattaactcagatatacagaaggtgagatttttaatgtttagatgtaaccaaggaaaaagaaaaaccatttaaaaccaaaactgaccctagtaacttctgccttccagcatgaactattcacaaaattcaaggtacaaatctttaattgtcctgtctaaataggaaagccagtttgttctcacacctgtcaggtgagcaggaaatctgagacttccccaggaatagcccatcaactcagggagggtccgtcttgtgcacagagagtctagggccctcagccacagtctttgcttctctctgcctcatggtggcgctgctggcagcaggtcttggttcaaccaccaggtgagtcctcagttctattaggccctgctcaagtggctgtggacttccagagaagacaaccccaaaatgtcacacaaaaccgggggggtgcctcctgcacaggctcccagggtcaccacagtttccaccagaggcacccactcccccagcacggtggtgctgtcaggactggtccactctgactgacatagaactccatcttctgtccccaggaagccatgctcacaggcacagctttccgggaagccagagagtgttccttactctctccagaccaacagggctaccctctctctttcaatggacagtgaatcagtaatacactggcctgcaaggaacagaaagctgaaggaattgtagcttaaacacataaggtttcctttttctcacatagtaataatagggaggcggaggtgatcatgttggctcggctgtctaacaaagctatcagggacccaggcattttgccatctgcccagccctgcctccatggcaagttggcttctgtcctcagacctgttggccccagtttgtgagctgacagccacagctgcacacttagcacctatgttcaggcagaaaagggccagccatttctgacccctttcatcaagaagcaaaacttttccataggccgggcacagtggctcacgcctgtaatcacagcactttgggaggctgaggcggctggatcacctaaggtcaagagttcaagaccagcctgacgaacatggtgaaaccccctctctactaaaaatacaaaaattagatgggcttggtggcgcccgcctgtaatcccagctactcaggcggctgaggcaagagaatcgcttgaacccaggaggcagaggttgcagtgagccgagatcaagtcattgtactccagccttggcgacaagagtgaaactccaactcaaagaaaaaaaaaaaaacaacttttccataaagctccagtagacatcccgcaggtcaaaacatcacatggctagcctatctgaagggagactaggaaatgagtatcttgctctaccagccattataacagagggtggcaaaggagaagtagtgttagacaattctacagatgattttctctgaatgggtcctgtccctgcacacgtaacccctgcaagaaacttccattcctcattgatgatttacccttcggagaacaccaagaaggcttctaggccatctctcccagagcagagaaagggagaaaacaggagggtggagggtaggggatgcagggacaggtggtccactgtttggcagtgcttcctgatcatggaggccattgaatttggtaaaatgtgggcatggaggagagtaaagaggtggagagaaactggtctgcaaaagaggataagaaaactgcatctagggggaccagagggcaaaatggaaaggcaaggctctcagaagtgagaaggaaacgagggctttgtaaattccaggaaaagtgggccacacagagagaagctcagtgggggggatgcccagggagggggaagctcaggaagggggaagctcagggaggaggaagctcagagaggaggaagctcagggaaagggaagcccagtgagggggaagcttagggagggagaagctcagggagggggaagctctgggaggaggaagctcagggaaagggaagcccagtgagggggaaggtcagcgagggggaagttcagggagagggatgctgagtgagggggatgccgagtgagggggaggccgagtgagggggatgcccagtgagggggatgcccagtggcaggccaagatgggtggatcacttgagttcaggagttccaagactggcctggccaacatggtgaaaccccgtctctactaaaaatacaaaaaagaaaaaagaagaagaagaagaaaaattagccaggcgtgttggcgcatgccagtagtcccagctactcagaaggctgaagtagaagaatcaaggtggaggttgtagtgagccaagatcgcaccactgcactccagcaaaaaacaaacaaacaaacaaacacaaaaaccctcacatgcctacccaacagccttcacacccacccaaatcctgactccctggagggagtaggaggcagtccacctcagccctctctggagccgctgtcaggttcctcggcgacctgccttccctaccacacccagctggccctggctgtccttgccccccatgtggaacatggaggtgaggctgggacaactgagcccgagttggggctggaaggtggatgtctcttttggggcagacggggcccctgtctcccctctccagcccaggtaacctgagcccagcattgtgtccatcctggaacagctgacaacgctgtggtcagacagctggtggggctgggccaggctggccgggctggctgggctggctggggtgggagtgtaggctgttatatgacacccagagcccatctctctctgccccagaccttggagctgttgtcccacccctgtcactgcagagagctgaggcaccatgcatgggggccaggggccgctgctcctcctgctgctgctggctgtctgcctgggtgggacacaaaggaatctcagcctggggagtcccagagctggggtccacagcctcaggggatggagggtctgaggggtattggggcctgccctggacccagttccctgagtccccacttcacacccccagggcctccccgctctttccacctccaagctcctgctaggctcacgcctgtctattgcaggggcccagggccggaaccaggaggagcgcctgctcgcagacctgatgcaaaactacgaccccaacctgcggcccgcggaacgagactcggatgtggtcaatgtcagcctgaagctaaccctcaccaacctcatctccctggtaagccgcaggacggaggaggggtcagcgcaccacgccctgggacctgctggggatagcatggggtggctccagccaccaagaggttggagggccctaaatcggacaggctggggtctggaaaacccccatggttgtggggggagtactatcaagaggctgggggatgcttggccccattggtggcctgtggggactggcactgaagtcgggggctgagccctccatactacacccttgcacccccagaacgagcgagaggaagccctcaccaccaatgtctggatagagatggtaagaggccaccctgccaccctccttccatcaggggtcccaccccaccaccccaaggcctcctgagagttgcctgccccgttcctgcctcttctgtcctcttgggctggatgcccactcctagggctgtggtgcagcagagggcagaggcctagcaactgcccctccccctgcagcagtggtgcgactatcgcctgcgctgggatccgcgagactacgaaggcctgtgggtgctgagggtgccgtccaccatggtgtggcggccggatatcgtgctggagaacaagtgaggagggggtgcaggcaggggtgtgggggacaaaggacacagggtctgggcccagcaga

SEQ ID NO: 8746 - DNA, 6000 bp, Homo sapiens
ctacatcctcaggtaccacgtatgactttgcccactgcaccttcactgggaatgagtccaagccactgtgtgtggagctggatgagcacaacctgccccggttccccgagtggatcaccatccccctggtgtgcatctacatgttatccaccaacatcctgctggtcaacctgctggtcgccatgtttgggtatgtgttcagtcacatgttcactgatgtccaccctgggccaagccccatgccaggctggaggtgctgggagcatcgcaaaggtcccacccttgaggaacatactttagagatcttttgggggattggtggactggagggagtggggcctttttaaagggaccatattaaaaatataagctgtgccttgagtttatttgacactgaagacaagcacctgtgacaatcttcatcaaatccagactgcatatttggcatccatttagcaagctctttggagctccatgaggttggtaccaatatcacccattggtgacggaaatgtagtttaactcatctccaaagtgccttatatgttatggggctcagtggtatggattctaggattacaggactcagactttagttaattactgttttaaatttttcagtttaaatcagaatacaaagagcagagactggagagtgactctcctttagggctcatgcctgatgaggttggagggaataatattggtaattctcctttatatatttagaaaatgatgtttttcatttcctctccatctttcttaggagggtttcaaagagccccagtggtagtttcagtgggagagccttggttttatattgttccttcaaggtatatcagcattttaagtgcacaaatcccatcatggtcagaaagaaaattaaccaacacatatgcacatttaatacattatctgttaaacctttgggtggaagggaactctttattcaaaaccagaaacctagaaactctgaatgagaagataaacatatttgattatataaaacagttttatataattgataaattagggaaaatgtttgcaatgcatataatgaacaaaggcttttatctcctaatatagaaagagctcctgtgaatttataagagaaagacaactcatagaaaacttgtcagagaaaataaataattcagagaaagaaaagtccaatggccaataagcacataaaaaaggacttaatcttgtggataggaaagttcaggtggaaacaatgaaacgctgttttaaacccagcagatgaacgaaagttaaagggagtctctggtgttgggatgatgctgggaaatggacattgctactgggaacctgactcacttcccattcttaggaaagtacttcaaaaatagttattaaaggaaaaacatgcaaacctctgtcggaactctctcacatctgggaatctatcctaaaggtgtatgtacaaagatgtttattagatcactatttgatgtctatcactagggagaggctaaagaaagtgtgctgtatccacactgtggaatattatgccgctcttaaaagacaaagtttgatctatatctgttaacttgaaagaatggtattttttaaatataaaaaacaaattgcaaattaattttatggcataatattgttttctaaaaataaaaacatggactttaaaaatcaaatatatacttctctggttacaatgatcacacattacattcataatttagaaaagaatataaggaaaagacaattgtcaaatagagccctgagattccaagatgctcaaggactacagatgagggtcacctgcctcatttgtccagtggcctccccctgagcagggctgtgtggaagcacatacctctggggacatcacatagcaaaggggctgagcagtgtgtggccatctggtctcccagtgtccagagatgtccttctccagtccactccagtcttctttacactgtgaccaaaagtgatgtttctaaaacatcaccgatgtagtttggctgtgtccccacccaaatctcatcttgaatggtagctcccataattccctcaagttgtgggagggacccagtgggagataatcgaatcatgggagcggtttcccccatactgttctcatggtagtgaatatgtctcacgagatttgatggttttataaggggaaaccccttttacttggctctcattctgtttgcctgctgccatccacgtaagacgtgacttgctcctccttgccttccatcatgattgtgaggcctccccagccacgtggaactgtgagtccattaaacctctttttttttttttttctgtaaattgcccagttttgggtatgtctttatcatcagtgtgaaaatggactaacacagtcattgttctgcttaaaattctggaaggatttcaatatttccctacagcattcaggataaatttcagtcttctcagcttccccaccatgctcatcccctgctctctgtcccccggcaggcctcccatatgctcctctttaaacagggtgaactgctatgcctgatgctttgcacatacttgtcctctgtctggattgcctgttccatcccgaacttctcttcctgcccagtttctgcttgccctttacagagccaggaatcatcttttgccagggtggtacctgatggcctccccacttcacacagagactctttgagcccctatggcactcttttacttgcatggtaacaaccttctctccttgagaatggcgaactctggagggtgaagattgtgcccgccatctcagcacctgtcactttgtgggtttattcaatgaatgaaaaaaatgggttcttacccatgtttagttcattatttagttattaggagcttagcttcctggtgtattatatactgagaagcaccaatggtgagtaacaaatcagcaagagaatcatcatgtaaaggtttaacatctgctctgtgccaggtgcctgggccatgaagattatgtggctgctagttccacatggccctaagaagggaaggggaaactctccctcaccacctagctggtggcagggagggacttgaggatccagaagcctgtctgactcacaggcagccagccaatgtcatgatgtccaaatagtgtccaaaagtcagaggggccaacatctgagctgcagagagaagcagcaggttatgggtgattatgtctccacaagagagggagcaaaacagaccaatcccaaaacctgaagcaaaggcgagggcgaagtgggatggcttcaggcttttctttacagtgataagatgtcatagctacactggatagtcctgtaagaactcaccactaactatatttacagacattaaacaaaaagaccaacagctcctaaaaccatggcctttgagttatgctaacttggtaaatctcaacgaggcacatggtaaaatatttagagcttttttgaatctatgcacatgagctgtctgaaggagccattcatgagaaccgggcacttttgtaatccattacctgcattttgataatgaaatgattgaatttggagctgagaaagatgggagcctcgtctgtcactttcaggtgaaggagatgaagtcccagcagctcagcgtctgtggtcctggccgcgcgttatctggcttaactcaggtctcttccccacgaggccagagccactgcatcacatcctactgttgccccagtcagtgcttaagtgtgacagcttgcaacatccctgtccttggggaacctcctcgattagctccggcttaaaccagaggccttttcctggctaatacctgtctggggacaccagaacagcgagagacgccgtgttgttatccttaggttaaatccttggaacactgtttctgatcatttttaaagttgttcagggcttactctgtgagcagatggccccaggatgtgacccttccctggcaccacatcaaaatactcatttaaaagcttaaccatacacaatggcaaccttattaactgcaatgcaaatgtacctttgggaattctgaaggagtattggagtgctctctagatggtattcaacagagaaaggaaatggatgtgaacatctgtgattattctacattaaaattatcgatcacagggcctgtgtggcttatcagcggcaggaagtgaatttaaagtcagtaaatgactccaggtcgacttaccaggagctagggcatttataagcattgtgccctgaagataagttcaccccaggcagttctgaaaaggactcgtcaaacatgtcctgctgtagaataatttctaaaaatgtttttcagatcttaggagtaatataaacatgcagaaaagtagaaggaagaaaataatgacctgatacaaactaaaggtttgagtgctgtgtgaacagtctaagggaggttattgaattggggtgaaaagaatagaaagaagagcgcagataattgtaatagtaacaatagctaatatttattgaagctttcccatgctgggcacaggttcaagtgctttacaggggtcgcctcatttaattattactcatttctgtgtaggtgtgtagccggtgggctagttcaggttcttgactttgggacagaaaataatttgaaagtgagtcaaaagcaaaagcaagcaagagagttgactgcaaagccaaagtacactctagcagccggtcagaacgggccactcaaaggcaagacagctctgtctaatactgggggatctccctttatgggaaatttgcatgattattcatgaaggggtggtaaggggtgttgctattaagcatgttaggagtggtttcttaggtccacatgtgcagtggctgtacatgctagtacatccatcgcatgtcttataagcattttaaatctccacctgggggtgtgttttttactattataatgagcacaggtcagcccaaggacactaatcacgggtttctgtgcttgtacaaatgtggggatttttctcttctgctcctgcctttttgctgtagggtgttctaaccacgagctcaggatgcggtctgtgcactgttaggtggtttgttctcttcatcaatttgacaagtttcttgtttcctgtcaagggaggctctgaccacctcatctaacctgcctcaggtgcagccttattgccattttacacgtaaggagtgggaggcagagaaaggttaagtccctgatattaagggaagagatgacatggaaacatatgaatataatatatataatataatgtaatacaaacagcatggagaggctatttgcagaggagggagttattaattgtgagattgttggctgggggagcctaggatctgcagcagcagctaggtggaggtgatgtttgcttgaaagatcatgtacccagagccccaagtgttggtaggagaggtagaagcaggggagataatgttagtctagggaggaatcagcagccggggagggtggaaatgtaggcaggggctaggttatggagagtcttttatagtatattaaagaatttggactttttcctgaagttgaagagaaatgtcatgggtcttcgtgcaagtatatggcacagtcttagttggttattctgttagcaatatactaacctgaattatcaattccaaaatcagtgtgatccaatcgcttgtcatctcttactgctggctgttgttggctttgtacctgcttttttgatgttgcagaatgagaggggaaccaggatgtgttacacagtttaacatacacaccagcgcatcagagagagcgaaaagtcactgtcaccacgggccatggggcagtactggctagatactgcctgtgtgctggggaaggagcgacaaaggaaaatccatgaaatctacgcaaagtttggaggaggtgtccatctgatagggaattagctgacaagtttcttgtatttcagtgtatttgaaaattctgccattgttttagcatctactttttccttgtgaattttttgcagac

SEQ ID NO: 8747 - DNA, 6000 bp, Homo sapiens
cctccagtcagactcctgcttccccagaataattttatttcaaggggcctttctcccaggtcctgggctgtgaccagactctccccatgcttttctcaacaagaccccttaatcttaaattcacagaagacaaatcagatgtctttcccttccattctggaaggccctgggtaaaactggttcacttcttcccagttaccagctctgtgaaacatggtgtgaggaaacatttgccaaatgacttaaaacataaaaggttttataaaaacctaattccaggagaatggggggagaagagctgctgcatctatactactaagaaggcaacgcaactgacccttcacaggatagcgataaccatcttctccatatttaaaaaaaaaagtatcccgttacacagctaattgccaataagtaatgcagacaatgagtactagaggagttctgagaacaagaagatcaaagaggtttgaaggcaaccagaacattttgaatctgctactacttggaatgcaaaacttgtcaccaaaattttaccatcacagattaatttttaagagaaagtattttggaggaaactcctttattcaaatttaatttcataattttctctgtaacacaactaaattgtttcaaattttctcatttctaaaagcaattattttccttgggataaatttctttctttttttttttttttgagatggagtctcactctgtcgcccaggctggagtgcagtggcccgatctcggctcactgtaagctccgcctcccgggttcacgccattctcctgcctcaggctcccgagtagctgggactacaggcgcccgccactgcacccagctaattttttgtatttttagtagagacggggtttcaccgtgttagccaggatggtctcaatctcctgacctcgtgatccgcccgcctcggcctcccaaagtgctgggattacaggcatgagccaccgcacccggcctccttgggataaatttgtttccattttttggataaagattatctcaattcatatctttttttttttttttttttttttttttttttttttgagacagagtctttctccgtcacccaggctggagtacagtggtgcagtggtgcgatctcggctcactgcaacctttgactcccaggttcaagcaattcctctgcctcagtctcctgagtagctgggattacaggtgcctgccaccaagtccagctaatttttttgtatttttagtagagacagggtttcactgtattagccaggatggtctcgatctcctgacctcgtgatccacccgcctcagcctcccaaagtgctgggattggaggcatgagccaccatgcctggtccattgtatttgttttttaacagctttactgagatgtaactcacataccatacacttcattcatttaaagtgtacaattcaatgctttttagtatatttacagagctgtgcaatcatcaccacaatcaactttagaacatttttatcacttccaaaagaaaccccatccccattagcagacactaccattctcctgaacccccacccctaagcaaccactaagtgttttgtctttatagatttgtctattctggatattttatacaaacggaatcatacagtatgtggtcctttgtgactggcttctttcatttagtatgttttcaagatttatgcacattgtagtatatattagtacttcattccttcttattgccaaatatgtcattgtatatactacattttatttattattaatcaattaatggacttacagattgatcactttctactttttggctattatgaatggtgctgctatgaatattcatgtacaagtttttgtgaaggtacatttttgtttatcttcttgggtatatacctaggagtggagttgccaactggttccatttgaccttacctaattttctgggttaacactcctatattgtgtttatgtgcgtgcatgtgtgtgtgtgtgtgtgtgtgtgtgtgtgtgtgtgtgtatggcagaaagacacacagagagagacagaaaagagaaagagaggccgtacctatttgcgtgtcttatctgaaatttttgcatgcatagcagattcaataatcatggagttgaaaagatggcatcaaagtgattggctcaaaacatcctacaaaggaaaaactttctggaaaaaatgtctaacttgagttgagctggtttttgtaaagagctggagagaagagagaagatagtgctgtagtaggggccacagcacaagtaaaggcctggtgattgggctggatatagagtacttggggaataagtaaaagttagtagaaggagaggctggaatgatttgttaggaatcacctcatcaaggtctttgaatggcagcctcaagggtttaaagactacatttttatagctttaggggagccattggagactgtggtttagatacttcaatcacatgatcatatcagatgggcatgatcacagcgatgactggcaggtgcaggcaggatggacctaagcggggagacactaagcaagcccttgtccttaggagtctattgcagcaattcagggctgaggtaaaggctctgagcatagccagctggaagtcagtagcttaaatattgatttagtgggcaaaagccgcatttatcacggggctggttccctaaaaatcctgtgcctatgtgcagggaactcatcatttccctattacacaaattgattaggtcattcggagctgagattgatgccagagatttgctgctaatcaagctagaatagcaagttggaggacaagacaggccttctgccaactgggcaaggaactggtcccagaggcagagaatactgcagcgaagcaccctgtgtttgcttgggaagtctgggcaaagatagcctctgagaggcctggcaatgcccttcagttacatctggagtctccagggcaactcctagaatgacacatctcagggcttctgtcaagagctgaccagccaagcggaatccagccccagaggtccatgacagggctgtcctcactgtgtactgaagctgttaagagtgggggtactgggggaacagggcctagggcagcatctgtggagagtccaggggagccaaagccttggagaaagagttgactgttttggcaataataacaatagtctgcaataacaaaaatttgtgtttgtatacaccttctgctgtgctccagaaaagagggaggttcgactttcttggtggataagatattctccccctcacacaacgataccctaggcccattgtaagaagagccctgcaaaactagccacatgccatccagtgccaggaagcctagttctgaaatggtggtggtggagtttccacccatctgtccctaccacagagggaagtgtacttggctccatctataaactgaggcagcatatctgggaagaaccaaatctccagagcaccctggtttgggacaatcaacaccccaagtcaaatgcctttcagctttcagcagctctcctgtctgcgaccggccctagtttcgaaggcgggaaatgctcagtgagtagtggagggaacacttttagtactatgacccgtaattgactgacgctgctgccaccactttgggttgaccttagcccgggattggaaatgggcggtagggcagggggcaggggtctgctttttgccaccgctcacccacctgggatatctaagtacagtcaccattattatttttattttctgccatcatatcatcaccagggtcttgcttcccgcagtccatagtaagcgggaggacagggaaggagctggctgcccgaagaggatgattttccgcctgtactgagggtgttccacgccagaacttttgtggccccggcaaagccggcttgtgtccagcagaggagcacccgcagccgcgcggggcatccgtcgtcttttcctgccgcggtggggcgtaggggggcgaccatttcccaggggcgttccatagcacaccgttccccgcgccggcctcaggggagctgccagtgagcttcccctacacctcctctattcctctactctctaccgcacccagggtgttattccccgccccgggctagaggggtcggtgagctggggtggcgcgaggagcccggcagtccgccgggcctgggctctttctccctgtggcaccttggccccctacccgcgcttgactcctcccccgtctctattccgcagcgtccccgccctgtcagcagcctgcttcagcgaccgcacctgcctcgggtggcgggtaggggggtgcacacgggaggtagaaaggaaaacagggaaggtttggggtgcacagcacagcggggtgagcagccttgcccgcgcctcggacccctggcagccctagcggcgcccgcccgcggctgcggcaccgatgcgctgtccgcggtgctgacgccggccgcccgctcggtcgggagggggagcaaacgccctcgttcccaggtcgcccggagcccagcgaccgcctctccccgattccccgtttccagtggaacccgctgcgtcctggggctgcggttcgatccagggcaaaggagtgaacgaagggaacttaaacttcggactaacgcccgagaatccagtgtcggcgattcgcgtcgcgcggcctccagccctggagacctcagagcaccaccaacttgagcaaagtttcaccgcggcatgagataagggagagattccagaggcgaagcgcagggaggagcaagacgaggttccccggcggagtggtagcccgcaccgcagtcggacacctgctccggtgccccgcattggtgccgccagagccaccgggaggcgtcgcagcagcccaactctccaccccctccctcctgtccctactcacccctccccaacaccccgccccgggcgccagtgactccgcctctccctgccgggcggctcttcggctggagctgagaaaggagcgcttccccggactcggctcggctccgaggctctgaagccgacgccgccagctcagccccgggggcgggagcaggactgcccgcacagcccgcacctaggaggcgccgatcccgaacgcctcatgggacgcccccgggggctctctccacgccttgctgccgcgtcccggtcctaggcgcccgggatccacggcccaccccgcccgcagcccgcggcctgtctggagaggagtatgaggcccggggccccgcggacgccggccaccgggcggcaggggcctagctgcggagccccgcgcccgagagcggcgggtaaggagccgcgggagccggcgaggcgtcggggcgcgcagaggagcgcccctgcccgggcacccgctgggccacgggactcgcgtgtggcctgagcgccggggaggaggcggaggcgcccctctgtccgggctctgggaaggcgacgaggggctctgcgaaggcggcgaggggctccgcggcggccccggacccctggccaccatcctcacgctcctgctcccgccggggggatgtcgtggcccgggccccgagcgccgccccggccccggggctgagctccggaccatgtcctcccgcagcccccggcccccgccccgccgtagccgccgccgcctgccgcgcccctcctgctgctgctgctgctgccgccgttcgcacctcaacgaggacaccggccgcttcgtgctgctggcggcgctcatcggcctctacctggtggcgggtgccacagtcttctcggcgctcgagagccccggcgaggcggaggcgcgggcgcgctggggcgccacgctgcgcaacttcagcgctgcgcacggcgtggccgagccagagctgcgcgccttcctccggcactacgaggccgcgctggccgccggcgtccgcgccgacgcgctgcgcccgcgctgggacttccccggcgccttctacttcgtgggcaccgtggtgtcaaccataggtgagcggcg

SEQ ID NO: 8748 - DNA, 6000 bp, Homo sapiens
agatctcattgggttgagatacgtgtcacaactggggtattcagagattgactcaccatctacctactgccttagactccctcctgaaagcttatggtggaggcattgggtaaaagggacattcttgatttctgggagtctgatcccattatttccactaaccattttcagtatttgtcagtgtgagaagaacatctataacctctgcccacccccacccccactccagatatcagcaatgcacagtcacccattatcacatgagaaaatcttgtacaaacagatgtcacttttcttttcctgcgttggttccttctcttctgttagtgaggactaaccaaccagacaagtgaggtctcattgcagcaacattgaaagaaggagcctttgaagttaaagataagatttcatctgagggcttcagaggttatttttgagttggtgcatatctcttgacccagctaagattattattttacattcatttgttcaattattgtttattacaaatgaggcgccatcttcttatattccatcctgaaattcctagcaaacagatatccctgttgtctctgcagtatttataattggattgactcagcctggtgctggacaaggataaccagctcaatggacggctctgatgatggtgtgggtcaggtgccacactgactgcctagacatcaaagagcttgatagaaatgcagaagctggggccccactcatggaaattatgattagaaaggtctgatattatgatagggcatttggtgttaaactagaacaggaggtgatgctgatttgggggccatagaccctaggtgaatatattgtgctgagtagagtagtctgtctttcctattttaaatgctaaggtgaggcttccagtccaccagctgctcactctctgagttctcccagaggcgacatggtctaagcacttgattacaggctcttgcccatatctactctctttctctggccctggggctccatgttggacattttttgcccaactcagagtgagacaaaaactaaatcatgctcaccctaagatgtttcaaggcacctttctagtttctctctaatttgagaaggggatggacatctatatgtttggtttcacatttgaaaagctaaaggagcttttgggagagttgcagggagggcaggttggaatcctggaaaaacagacagacattttcagaattgtcagaagcagaggtaaatagccagttctaagaagcctccagggtttcagtaaatgtgccagttctagatttttttaattcagaaaatgcctgggtcaaaaattttaagaattataatccaaataaaatagcagtgcaaatgacagcctccttttttaaaagtccgaatagcgttccattgtgtatatataccacattttctttatctattcatatgttgatggatacttaggtttcttccatatcttggctcttgtaaataatactgcaggaaacatgggagagcagatatctctttgacaaactaatttcagctcttttgaatagacatcatttgtgacaacatgagtgaacctggaagacattatgccaagtgaaatattccaggcattgaaagacaaatactgcatgatctcatagaaatgtgaaatctaagaaagacaaatttttggaggtagagagtagaatggtactttccagaggctggggatgagggggtgaatggggaaaggaaagatgttggtcaaagtgtgcaaaatttcagttagagaggaggcataagtataagtgttctattgcacatcatgatggtgatagttaaataataatgtgttgtatatttcaaaatgctaaaggaatagattttaaatgtttccactacaaagaaataagtctgtgagataatggatatattaattagcttgatataatcattccacaatgtttgtgtatacgtacatatatatattttatatatataaaataacatcaacttgtatcccctaaatatatataattactatttatcaattagagacaaaatattttttaaaatggcagtgcatatttatgcttttgagaaagttgcttacttaccactttcttttgcaagataacatattctaggaatttgttggctgaaattgtcagagtgagaaagttgagtccagaattaagtggacgtattgaagaatagaacctgaagccaaactggactgacctggaagcagaacatagctgcagtcagaatccaaggagaaagtagcaaaagtcaattaagcagcctagataaactgtttgccacagacaggtaaaaaagtaggcatcagatcatcaacgccaaattggaagtaaccaacccaagtgaaaaaataatccaaaagcaaaatccaagtgggttgaagtcaagaggtatttaaagaacgtttattcacacagatggttgcaaaatttcaagtggattgatgtcattttagtcaagctgtcctttattcctcaaacttcagtgtgcaaattttccatatctgggctttggtaatacatacacatggtgcgttatgttcaagtaatatagaaatattaactggaaagcaacagaatcctctgacacctttttggactctttccatagatgtaacacttcactcatgtccagaggggaaaacattatgcacatgctaacgtatacaactttatgtatataatcattatacaacattttattcaaaggtgaatgatgcaagttgttctcaactttacattttcacttagtaactgatttggtgaaactttccgtatgagcacagacatatccatctcattcctttttgtaactaactaggtattccatgatagcaatatactagaatttttgttattagtcccttagggtagacattttatttctactctttggaattaaaagtattatgttatgataaacatccttgcaaatatgacttctcaaacttcagcaataatttctataaagcttaattgctgggccaaagagtacatgaaactttatttaagagactgttggtcgggcgcagtggctcacacctgtagtctcagcactttgggaggctgaggtgggcagatcacctgaggtcaggaatttgaaaccagcctggccaacatggtgaaaccccagctctactaacaatacaaaaattagccaggtgtagtagcatgcacctgtaatcctagctacttgggaggctgaagcaggagaatcccttgactcagggaggcgtaggttgcagtgagccaaggttacaccgctgctctccagcctgggcaacagagtgagactccgtctcaaaaaaaaataaaaaaaaaaaaagaaactgttgacaagtagcttttttaaaaaactgcactaagttatattctcacctgcactgtgtgtgggtagcctttgcctccatatcccagcctgtaaatggtcatattcattgagatgaatctcaattatgtctctacagagttagactattaaaattattgatttaggcaactttatgtctatcctttagaatttcgttagcttcagtcatcttcctcataggtttctgcttcctagaagtcaatgataaaattttcatagccttccataaaaattaaaaaaagcaatgcatttaatatcatttgggttgtaaaccctggaggggaaagcattctagtcagaaagctctaagggaaaaggccctgcattagagaatttagctgtaagtcattatggaatgtgagaaagatgaaatataagccatgatatatctattaagtgcagtcaagttgcccaaaccaataaaaatgtcaatataagttggtcactaaattgctaaattgatcagcaggtatgagtcctacattctcaacaatacagattatgtacaatggtcacattaactctgtatctttgcttatgccgatggtaccttctgatcccaagttaacttagtcttattatcatcactgctttgtttttacacctatctaaatgtcattggtgcaatagacatgttacgttgtccatgtctgatgtacagcataattgtttcaaaatagcttgaaaacaactaagtgagaagtcattttatccttatttcctgctgcacacggaatgaaattggcatttgcaatattatcctcagtctattgatccactgtccttacttttttgtttcatttttcttaatttatattatcttgctctatggtctacattcttgaatgtgaacctcaatctttttggaatgcattaggaatatatatttaatatagaatagaacattcgacaattctatttggcaaagctaatctaacatttgttttgtctcccctaggatcaactccagtttctcagaaagcacagagattgattctttaggtgctgtattttcaattccctaagatgggaataaatggaaatgaagaggctgtgactggcctgggcagtcatctcctacaggtggagaatctctctccacagcttgagtgcattgctggcaggctgtgctctagaaataaaactgagggacaggggaaacaattgggaattgtgagtagggaagaagaaaaatactgacttctggcattccttttcttccccatccttcattatctaagaaaatgcagctgcagttgctgtttcaaaatgctgttgatgcagcctcttgcatgggaactgggctctctagagacagcattcgctcactgattgagtggccatgtaatttatcatccaactcaggatgtttctgaaaaggaaaaaggatgtaattaatagttaatcctcaacaacaggcataaacccaaactgcctccaagtaacctagaactttaggaaacattacttaaacatgagattggatgggttggaaaggagaggacagagtggaagaaaaaagaaagttgttatcctggaggtgggtgggagccacatgcaaaagtgaatgtcccagttgtgtttgtctgatttcaagctttagaactgttttgcaacaggtcctccaccatgtgaatgccaacatggccaggtcattagagctgagggaaaactagtgcccaaagatatgaaaagagtgtggatcttctggagaagtgctgttgttcaacaggtatttgcctcagcaactcctgtatatgctctatctctcatactcaggctatcagatgagaaaaaacaaacaagaaaatgtaatgatgtgtctgcttgctttataaagttggttgggtgaagcttagctatcagccaaggcatctttctgcctagcagtctgcatcagattcatctcaaaggctgcagcacaagctattctgaaatagtctgtctggattgggccactggctcctagattttcagtattagccccaggagatttctgatatgcactccagagcttgtatgatcgaaatcacctgtaccaagattttctttatctatagctctcagtaccagcgtgttaaccagaggtcatcctctcatcttctctgtactcgtagaagctccaggacttgggaactgcagatttgacactgttatatctggtcaaccttccagggtctggtacattgttgaaggttttgtgtctatctgaatctaacatggagccagacttggtgctaggggtttatgagtgaccttatatgacactggttcagaactcttctgtctattcactgatttagggtatcatttgtggatctatgagcttagttccactgctgaggagaagctggcaacaatgaagggtcaaggaaatctacagattaagtctaaccacagattaagaggatactcaaggaggtcagctagttctgagaggtcccgaagagtcccagggatgtcctaattctggaactttttaaacagaggttgagagatcaggtcttgcatcttaggggaacaattagtatcaaagacctcaggatgaagggcaagttataatctggttgcatcatacagcctcctttgtattccgctgagaagcagcacaggctactt

SEQ ID NO: 8749 - DNA, 6000 bp, Homo sapiens; identical to SEQ ID NO: 893

SEQ ID NO: 8750 - DNA, 6000 bp, Homo sapiens
gatcatggtcagtgacaaatgatttggtcatgaccaaaaaccactggaaactaatgcagcacaataggctatttctcaaactagaaagcctaattaaaagcagaataataaaattatatatttacatcactgttactatccctgtgaaaaagaatacgtgcatgcgaatgaaaactagaaagtaacagaaaatatacaattgatttattaggttgactttcttatttttatttttgacagggtcttgctctgtcacccaggctggagtgcagtggcacgatcatggctcactgcagccttgacctcctgggctcaagcaatcctcccatctcagcctcccaagtagctgggaatacaagtgcaccaccatgcccacatattttttttaattctttattttttgtagagatgagatttccttatgttgcttaggctaatctcaaactcccaggctcgagcgatcctcccgccttggtttcccaaagtgctgagattacaggcatgagccaccacgcccagctaatttttaaagttatattatgactaatatagtgatgtctgtaaatttttttaaatatggcaactaaaatcaaaataatccaggtacgttgacagagaggagctgagcaagactcacctctcttctatatgatatacttctattaagtcagccttatttctcattaactttttgccaatttttgtggagacacatcaccctgaggcttcgcatcttactgagcgagttctggtaagccacgtctcctcttcctgtacttggggggctgactttttggacgctgatacagaactttacatgtgttcctgttatgtcttttcttggcctgtatatttagtgcatcattgaaggctctcaagatttttttggattttgatttatactccttagtcaccatatattctgagtgcatgttagctatacattctataactccgtatccatattaaaatatgcaggaaactccatatgttcacccaaggccgtgataatgatgtcaaactgagcagtactgagtcccagagcatatcacacctattagcgagcactttgatgccgttcacatcacaatccacaaaaacagccttgcatccagcacactgattgccagcttagcaattagaaaaggtgattgtccttcttttgtgggtggaaaatgaaggctttaggcttagagaaaagctcaagtgatttcgctgggccaggactaggctcagttgtaaccggggccaagcttgccctcagtatttaaagtctcacctgtgccctttccccctgatcttacccacctcctgctatggcgcccatcccatgccacgctcactggcctgcaggatcctcaaatgtgctcctcaatttttcctaccaaaactttgtatttgattctttatccacactctatctcatggagttattggcattttaaaagggatccaagtttgaaaatagagagatgacgttccaatggtaggacttcaggcattgatggtcagacagtagaaatttggagagtggaaagctggcactggggtcttaagggcagcccctatagcgactgtttgcaaagctgacctgaaagagacagggagtccccaggggacaagatagattagatcctatggtcccacagtcctcctcaagctcttaatggtatttggttagaatttctaactcttcaaatcttgttcattcatttaatttaactttccttctattcttccaactgccaggtaggtgagagaaatagatgccatcatcttgattgcctgagaaggaaacaggcaaagtgggctttaaagacagaaaataactgcttttccccaacttggggcctccccatcctgcaattttgcactgactgacagaattcctgcggggaaaactgaggcatcttgcttctcatgtaaaccttgcctgtctcctcataaatattttatttcccaaaagccattcctacaaattgccttatcatttgccaaggatctagaccatctgccaaagcaagttcacacatccctccttgctgataactgggtttatctgtttgcatttctgtgtatcgtcggttagtctggcttatctacttatgagattgtgtgttctttaacacactggacaccatatggcccccagcagagacagcagtcctgttgcctacctatgggcactatttgtgtgcctttcaaccctgactataaaatatcaggtccctagtacatctaaaatttgtttggactgggaagattttacaaaattagaatcaaaaatttagttcttcccgcccctatttttaaagcaatgtgtacaatatgcatacagaataaataaataacaaattatttacacagtgaaactaaatgaactatagctacaagcaacatcaccaaatcttactaacctaatattcattgacaaaagcaaatcccaggagactacatagactatcacattgtttctaaatttcaaaaacacaactaaacatcattgaggagtcccccgagccacacatgtacacacttacgctcagactcaatacatctgggcttggctggtattttcctttcatttcctggcaccgaattcacaggtggatagaactggtctcatcaggctccctggctccagacttcctcagctcctgggtgctactcttttccccacagacccctccccacttccttagtgtcctggctgaggctgaagcaacttagcattcacctggcccccacccccttcctcccactctcacctgctctgtcagaaagaggagatggtgctttctccatagctctcttcttcctgtggtctccctattctaacaaacaccaaaagactttgggtttctgagaatcgcgctccttggtctcttagtgccatgggcctgttagagcatcccactaatttattcagaggttgctgtatcctgcatcttcacaaaatcttgctgtcccttccacactcgaccatgcctcagttgaagcttgagcaataattggaaaggtccccagaggccactccattgagtgagcattgggccaaatctggaccctccatcatggcagcctaggatcttgcagctcgatgacttttgcaggcaaattcacagatacatccccttcagtctctttccattcatttccagtctcttcatctgtttccacttttcagacacccaaagttcttcaatgataactattgccacatacatcattccctaggggccaactatgtgcccatttctgtgctaaacactctatctcatttcatcagactcaggacacttctccatttcttgattaattctgtgaggtcttgttttccccttcaaatcttaggaatgatgtgcatttcagaaacaaagtccaaggggatttttcaggatgatgccttaaaatgatctcatgatcactactatttactccaaaatcaggatttaagattcttttgaaactctgaaatgtttctggacaacagaaaataatcatctgcttccagtcttccctgaggacaagccagcaggaaacagctttaacttgttgcataaattaatgagattagaagaaataaagcatttcctgacaatgagaactataaaaaaaatgcacataacaactgaggcacgtggagattcataattgaggcacgtggagattccctggaataagaatactgaagtcctcaatgaggcaaagtctcatctattatattttctcttgaaattattataatttcaggttcctttcagaagcccaagtaataaaataagaattctcctctcttccaacttctgtggctttggcttccttttgttgattcaccacttccatttatttgctcttccactaccagagtcccttgaatctgaacgactaagcctgattttctttgggggaaaatttgtctaggttttacttcccccctttaagacatgacatgtgtgcacacatgcacatgtgtgtgtgagccattctaattctttatttcttcagtgaaaaacatacacttcatctctcccttcaagtattgcatgaactcgatgaacttaagccttctaaagataatgtgttcaattaacaggcgatttgataagtatgctaggaaatgccatgtactccaagtcctcagagaagctctggttagctggctgcggtgggatctgcttttgtggagtttcttcccatgagggtatcagtcaagagaacctggaacccaagaggcttgtcccaggcaaggaggcttggattcctcccgggacctgctcctgcgatccagaaccagagcatgcaattgctggtgagggaaaggcaggattcggtcttcatccttcatggagaggtgtgttcttggaagtacaccttctgggaggaaaatgagttttagtaaataaagttattttctccaaaaagagtttaagttccttgggcttcaataggggttaaataattactagctggattggtggttttaatttttagttcaggaaatccgatgttatctgatgtgatggaaggaaacaaaaactctgcaaggagaatacacattgtcccaaagagaaacttgtttctaacatcttccctaagatggcaaacgggtccaagactttgtgcgtgtgtgtgtgtgtgtgtccccacctttaaacttcaaaccccagatctctgttgcttactcatccagtgtggattacactaccagcaaaacatcccaggaaggagtccagggtggccgcccacagttaggagagaacccagaacggaacgacggacttgtttgctttcttgcccctgactctccccgtcctccctgggagggttggggatgtgaactaatgacttctgcctctttcggaccgcctttgaggctccagagcctcaccttactttcccacggagagggaggccacaggctccttcagcagtcgccgagcagagtcctgggccgggagcgcgggggagggagcgagcggaactgcgcctaggaggccgagggaggaggcgctccgcagaccctggcgcgccgcggagaagctcaaactttggcagggtaaggatttttaggggctcttgagctggaattttttggggggcgccgggaggtgtgctggggccgcagaccccatacaggaggtaagttagagaaccacacgcaggggagggatgctgctgcttccaggggcgggcgcggcgctgtccgcagcccccggtgctgaaacgggccgcgggctggagagaaagtgaaaaaggatcggctacggcctcggctcccactccccggctcccatacccctccagtccagttcaaaggacaggaagccctccccgtgctccccaagccgatcgcacccccttttactcacgtcccacagccgcgctgggccgagcccgctgagccgtcggggcgggaggcagaaggagcagggctggctcccgctggggacgggtagggcttgcagccgcgaccccaccccatacatttcctcctgtcacgctgtccccggaccgccagtccgggaaggacccacttccccggctccaagtcgggagcgggcgccgcgtcttctcgagtccgcgccgcgccgggggaggttgagtcagtggcctggagggagcagggccgggggaaggcagcggcgaaggactgccccccaacccaggggactattttcccttggggattcaaagagaaaggtaggctgaggaggaggcgagaattaaaattcttttaggagtgcgcggttactttttttaatgataaaatcacacccgggatctcggacgcccggggcttagtgctcggtgatggaggagaaggggcggcgggctctctgatcctctgcaatcccctaaccggataaaggcgccgggctcccagccgtcaggcttttctctttagctcagcccgcggcccctcccgacgcccctgggggccttggcgcgcaggccctcgcagtcccgcaaccccgggccgggtgattcatttttctc

SEQ ID NO: 8751 - DNA, 6000 bp, Homo sapiens
caaagagtgacctcttcccagatatagcaaaacttatggtggcaatgggaatgtgtcaccttttgatgtatgaaagcattagatccccaggcctgcccatctcttcattgtacttttggagaatggtaggattaggagtaaaggagtattaaatataataccatcttccccagacagtaattaatatttctggccatgcagactgtcacgtggtatgtcacagtggcaataagtgaatgacgagaagacagactccagggatactgagatgttcaaagccttgcttttgtcacagttggccgattaagtcatttttagaatttggacttctcaggggcagaggttttttctttcatattagatatactcttttccccacaccgttcagttacataataggataagtgcatgtagaaagtataaaacacagaatcatattcttcatttttgaagttatagttattcatgatattactaattttggacacagcaaataagacactgccagaagtactttccaggcagaataaatatgtagcttgctcctagccgagtttgttaaatatagctttgatcccccccaccctcatgaactgtatggtagttttctcgtaatctaccaccctatctttaaatgttagactccagatgattttgtattctgcagttacattttccagatcttttctggctttgtggcctggcctgaaattgtgtgcctctctctcctttgacccattctgcttgcagtgtttcacttcagttcatcagacagcacctgattaggaggccttccatcatccattccccacacatcctcctggcctctgcacaacggggctggctgccctccagaacctcatcctggaagcagctgccctcacaggaaaagatgagtttggttcatctgtgaacattttcaaggagttgaactcaatgtcacaaataggtcaaagcctcagtgacatttaaagtgtgacaaaatggcatccttaaaaatatttaatttccctggcaggactgtgtcattaaaagaatagaaatcttgacaataagcagatgtgttttggaatccctgcttcactgcctatctgtgtaatataaatgctaacctgtacagttctaagcacattacctggcacattaaagtaggttcttaataaattttggttctctctaaaactctatcaagtgtttatcatgcgtaaggccagtttggatcatggaataccggatggtaccaaattattaagaagtcgatgctcagggtgctcagagggaatcttcataaattctaagctgaaataccagttagaatgtgaaaaatgccacattgcaaatctagggaaatgagagttcagaggagggatgtattactcttagtgggagtatataaggaaaaactttatgacatcaatagcaattgaaataaaatatgaagaagtccttccctttccttacatactagtgcctattatttgaactttgcaggtgtagaaaaaagatattctaagtgatgagaaaaaaagtgagcaaatgaagataatatagggcatgtttgagaaatacctaatagtcaaagttggctagagcaaagtgcccattaaaaggaaggtaggagataatttggaaagctagattatgccatgtgttggagaatcttagatttcacctgcatgagaagctaggcctataaaggaagaaggcctttgccacgaatcaggaatcctaggctcttttcttactctgccactacctggtaagggacggtagagcatccaggttctacagtcatattgttctgtggtcaaatctgtttccacttatcaactctgtgacattgaacaagttatttcgcctttatatccccaatttcctcacttgtaaaatgagaggattagactagaccatgtctcctgaagtataaacttatttgtttataaatttggttgctagaaaatggcaaaggtttttcatgaaaaagtgtttttcaaaaagtgggaatgttttaagatcttccagatgaaataactggagaacttttattttctataacaatactaaacacatggtttaaggtgagagatctagtactactatcctgggcagtctgcaggagaggaaaaccaaataaagacaagaaagttatttgagttgggcctaacttgaaatgagaatttgaagaacagtagtgactttttttttttaaagagagggggaattatgagggatattgcagcaataacaataaaaaagacttggaacctgattcagtatcatttctaaagctaacgagcataggaagtattactctttttcaacaaaaacttacatgttttttatattgccatataagtgatctgatttagtcattacttttatttaattccatattactcagagagcttcaatgcatgtaaagtttccagtgatatagattggcacatattattgatctaataaatatttattgtggacctagtatgtgatacttttctaggtactggagacatagcagagaacaagacagatgaggtccttgctcttgtacagcttacatgctacaactgataatggtggaagagaaagacaacaaacaaatgaagaaaatggtagctaaaaaaaaaagtgagatgaggaacatagataaggttgatgtgatgggaatacctgagatgctagggaaggcttccctgagaaggatgcatttaggttgagagttgaatgagtgaaggagcgagcaacacggagcggcagagcaagaactttctaggtagagggaacagatctagtgcaaaggcccagggctggagctatgctttggtgtgtatcaggaattgaaagaagccaagctgccaagggcataatgagcttgggggagagtagtcagagatgagatgagagtataggtgttagttcacagcatgctgccaactccaaaagctcatttgtaatctcttcttggtcttgttgcaactttatagcccactatataacatccttcatagcagaaataaaaaaaacacatttactctcttttttcataccaacactaggaaaatgttcaaactcccaatttctcaggggagaaaattaggtctcaaagttgttcagctacttgctcaaggtcacacagcttgtaaatggcacagacgcgactcaaatcaggtcttatgattctaggaccagagaagtttccacttcccacggtgtcactttcccttcttatgtaattttaagagaacaaacagatagttactgaccttttatcagcgaactggcaggagaagcatctgtaactgaggatagatgttttaaccaaataacagtgagagtcccctgcttatggctgacaacctgacatgcactttcctgcagttggtttataagtagagaggtagagaggagtacctattggcagagaatgcatagagtaattatgtacttattttcctttccatgggaatcttatagcagccttttgcttttataatgccatgatttgatgattttccaacaaaatcaacttcatgtatctgggctgactgaaatatgccttaagataccatggcattttaaagcaaacgtgaaatgtggtaaacaagctggtatttactcatgggcactctattagctatttctgcactttgcccctccattaagttaactgccaggctgaggccattaaaatccagccttcttccttcaattataggcacacattaactctagatattctgagcctttctaatagagccatttgcagaaaggatttctattagtgtttctctcctttctgttctcatcctaaggcccctcctgcttcctgcaactttgagttctgaatatgcctatctgagagccagttgggatctctgtttatgatgcaaccccaaatccaggcatccgtttaaacgagtgcccagttacagagacatattgtacttctcttccttcagagagcagcatttgctttttactgggggctttctgactgatgcagggggcgaggaaggagagttggcgggcgtttgggagcagatttagagccgcttctcattggaggggctcgcttttcctgagctgccagacactgcaggctcaactgaggctcggaggtgcaattcaggctggtggagcagcgggggaaggcagggacaggcggggctagcgcggctctgcagctgatcacacgcaccaccacacacaccacattcctgctgccccggcttgcgcctcgcatcttccacccggggccaccgaggcgctgacaaggagtgggggaccgaagaaggaagaggcagaggaaaagctagagcggcgctactgtttaacctgaaagtctgaccggcagcccaaggctcgaaccccgtccagcagcaccgctgtcgcctggaaggagggcacagcgccaaggaacccacgagcccccgctcgagtcattctgtgctctgtgcgccaaggatctttctggcagggacagcgcggtgccctcagggaggtgcggagcttgggggacctgcattggcgcccatcgtggtacaccaggaaaagtgggaacgaggaaaacagccgtgagcgcagagtgcgaggccaggctgccgctaccgcccgctgcgccgcctcctgccctctcccgctgggtgagtgcccaggcttcgcgcactgccgtgtctcagctgagcgcgggggcggcctgcgggcccttgagggtccgccggagggccccggtggcgcccgcggaaactcggcggtcgggggacgccaggcggacaggtctctggagtccggaacccgggaatctgagcccggagggcgtgggtagggggcgttgcaccagtgcccggcagacatgcctttgggcgggattttggctaaaagataggagacaggtgcgccgggggtgcggggagcggtcccagggggcgggagattggggagcggcggggaggggggagggtctggtccaggcaggtaaaggcagcttcttaggcagccagcgagttggcaggtgggttgggactcgcttgtcaactcattaattttaagcagtcagtttgggggtactgcaggataatcaggagggccgtggggagtcaagaggtgacccgggatgccggtggtggggaaagaaaagaggagcctctggaagcttggaggcaaaattgcgcttgggttcctgttccttgcatccctcctggcttgagtgcgggagaacactttttaaagactcaccttggaaagaaggcctccgtcccaggggagaaggagaggcgtctgcagggggcagagaccgcagctacctgccgggtgcgccccccacccaggagcgctcgcttcgccccctttcctcccccgcccccacctccttattggtgctagtttgcagcgcccagctcctgcgccttcgcttcgcgtttgaatctggctcgccccttcgtattatgtctgcactccgaaggaaatttggggacgattatcaggtagtgaccacatcgtccagcggctcgggcttgcagccccaggggccaggccaggaccctcagcagcagcttgtgcccaagaagaagcggcagcggttcgtggacaagaacggccggtgcaatgtacagcacggcaacctgggcagcgagacaagccgctacctctcggacctcttcaccacgctggtggacctcaagtggcgctggaacctcttcatcttcattctcacctacaccgtggcctggcttttcatggcgtccatgtggtgggtgatcgcctacactcggggcgacctgaacaaagcccacgtcggtaactacacgccttgcgtggccaatgtctataacttcccttctgccttcctcttcttcatcgagacggaggccaccatcggctatggctaccgatacatcacagacaagtgccccgagggcatcatcctcttcctcttccagtccatcctgggctccatcgtggacgccttcctcatcggctgcatgttcatcaagatgtccc

SEQ ID NO: 8752 - DNA, 6000 bp, Homo sapiens
aaattatgtcctcatctatgaaatttaatatgccattttcttagtataaatttatttctagagcatgtattattaatgtggatctttgtagaaaaaaattgtggtacaatgtttattactacatacccttatttttttaaattgtcttatctttcatataactttttgctgatgtcatcatgtgtaataacatgattttttaaaattttaatttagaaaaaatatattcctcttgtataaatgagaaaactaaaggaaaagagtatcgaaaggaaaacattatagaaatatcagaatttagaatcccaattcttaagattttttattttctgactacttcaaataatatcgtttgcctttctcattattcatgggtcttccaaatatagtgtctggccttaaaagttgtaacacaaaatcttctgtctgaaatgtagtacaactgaatgaaatttaaaaccttcacgtaatatatgtcatatagaactctcataaaatatcagtatgatgtgataacaaaggtcagaacaaatggaagaaaaaccaatgtatgatttctgaaaaccttatcctgggaaatgagaaacagactataattctttacttacatctacattatgcaaaagtatctttgatgtgaaaaaatactcagtgttgttcattcgatgttttatatgttttggtaaaacattttgtgttcacccttttaaatattccaagacacactcactggctagaatcaatgggagagaaagaggtgactctataactaatataatgttaaggaaactgcacatatcttggtatgtttctgatagtgcataattccagaaaatgtcttaagcattgcataattgttagaaacatgaaatctgcagccagcaagcatgagttccacatctgaccctactctttccagttgtgagaacttatttgtattttaaactactgaatttcaggatgcctctgtttattcctgtttctttattttttaagttgacagtatttgtacatattcatggggtacatagtgatatttcaatacatataacatatactgatcagatcagggttattagcacacccatcatctcaaacatttagcatttctttgtattgggaacattcaatatcctcctcctacctatttgaagttctataatattgttaagtatagtcatcctacagtgctatagaagctataacttatttctcctgtctagctgtaattttgtatcctttaacaaatctctccctatcttccccagcctctagtatcctttgttccattttttacttcttcctcatgttttaaagggaaatgattacagtatctatttcattaggttgctataaggaataaatggtttcatagctcttaaaatagtgcttgacaaaagtaggtactatgtgtagatttttattaaaaaaagtagatactatgtgttattattatgactaatcttctcccaaaaatatgtttggtaaatcatttcataaatttgtttattcttaatttattttgaattagaatcatttgtataacaagttggtatattgctgagcacatctgtaaagtaagacctgaatatggatttgataattgaagttgacactcatcatagagatttatgaaatattgtgcgcttgattgcagtaggacaacttactatggggaaggaatcttgtaagtatcttgcctggccagtatacatggaagttggtacacatggaagatataccatatgtatatatcccgatattgataatgttactttccaaaagtggaggcactgcaaatatgatgagaatgtgactagagcacgcacttgtttgttctttctgtccagcattaatttcccccttattccagtaatagtaactcaacaactctgctctttgtcatttcctggtgtttttttcttttcttttctttcttttttttttttttttttttttttgagactgagtttcactctgttgcccaggctggagtgcagtggcatgatcttggcttactgcaaactccgtctcctgggttcaagcgattctcctgcctcagcctccccagtagctgggattgcaggtgcccatcaccatgcccggctaattttttctattttttagtagagatggggtttcatcatgttggccaggctggtcttgatctcctggcctcaagcaatctgcctgcttcggcctcccagagtgctgggattacaggcatgagccaccgggacttgtctgtcgttcgttccttccttccttccttccttccttccttccttccttccttccttccttccttccttccttcctccctgtctgtctttctttctctttctttctttctttctttctttctttctttctttctttctttctttctttcttttctttctttctttctttcttcctctcctttctttccttccttccttccttccttccttccttccttccttccttccttcctttctctctctctctctctctctctctttctttctttgtcttgctctatctcccaggctggagtgcagtggtgtgatcatagctcactgcagcctcaaatgcctggtctcaagggatcctcctgccctgatctcccaaaatgctgggattacaagcaaaagcaaccttcccagctccaactccacttttcagaaatgcttctgtaccacaatgataaccctgactactcataggtttcaaatgaggactcttccgtgtttcaaggctacagcatgtggcttaggagaggccaatcaaagacggcattaccctggacagagtaattacttcaggatgggcatgtgacccaccaggtgtcagtgagatgcaatgagtttttcggagtctttcttcccactgaattgaggtctggaaggttgggaggctagagctgctacagcatctagctgtagggaagctacggctaagagaagaatctttaggaaacttatcactatgaaagtcagaacaaaaggatacagcataactatgagctggtaacatcagctgagctcttgaatcatcatatgcctaagactagccctggacaaaccatgaaccaataaactcctgtctttatttattttttacttcaattagtttgagacatctttttctcttacaatcaaaagttatctgctaaagtgactaaaatattattttgggctacatcttccccttgctcatttccaacaaacacattttcttcttttctccaaatcctttattttagattcagtgggtacctgtgcaggtttgttatgatggtatattgcatgatgccaaagtttgagggcacgattgaacccaccacccaggtagcaagcatagtacccaataggtagtttttcaacacttgcttcccccaccctatacccacttatagtccacggtgtctcttgttcccatgtttatgtccatgtgtacccaatgtttagctcccacttataagtgagaagatgtggtattttgttttctgtttttgcccaacaaatacattttccaatgaaaatgatgaagccagaaagtatgaaatacattgatttaacaattagaactgttctaattataattgataccggtgcctgttttctttttatgattgagtaatgatcacagatttttgctatcagattttgagtttgaatcctgcctgtatgatcttaggagacttttcctaatctcagtgtatgtccttacttcagtttgcaaataaggataatgaaagcacttatccaatagggttgtgtggaggatgaaataatacagggcaaatgtcttagccaagtgactggcacttagtaagtcctcaaatcttcactatgatattaattgaaagcctagcattcacaatctcactggtttatcagttcttttttctggttgctttttagtgacttaaatcagagataaataagattggtgtctcactgggttaatattttttctggagagagttaacttgtgtggcacaggccatctctttattgaattagcaaagaactacattggatttaagattatctggggctgaggctaatatcaaatcctactctatgtttgtagttccttggctacaagcctacatacggtaattgctgtttaatatgaatttttatttttaacccttacatatagtaagggttaattgctatttaatatgagtttttatttttaacccttccctatttacgtcatgctttgcttaaggaccaagatatattctgagaaatgtgtcattaggtgatttttgtcattgtgtgtacctcatagagtgtacgtaaaacctagatggtagagcctattacacaactaggttacatggtatagcctattgttcctaggctacaaacctatactggatgttactgtactgaatactacaggcaattgtaatgcaatggtatttgtgtatctaaacacgtctaaacatagacaaggtacagtaaaaaatatggtattataatcttatgcgaccactgtcatatatgtgatctgtcattgaccaaaaatgccattaagcagtgcactactgtactttctctttactttaaatttgaattctttatatgggttgaatgactttctgacatagcaaataaaaagcatgaggagaagcattatctgttaacaaaattaacacttaaaatcaacaaagttttaatgtttcgttccaagaaaagcctgtggaagatcagttccacaactgagagctttgggctgcttcagacatatgtctgtgtgtacgctgtgaaggtgtttctcttcacagttccccgccctctagtggtagttacaataatgccattttgtagtccctgtacaggaaatgcctcttcttacttcagttaccagaatccttttacaggaagttaggtgtggtctttgaaggagaattaaaaaaaaaaaaaaaaaaaaaaaaaaaagatttttttttttttaaagcatgatggaattttagctgcagtcttcttggtgccagcttatcaatcccaaactctgggtgtaaaagattctacaggggtaatgttttattattcttattatgcttattctctgtgatgcttctctacctttacagtagtagaatccttggggaaatctgcagagggaccactttcattttgaagctgctggctgcatgttttagcatgtctcttctattagagaatccaggcatggcagtttcctcccccagtgtgcaaggaccatcttcatgcctatgtctgtcgctaggcatgagggtctctaggaatgggtgaaaaaaatgagggatgttttggaggcactataatactggggagggcagtctgctagctggtagctgaaaggtcctggtttacttcaacattttttttaaataaaactgtgcagtagtttttgttattttaggtttccctctgttttatctggtgtatgctgcagaagtgaactgcataacacatttcactcttagaaaatgcatttcatatatttaaatgacaactctgactcctatagtatgggggtgaaatagattgattttttgaaaagatggaaaaaatagattaagtgtcatttaggagtcaagatgttgattgtattgtttcaaatagcatagaaactcctgccactggttcagaggtaacatttggaatgactgatgtgctcttttgagttatctactttagtctggtgaaatatgatttgaataccagtaaaaatctatttaggttattgcaaagactcatataataagagtttgcttgaaaagataaactatcgtaaacttattattttttctcaagtccaaattctgatatggacactaagactgtgatgctacgtttttatgaaatgggcataatttgaggaaattggctatctctacagtatttcctaaggtactgcaaatgtgttaatttaagaagcaattacactagctagcagcaggttgctaagccagggggtccgagctacagacctctgatgtggatgacttcctgc

SEQ ID NO: 8753 - DNA, 6000 bp, Homo sapiens
ttgctgctccacttcctggcagcctggagctcccctcacagcaccccccgcatgccccttatacccagttaccacccgatttctttccttatagaggttgaaggcatcctgcctaccctcaggaggaaagaggatgtgatttgtctcatgatggaggccagtatgttgtcggggaagtgtgaccccaagatctcaatagatggtgggtgaatttagagatatgtatgcactccagggtagcaacgagtgctgcggagagtttggggggcagtttcccgctttcttggcaaagccccagactaaagtaaccttaaaaagcaattaaatcaccttttaaaaaaaacagtaaagaaaaatcaatattaggagaaaggagaagagagagaaggatggggaggaacagtggggggagttctggaaaggtttggaagtctaccagggaggggagagcataggaggcggctgcctgggcatgggacagagagagggggctgtctgtggtcacttggccactttcagtgctaactcagcggctttgtccaatgccaatcccactttcccttctgggacactatgtcccagccagatgcatcaccctgccccaggggtcttatcttcccagcttggggaaccagctgacccagactcattggaggcttgtggggaagcccagctgtggggtccctggggaagccactttgcctaaaggctagggacaacctaagcagggcaccacgcatggtcagggctgggtgtgtgggcaggctccatgctggggtgaccctgatggggcctgacctggccttgcagccagggtgggcaaagtggcttccagctgctaagggagccatccctaggcccctcccctggggccaggcagaggctgcggggccaggcctgacgcagggggcggggtggccgttgggcagcgggtggacctcgggctctaatccccagcagctgccgtttccctcagatcgattcctttctcactttttttctcagctgctggttctgcggcttggatcgatggagccacctccccccgcccgtccacgcttcctctccctgctgctcattagcgccccgattaatcagcccccctttcctcccggggacaagggcttcctcccccgtgagggcacatgctgtcggatggggccccagagcacaagcactgattcttgccacccccaccctgggggcatggatgcatcccctcctggccagtcaactgaggctcccacccccacctatgatgatggcccacatgcctgttcccctccacgagaacacagcagaccccttagggctctcctgccccactctgccaggcacccctcaaacccctttctttaggagagcattcgctcccattgacgcccagcacatcttcctgctcccttccacgcccccactggggctcttcctctccctccattgcatgccctgtccccctacatatagagcaccccggaagcacacctcccctttgctccctggcttgcttacccaacagccctcccccgaagcctggttgtggcaagggatttggggaacatttggggaagcaaagtggccacagatatgcaagctggccagggtgctgtctgtcccagacatatgaatgactgagattggggttgggggcaaaatgagggtgagggcagccagcctcccagagggggcaggggcatggtgggtgttgaagtctggagcaaagctccagggaagctgagaatcttgaagtcacagttgtcccctggtctgtctagcctgccctcctctgcccccctccctccgtcattcaaacaagtggctctctcaaggagtttctggaagctgctgtgagtcgggtagtgggatcaggtggtggctgggtgctggagtcaggagtctcagaggccaggaggtggggggatagagttggctgacccttcatggggtgtgggccaggaaagtggcaaagaatgagctgaggaccctgggcacggcacccttccctgggtggccaggaagtggggagatctggggacccagtgagcggctagggtgcagcaggagtttgggggatagccccagtcttgggatctctgtcctgggctggggactgccccctcccctggcctggctcctgacgcccgtgctgccggtgaaacgctgttgacatgtcctgaattattaagcgtggggagggctccggagcacatgctgagcggagcggctggggctgcgcggcgtggcggagcagcgctcgctccctcgctcactcgctcgctcgcagggacacacgcaggggctgacagctgtgctggtgctgataagggaagccacaaggagacgatcgaggagagagacaagcggcagcagaggcagcagcggcagaggcagcaccagggctgcggagctgctgggagtgggagtgactcccccacctcgggcccccaccctgtccctgtcctcttcccgcttgccctgagtttagaagagcagccgctgccaccactgccactcgggagggcaccagggctgctggctagggagggacagggcagggaggctctggccagtcccagcagccggggacagatgccgatcgagattgtgtgcaaaatcaaatttgctgaggaggatgcgaaacccaaggagaaggaggcaggggatgagcagagcctcctcggggctgttgcccctggagcagccccccgagacctggccacctttgccagcaccagcaccctgcatggactgggccgggcctgtggcccaggcccccacggactgcgcagaaccctgtgggcactggccctactcacctcgctggctgccttcctgtaccaggcggctggcctggcccggggctacctgacccggcctcacctggtggcaatggaccccgctgccccagccccagtggcgggcttcccggctgtcaccctctgcaatatcaaccgcttccggcattcggcactcagcgatgccgacatcttccacctggccaatctgacagggctgccccccaaagaccgggatgggcaccgtgcggctggcctgcgctacccagagcctgacatggtagacatcctcaaccgcactggccaccagctcgccgacatgcttaagagctgcaacttcagtgggcatcactgctccgccagcaacttctctgtggtgagttctgccagctgggctgcctggccttggatggccggaggctggggagtggggaggagtggtggcagtggtgtacaggggcatcctcaacagggcttcccttcattccaccaccagaggctggcctcgtgtttccccaagcctggcgtctccctctggcttcccagccatggagcagtggccgctcataggggcttaccctggggcgcctgctgctcctcttcttggttttgctgctgctgcagtgcccaggtctgggagttggggtgggggttcctaggcatgggcccaggtgtcctggagctggctggcttgcagggaacgcacgcaccatcccaaggccagaccaactgactctcacttttctcttgctccctttttcttctgaggctactggattcttcccaccaaacgaaggagatagggaggggaggtttggggggctccatctagggaaggaccccgggtggcctcctggggagctggcctggtgggcaggctggagagacccggtcttcaggacactgggtgccagtgtctcttctggatctctgtgtgtctctcacatgcctgcctcacagactccctcacacatccctctttcattctgccctccagccctcctggggtccagtccccctctgtctcctgttctagcggctcccatgcccagctctggctcttacactgggaatcactggttcactcttatgtgcataactcaccctcactgctgccccagcacgggtgcatgcacacatgcacacgcacacacgcacacgcactgctgggggacacagtttcctgcacactccctctctcactcactgtccctgtcactacactcacatgcacacctgcacacccacacccagagagctactcatctccatgtctagctcccagctctcgcttagctgccaaggacagggtcccactgtggatgccatcccttctcatgacacccccacccccatctatcccaaccgctgctccccatttggagactgctggcgccatctgtcacctacgtgtgagcacaaacacaagcaccctctccgggagaggggtgtgagcttgggctgctctgccatgcacgcctcccacagtcaggtatgtgagggggtgggcgtgtcttgtacactgcctgtctgtcagggctccattcacccatagtcacagggtatctagtattcatggcgctcgagatgcttgtccctagtccacagtttgctcccagcattgtgtgtgcatgcgtgtatgtttcatcctcgttgccactgcccagtgcatatgcaaatgtttggcgtcaacatggtgcccactccagcccagcctccagcagccagccccagtgatagggacccccgccaggttctcactcacccgctgcctcaggatcaccaggaaacatgctccagccaacgaggttcctggcccccaccatgcctgcagtgtctggggcctcccgccattgggcaggggagttaggtagaaatagagggacaggagcaggagcattgtgcagggagaagagtcgggggcattggcctgttgtccggctgtacaccccctttcctagggaaaagcactgctccccaaagcaagggttggtagagtccccgaggaggaggtgggatatggagggtgagtgtggcctttgggatccatagggctctgctgtcctcaatcctcaccactccgtattgggagctgggcagagctcagtcttagcaggtgctgttgggacagaaatcaatgggatctttgtgtccccgagcgggagttgggggtgggcaggaaaggggaagggtgatgagacctcagtgagaggaaaggagaggaagagctggagggggtgaggaagtaaggggagggaggcagagggttctgcttggtctccaggctaggaggcggtgcctggaggatacaggaacggggatcctctgatcaaggctggtgagtccccggaatcctggggatggcctggaggagtgtgggtggatttcccacaggccctctggtaccctggggctggagaaaggaggatggtagaagtccgtgggctgaggttctggccctggtgcaggacagtgggggtagagggcatagctagcattgggggacaggaattcccctttgggatttccatttcccctgtctccagcccagcctcctactcttctgcacatactgcatcccccgtctgctgagtgtaactctgtcttgggtctggcattcaagggctgagtctgctgcagattcaccagggtctggaattacagattgggctgggggcccatgatccatggtagtggggaagatggggtgtattacaggggaaagactggagaatgggcatggagatgaagatatggggtctccaaaaaggacgtgaggtccataatcagctctgtggtgaggacctggagtcaatgatggggatttggggtctatggtggggagatgggtatgtgagctggttggtggggagcctgccggggtatgggtggtgagatggtcagagacagggacaggcttcaccaaggggctgttatgtgttttctgttgctttccctgtttcctccttcccactccccactctgctgtgacctttcctctggaatccaagttaataaatgtcacattttccagcctatttttactccgggtaatgtgccctcccccagtcccctctgctgctgctcttgcttctgttaccactgcaatcgctctccccccacgctccctaatatcccttcatgcactcccaatcagtcagtcaatcaatcaacatggagttctgggtgcctactatgtgttggg

SEQ ID NO: 8754 - DNA, 6000 bp, Homo sapiens
aaaccctcacttgaataaagcaaattgtgaaaaactcattaaaattacagctattgtaatagaataaaagcatctgtccttttcatatacccattaaaatgtcatgttttattattcaggctcatggagagttttttgattttatagcattggtagaaggatagttctctgggggtggtactgatattttgacattcccaaattattcaatacaaacttaatctctaaagaggcatggagctccatagatgcctggtgaggtcacccacaatggacctgggaagatgtgaagcttaaataaggggcccagggcaatctagcctgaggccaatggccgtctggccattgaaccttgaactcaggactggagaaagagcttcttgcttgaggccagaagagacagagagagaccagagtctgaaggagctggctagacctgattccatcagggaggggagagttccagggactggggagacttatgaagggcaccaaatctagagggacctcttatcccctaggcacagaaagccctgggtttgcctggtgggcattctctggaccactcttccggttcttgcctttctccgtgttgctggccttggagctgaccgtggtgctgacaggagtctggcgcctcctgcgcccttgctatcattgtgtgtactgtggacccgcagcatcggctcacctggtaagagcttgtcagacatggagagtcgtaggtcccaccttgtatctgctgaaccagaatctgcattcaactagattcccagatgattcatatgtacatgaaagtttgagaagcattatttatcactttttattattctactgcagaattactggggatgtgaaatggagggctgaaggcagaaggggattgttgaaggtgggtagagttgcatagatttggtttataatgggattgatcacttgagtggctgagaaggattccatggttgtttgcaagtgtgggctatgcatgttggaagcacactttatgctaggagcttcccatcaggtcattgcttctgggacctataaatgcattatttgtactgttcatttgtaagctagagggtcctatggatctctatgttaacttgcactatatcagctagaaacttgtccagactcaaaattatatcagagaagttgaggtacaggccacagtttctatggaaccgtgtgttcttgatggatgagttgcctaagtcataagcaatgttgagttggtgaggtagtgaagcagccatgctgttgacataggaagtgtagccaaggatctgccttccttttgactgtcagtgtataggtcacagaatattaaagagaacagagatggtgaactgaaggctgtagtctgagagcaaggtaatttttgaagacagccaggaaaagggttggagctgcagttatgggactaaaacaaacaaacagtgagggaggcctgggccactgagaggcctagagggtgttgtggcatgggagggagtagctcagaggctggatacaagggctgtgcacatgtactggagaactcaagggctttgtgtggatgaggtgccacaagcctcctcctgggccatggctatgctttgggacctgcctgtgttgctcatgaaagcaatgttctagcactgtgtgcaggcttcctcagccagtccactgtggtggagcagatgccctatacttactgccctcagagctttcttagcattcgatatgccaggagctggcgtggtcagcccatggtgttaggctgaatacactcactgggaaggaccagggtcttggcaacagattcattgcatatttgcgcctctggtgccatggtaacctttcttcttcctgatgacctacacctatattaaagtttataaaacagtggctggatggttggaggatgcaggtggacagaagacgtggagcctgcagaagtaaagggtaagttgttaattctcctggaaaaggtgagatcttgtgtctcttaccaggagaggccaagagacagggttatgggtagcacccactgcaccctttgcacaatgggaggaaggatgtatgacttgatgtgcctcccagttgtgtgttcatcagctgcaatctgctcttctcaggagttagtgtcagggagtgtctgtgcctcctgtacaaggcttattgtaaaagacacctgatgtccttgagtgaccagagttctaacttgggagtatgtgcccacctccatcagttgctaccagtgtgtcaaattctcttctacacttggctagggctaagatttagtgagaggagcagaatgagccctgccggtcctcctttttctagtagtaggaagcagcctcttctttgcagtgtgagccagtggcccctggaccctcaactagtacctgaggcttctctcctcatcaaggcctcagggggaggcctgagctcctgccaagaaggtaagatcaggacccaaccagaactccagcttcctgcatacagtcaagagagggaggcaggctcatgggtggctgcggtgcagcctccacaggactcttcatgggggaagactcttcatggaatgcctggggtgggaggccttccacactgaccagagagccttgtcccttccaccagctccagtacagcaaactcagccagagagtgcagtgcagagtcagtggcatcaatgcattcacattgctctgtaaccatcatcatcatccacctacagtttgttcagttttaatgttttctcatggcacaaaaaatagggaagccaagctgagagtctgagtctgcatatctagctggaagtatgcagaatggctctgcttatcttagtgggggaggaaggtgttcagggacaagcagggacagtgctgttaattcacctttgaaacctgctttgaggagtaagtggctgaaaaacgtctgtgtgtgactgaggttgctcagggcagccaccttctggcattaaaagatagttcaacaatccagcatcttaaaaaaaaaaccaaaacaatttctatctatcttgctagatgaattgggcattttgttgcgtcttggatgaaatggtaaatatttacattatatatgtacacctctacttatatctctctatctccatctctctcgctcccatttcatgaggatgcttacttacagcaaggatccattcacgtatgattttaaggacttgctaaagatatttgaatacaacttgttcaggccagatcatacattatctgctgtggataaaacaagtttggatttacaatgaaaattgagatagaacaaaagacttgcttaataaccagaaaatgaatgagagaagtccacatgagcttaattaattggctcaatatttctctctctctctctctctctctctctctctctctctctcttttcttgagacagaatctcactctgtcacccaggttggagtgcagtggcatgatctcggctcactgcaacctccacctcccaggttcaagggattctcatgtctcagcctcctgagtagctgggattacaggcacgtgccaccacacctggctaatttttgtatttttagtagagacagggttttgccatgttgcccaggctggtcttgaacccctgacatcaagcaatcggcccgcctcagcctcccaaagtgctgggattacaggcatgagccactgcacccagctggctcaatatttctaacagctaaaaagctcattttgctgctccgctcctcagatggacttgctcccctgtgcagtgctatatatgtgcttggggaccatgctgggtatgggagtttttagtcctaggacccatatttagagtaattctgagatttctctgattctctctctctatttctagctggatctcttctctcacgggtcctcattcaaatctatcatttccagttttccacagcccccacccttccctacttactacctaacacttggctgctcccttcatctttatgacctgtctgagccttggaatatttgagtttgagacctctgtctggagtcttttgtctctctttgttaagggggttttcttcttgaattgaacatgctttctgcaggagttatcactacaaccctatccttcctttcagaccttgctcaaatctctctgcctttgcaaaaaaccccttcacactccttctctttcatctctaacctttttgcaagtgtatgtcttgtgcaatcagttcctgaaatacactatcctatttgtatttctctatgacatatgcttcatatgaaaataaaatagaaataatggccaaaacagaggaacattagttataatataactgttatgtttgtggcacgtgatttaagtaaaatgaccgaaagttgcccactgacaattgttacttatttcttcgaggagagctcttccaaagtgtagtttaaaggggacaggaaatagctgtaaattaatgaagctggatttgctcacctccatgatgccctcttgcctggcccaatactgcatttagttggtatgaggaaagttcacaaaatctgcaaaaaagcaatgttggttaaatttcctctatttaataatttttttcctaatcttaattaagagcttttaatttattaattaatcttgtcatcactttctataatgagcatttcccattttatttgtggtttttaaaatgtgccattaattgcagaaattaagtattagtatgatttcatactatggtgttattgtcaagctaagagcaggaatttggtatcatttctttattagcatttaaaataccatgttcactaattatccattccctactcgtattccactgctaaattgctgctatgcttggaggctttaggagtcttcttgcaatttcagcggcttaagttttttgttcctctgcttaaaagaacctcagagaagaaggcggggctaagaagattccagttataaaagctttcctcctcctgtggggagagaccagcaggatccttgggtgaaagaaaatcctgcttgacaaaaaccgtcacttagggtatgtcatcaacttttgctttttgcttctccttaaatgttgccattgctgtaacttgtagaatagtacgagtttgtgtctctgggaggggcatcatttagtttttctatgaagatttgaaactaaaggaagacaaaaatttaaattcctcaaagtgttgtgggcataagcaaatgcgggttcacagatatatctaatcctcacttagatttatttagaaatgtagaattatttgctgaatttttgaatgactttaaatataattacagttttctgtttctgattgaaggagttagaaactccctaaatgagctttaatgaaaaattcactggcatctgaactctgcaactgactatctgaagcaatcctattgggaacataataaaacaagttttttcttgaatcaagactatggtgaaatgtaaattaacatcaagaaataatgcattcaaatagtaaatattctttgataatgaaaggagcgggtatatttagcttgtttttacatactgtgtttccttccgttcttccagcctgttgaaacaggctcatcatttgtattatttataagcaagagagaaacactgaagggctggatgaataattaaaggttttatttccatttaattttcaatccattattgccagtgctgactttttcagtgttaggattcttgagctgaacataaggaaatggttattccttaagactattctatatgtgctaatacaaagatactgatcatgagagaagttttagcttgtcaaaatcttgacagtgcaaaggacttacttccaaggttgtgactttggatgcatatttatttataatttggaaaaaagctgtttattattatttattaataagatatttataattatattacaaataatataattgttatagaaataatataattacattataaattataattacattacaatttataataataattat

SEQ ID NO: 8755 - DNA, 6000 bp, Homo sapiens
tttgcaaaatgaattgctagcttgttaagccatgctaatagcagccactggcctctggcttctggcagactctctgcaggctcactctggaatgcacactgacaagggtcacagcacctctagggatcagccacatggtcaggggctctgaactgacgtcttgagataatgctatttgtcgtctgcatgggtgagaaaaggtcctcccttctccttcctttgcactttctgtgaccagaatgatggtttaacagcacaagcttggggtcagactgcctgggattggacactggctctgcaactgacctgctatgaaaagttgctcagtggctccaagcctcagttttctcatctgcaaaatgaatcagtactaatattgccctcctagggttgtggtgaggttactgcagatgtgaatgcagaggtcctggcacagtccctgctatgtggttaagtgctcaattgactcccactcccggtcttggaaatgattacttcttcctgtggcccttctctggtctcttctccttgacctcagatagccgcatttcctgcctgtgtccaagccctgctgtttcagcctgaccaccagccgaggcttactgaactccactcaggtctcggccccacccttcacatggtaaattgacagattaatacagtatcccgtggaaacaccactgagatttcaaaatgagagacagaaagagtgcttcctttatgaaagagctatgctttatcttacagaggcgagactggctttaacagccagaaattttcagaatgttccttggagtcaccaaggaatgacagtgtgtactcaggatggggtacagcagcctcagggatggaggctgggcccagcccctcccctgcttcccagcccagcccagcatctgtctatccaccgatgaggtctctatgtgagactgatttgaacaaaggactcaggcacataccacgcaaaaatttttaagtttcaaatcactattttggagccaggagaaatagtgtttggacaagtcacacctctttgtcttgaaattccagtccttttagaaagctttatgagacaaatgattgagaattggggtacacgaacgttaatcgctctttatcttcagtgatatcaagaagcctgcactggaaacctgcgtgtgggtatggcccctcgctgagtgcccccaagaggaaggcatagccaagtctctgtcccctgagacttccctgccccaaggtcttttcaccaaattggagggccagtttttaagttattggaattatttttatagtggaaagtcatagggaagaatgaaaacatttcatttgaatgaaaacattttacaccctgaaaataccaaaaataagtctgagttttcatttctacttagatctttttagttggctcaattatttaagaactgtctggcatatctgtgaggataaggcaatagaaacaggctattctctgctgcagagaattgcagctaggactgagggcaacttaaatcccagatccatctcctggcgtagcaattttgaatgagctttggggcacgggggtttgtgtctgacagaagagtggtcttcttgtgttactccctgagcagagcccaaagcaattaccaccaaagaaaaccattttcatcccacttctccaggaccaaaggcttaaaaatgcattggcttcagtcccccaccacatgtggccaatagcagtgggttccaatcattcaagttcctcagggcttaagaagaggaaattaaagtgtcgtattccccagccttgtgctgaaaggtcacctctgtttactctcatgtccccaaaactatcttgctggaaaacatcagatgcttcaccaagtgcaaagttaatttccagttccagttctcatgggagcccctgtcctcgcccagtcacaagaaaccttcaccttaccaacgttaattcctctgtgcaaataaacgtagaacttgagcattacaaggtgaaaattatgttgtctttcaaagcagtctctccattctactagttgttcttgttcttgccaactaccaacatcaggggggcctcttccttggaaggcatcgaccccacatgggatcttagaatagcagcccacacgtgggagggaagctccagggttgtcctggcctggtctgttcattttacagagactgaggtcctgtaaagccattgccccaggcccttccaccagccacaggcagaacagagcctggccccacgactctcattttccattcctgcattagtcgccaaaagcatctcctttttttcggtacctgtgtgtccttggggactccaaatgtcacctcagacatcagttcctctcctctcttcccacctcccctccatctgcctggtaaaatcagtttctgggagaagtaattaatgaagtttactatgtaaacacccccaggcatttaatatgggtaaagctctggagctaaaagaaagacattgatctaatggaatttcaggcattgagaaggaagtggggcaacgcatagggaaaaaatgggcccccccatcaggcccctggaacttgcatcatgtaaggatctccctgttcttcacggccagttgtgcctttctggtaactgaaatccacatgaaattgccaacttttgctttatttgctttgtgaagatcaggaaacttaagcccagagagggtaagtgaccagcccacagaatactcagcctgcaggtgctggagcagggactcaaaccaggacctgccacctttccactctgcctcctccccctgagtgggcatcatagatcccgcccatatgcaacagctctcgctgctgctggttgcaggcctgctttgcaatcctgggtgggttttgccttcctcacccactcaccagctctgatgttatctaattcatttgccgcgaatgcaaataaatctggtctcaggatgtgccctcatgcaattagcaggaaccagactacgctaaaacgctgggccgactgcttggtgcctagagctccctgaggagctgctggtggcggcagaacacctccatccttgggattgcctccagatcttccaggcacacaggctgtgacagggcccccgcccagctgtcagctgccatcaccaccacccccatgccagcttctcgaatccaaggacctctgccacctcctcctgcaaccaacctaggtgcattggaacatgcatcctgcctttatagtatacagaatatgaagcgggcaagggaattgtagcttctggactgcagcagggtctctgacagggtcttttatgtgtacacaaatgagatgagagtgggtttcttatgagtataaggggagaattcaatcaggtggtttgaaaataaagagccatgcctatggtacagccatatggattacagcaatgtctctagtggcatgccacagggctcagtcctcagccatcctattaatttccttttcatctgtgccatatatgaaaatacagggcagcttcatggagtggatgacagcaagttttgaaatgggatggaataacattggaatctcggctgtaccacctggctatgggatctcggtgaagttgcttaacctttctgaactcccatttcctctcttacagggttgttgtgtggatgaaatgataaaatgtatgtggctggcatacagaaaagagccactgaatggcatgtggtttgtgtattttgtttgtgagtaggatggtgttgggaggaaaggtgagtgtgttctctgcataccaatgcttccaaaacatcgagttactcagatcagtgggaaggtccaatacttaattccaaaaaaaatcaattgcgcatacacaagccggggtcctctggctggcagcagcctgtgttacaggactgctttgggttttcgctgactgtagctggtgaccatcaaaaaccaccagaaacacacaaagcaataaagtcttcccagagtctgcccagtcaagcaagaccccaggaacttgctcacaggagaaggaccatgacaaggaagagacttgaccccaaggaggaattgctgggtgagctgggggttctggcctggaaacccagaagtcacacaggtcctggtcatggaaggtagaagacgaagctacctgactcccggtggttccagcagaaaacagcctcaatgtggggaggctgagagagggaagaatctgtgggcaggtggcgcagtcaagagacagcccaggcagaccggggcatgggagtgagctccctgttgctggaaaaggcagggaggaatctgtagaagaggagaagcaagcagcagcctggccaccgtgatgcaaggactctgacttctaatcaatcaccagggagagactgaagcttttccctggtattaattcttgcctccttgttaagaaggctaattgggttggaacaggtcatgtgatagaattaatttgtcttgcctgggctcctcaagactcatagactgaagtgcaaatccctagaggctaatgcctggctggcttttaatcaggctgatcaaacttcagccccaggaggtttaaaagaaaggaaaatattcccagacgcattcctagtcttattccaggcaattcaaccagactctgctggtgtgactggtggttgtatggagttacgggcacctgtcctttctggggtcacactttccacaatgggttgcacaaggggagtcaccacaccttacctctgccttgcaggagagagagcctagagtttggcaaaagggacgaggggaagtggagtctcatttgaaagcactgtacaaattatttgaactgcatgtggagagctaggccagttctgtgcaatattccagggcctccgtgttaaccagcgggttcccaggaagcctgccagacaagcccacaaacagctgcccaggcagtgtggctgcagcacacgcagtgggaagggaggctcagaaagacccctaaggagcgggtattcaatctagcctcagaagatgaaattcagtaggcgagaagtgttggaaccaaaatcctcgttctggagtcattttatggaagcagctgctttggcttgaaatggcaagccccgggacctctccccacccagtgctttgatgagggccaggccagcatgtactgccaccttcccgtcctttcacctagccctggacagtagctaccttccttgctgtaaaggaaaggccacgtttataccaaaatccagaatctatctgcaggaggcaaagggaagtggggagcccctgggatgaggatctgtgagggtggctttccctgctaagcagaacatctgactgtctcactcctggctgtgtccaggaggtagatgggcttgaaatcaattctgcttgctgcatatctgatttcctagagcccactcgtcaagtgaggagacatcgtcagtgctgcagccggggatcgccatggagaccagaggactggctgactccgggcagggctccttcaccggccaggggatcgccaggtaactgaccagcctcagtccctaccttggcctgggggacactgttgcagaaagaaggtagtgacctctcaggaaaaagtgctagatgggggtggagttgaagatttggaaaagaaagggtcaggagcagagcagcctgaaaactatcagtgagtaatttcctcttgggtcagatgttctgagctcagaaaagtctaaggaaaactgcctttatctgaaattgcttaataaaagctgacattgaggtacttgctcaggtttggaagaattcagaaaaaaagccaaccggagaaggtggtaagagcagccagccgtgggagacctttgattgggtggacacagtggtgtgctgaggatggtggtgatgagtctgaaatggctctggcagggtctcccgggtgctcgtctggaccccagggcaggtaggtgtccttgcaaaagcatttgtttgcaagattagtgagactccaagctctgcttccccctg

SEQ ID NO: 8756 - DNA, 6000 bp, Homo sapiens
aacatcttagctgaactttaaaatgaaatttaagatgctgtagctttagtgagagaatataaagtcagaaatcagacgaaaaatttaaaaagagagaggaaaacttggagaagtatttatttattagttgcttaaagtaaaattaataccctcccaacacatgggataaaaaattttattacatgacaaatatttactaactgtccgtcataacatgatggtgttctgtgcactgagaacataatacgtgagtttataaaacctggtatcaatgtgagtataaataaaacaaatacatttgaatacagttgaatatacaatatacaaaattttcttccaagtataaaacgaaaataaaatacactactttctttaatagaatagaacattgtaataatgttccattgcatttgaccctcacataaatgctatgaggtagcattaagagataagatttgaggctgggcatggtggctcatgcctgtaattccagcactttgggaggtcgaggtgggcagatcattaggtcaggagtttgagaccagcctgaccaatacggtgaaatcccgtctctactaaaattacaaaaagtagtcgggcatggtggcatgtacctgtaatcccagctactcaggaggctgaggcaggagtatcgcttgaacccgggaggcagaggttgcagtgagccaagatcgtgccactgcactccaacctgtgcaacagagcgagactccatctcaaaaaataaaaaaaattaaaaaaaagagagagagataagatttgagatctgacatggagcttccctatttacactacttacctgctttgtgacctaaggcaagttacctcagctctccaatcactggttttgcaaggaatttttttttttgtaaaatgttgtgaggattaaagatgtgtttttataaaagctacattttttgttgctttcttaaaatcagaagaattgaattcgattttttttaaggtttctaatggaacttttacatattatttgttccagaacaaattccaaggaatggtctttgattttgtaaccaaacaagtctttgatatcagcatcatgatcctcatctgccttaacatggtcaccatgatggtggaaaccgatgaccagagtcaagaaatgacaaacattctgtactggattaatctggtgtttattgttctgttcactggagaatgtgtgctgaaactgatctctcttcgttactactatttcactattggatggaatatttttgattttgtggtggtcattctctccattgtaggtaagaagaggtgcttttattcagttaaggaatatagtggtaaaaatatgtgttttaaaactttagaggtgtttttcactaatctttctcattcatcccaaactcccaaataaaaatctaatagtccattgttttagttttagtttgccatttctctaattgcatgctgtgcttgaaatgatgagtggaatacaaggaatttatattttcagctttcatttattctcatttaatattttcatctgttctcatctcagaagacaataactgcaactttggtagaatagtcttgtacctggtcatactcctgtggtattgacagttactgctttgaataaacaatcaatccacacacatatatacataaatcatttgaagtagtcacataattcataaatatgacctcttaaataattggaatagtgtatatgtgcagttatatatataataacacatatataagtttcatgttatctttgggtgcagacagttttctgtggtttgcaatatctctttttggaagcagatagtttgtttgaaaatccaaaacagatttgttatcatcaatgatacattaatgttaggatacatacatacattaagtcctaggaatgcaaaagatttattggaaaaaatatatatatacagtgtttatgtataagatattaaatgaggtactggaagtaaatataagaagatttaagagaaggttctacctatttggggaaacagaacattcacatggaggggaaaattatatagcactctttaaactactttctttagtcgaatagaacattgtaacaatgttccactgcatttgattctcacataagtgctatgaggtagcattaagaggtaagatttgagatctgacctggagcttccctatttacactacttaccttctcagtgacctaagagaagttacctcagctctccaatctctggttttgcaaggaatttttctgtaaaatgttattgtgaggattaaatcagattatgtatatatatgcacttagcactgtgcctagcatgaagaaaagacttagtaaatgttcagtttgaccacaagaaaaagttgatattatcaccatttactcatgcataaaagcaagtgccaggattcagtcccaagtacatctgtctccaaagcctatgttttcttctgtacatcacgctgcctactcccaaataacatagaatctcagaaagtaaagaactctcatattcctgacccaaaatcatacacctttagttcttatgcaaatactagaactagtattttggacatataaattaatttctgtacttggccactgtatgcttcatgatgtctttggaccttccagggttgagtcatttttttgatagatgctttccttgaactaggaaaaatggcccttattatcttcatttaatataaagatgtaaatgttataacaccaaacataccagtttcattttgctcaacaaacattgcagattatttgcatatatacatgtacctaactgtcctgttcacattttgtaaaactaatgtacttatgtaaactttcatttgctactattaagtataacaatatttttgttatttgttgattttctacaggaatgtttctggctgaactgatagaaaagtattttgtgtcccctaccctgttccgagtgatccgtcttgccaggattggccgaatcctacgtctgatcaaaggagcaaaggggatccgcacgctgctctttgctttgatgatgtcccttcctgcgttgtttaacatcggcctccttcttttcctggtcatgttcatctacgccatctttgggatgtccaattttgcctatgttaagagggaagttgggatcgatgacatgttcaactttgagacctttggcaacagcatgatctgcctgttccaaattacaacctctgctggctgggatggattgctagcacctattcttaatagtggacctccagactgtgaccctgacaaagatcaccctggaagctcagttaaaggagactgtgggaacccatctgttgggattttcttttttgtcagttacatcatcatatccttcctggttgtggtgaacatgtacatcgcggtcatcctggagaacttcagtgttgctactgaagaaagtgcagagcctctgagtgaggatgactttgagatgttctatgaggtttgggagaagtttgatcccgatgcgacccagtttatagagtttgccaaactttctgattttgcagatgccctggatcctcctcttctcatagcaaaacccaacaaagtccagctcattgccatggatctgcccatggtgagtggtgaccggatccactgtcttgacatcttatttgcttttacaaagcgtgttttgggtgagagtggagagatggatgcccttcgaatacagatggaagagcgattcatggcatcaaacccctccaaagtctcttatgagcccattacgaccacgttgaaacgcaaacaagaggaggtgtctgctattattatccagagggcttacagacgctacctcttgaagcaaaaagttaaaaaggtatcaagtatatacaagaaagacaaaggcaaagaatgtgatggaacacccatcaaagaagatactctcattgataaactgaatgagaattcaactccagagaaaaccgatatgacgccttccaccacgtctccaccctcgtatgatagtgtgaccaaaccagaaaaagaaaaatttgaaaaagacaaatcagaaaaggaagacaaagggaaagatatcagggaaagtaaaaagtaaaaagaaaccaagaattttccattttgtgatcaattgtttacagcccgtgatggtgatgtgtttgtgtcaacaggactcccacaggaggtctatgccaaactgactgtttttacaaatgtatacttaaggtcagtgcctataacaagacagagacctctggtcagcaaactggaactcagtaaactggagaaatagtatcgatgggaggtttctattttcacaaccagctgacactgctgaagagcagaggcgtaatggctactcagacgataggaaccaatttaaaggggggagggaagttaaatttttatgtaaattcaacatgtgacacttgataatagtaattgtcaccagtgtttatgttttaactgccacacctgccatatttttacaaaacgtgtgctgtgaatttatcacttttctttttaattcacaggttgtttactattatatgtgactatttttgtaaatgggtttgtgtttggggagagggattaaagggagggaattctacatttctctattgtattgtataactggatatattttaaatggaggcatgctgcaattctcattcacacataaaaaaatcacatcacaaaagggaagagtttacttcttgtttcaggatgtttttagatttttgaggtgcttaaatagctattcgtatttttaaggtgtctcatccagaaaaaatttaatgtgcctgtaaatgttccatagaatcacaagcattaaagagttgttttatttttacataacccattaaatgtacatgtatatatgtatatatgtatatgtgcgtgtatatacatatatatgtatacacacatgcacacacagagatatacacataccattacattgtcattcacagtcccagcagcatgactatcacatttttgataagtgtcctttggcataaaataaaaatatcctatcagtcctttctaagaagcctgaattgaccaaaaaacatccccaccaccactttataaagttgattctgctttatcctgcagtattgtttagccatcttctgctcttggtaaggttgacatagtatatgtcaatttaaaaaataaaagtctgctttgtaaatagtaattttacccagtggtgcatgtttgagcaaacaaaaatgatgatttaagcacactacttattgcatcaaatatgtaccacagtaagtatagtttgcaagctttcaacaggtaatatgatgtaattggttccattatagtttgaagctgtcactgctgcatgtttatcttgcctatgctgctgtatcttattccttccactgttcagaagtctaatatgggaagccatatatcagtggtaaagtgaagcaaattgttctaccaagacctcattcttcatgtcattaagcaataggttgcagcaaacaaggaagagcttcttgctttttattcttccaaccttaattgaacactcaatgatgaaaagcccgactgtacaaacatgttgcaagctgcttaaatctgtttaaaatatatggttagagttttctaagaaaatataaatactgtaaaaagttcattttattttatttttcagccttttgtacgtaaaatgagaaattaaaagtatcttcaggtggatgtcacagtcactattgttagtttctgttcctagcacttttaaattgaagcacttcacaaaataagaagcaaggactaggatgcagtgtaggtttctgcttttttattagtactgtaaacttgcacacatttcaatgtgaaacaaatctcaaactgagttcaatgtttatttgctttcaatagtaatgccttatcattgaaagaggcttaaagaaaaaaaaaatcagctgatactcttggcattgcttgaatccaatgtttccacctagtctttt

SEQ ID NO: 8757 - DNA, 6000 bp, Homo sapiens
caaaaataccccttttctgttgcagcgaaataaacagtttttcatttcaaggcaaatgaagtcacttcctaagccttggtgccctacttagaagcagtttgctgtaagggaatcatagtgaataccttgcaggattgatctgtggttttgcaatgatgtatgtaaagtgccaattaatactctcagcttctctttgaaatgcctggggagagaagtaaaagaagcgcttgttgttttaaacagtctagaccaaccatttggagtgcattttaaagcagtgccagtctctgaggtgtgggaggcctgtggctggcctgggaggggcgatctggatggaggagtcatggccccctgggctgagggtctgagagcagagtgtggctgagtggtgggtctgctctgtgtcttagacatttctgcattcgggagttataacaggtgacgtggaaatagttagcaaaccgaaggaggatttgcaagggagtattgattcaatcaaactattcatccaataaataaatatgcagatctcctttatgcactgtgccaggccctggaagtctagtggtgaacaagatacagtccttggcctcagcaagttaacaggggtcaaacagatcattaaacaaatcatgatgcccacagcttggtgcaggttgaaggggctacacaggcaggtgagcacttgctcagcctgggcattgtggggcatctccctgaagaaatgatgagtgagctgagcctggaggatgagcaggagatgacagctggaggggtatggggaagagggctctggacagaaggtgggaccccagctaggaaagccaggtccagagagagagggaggtgggcacagtcaggccggggaggtggagaccagcagggccgagcgcagagacaacgcgagagccttggaaggggtgaggaggaaggactgctgctgggatgtggtgggacagacagggaggagcttggagccaggaggaggggactcagggagacacggtatgcaggaaggacagtgctttcatttactgtgtcagcaggacaaccccagaggttgagtaggcattgacgggttttgtctcgagcttcggatgtgggtctgagttagactttgggagacgaggggagaggggcctcctgaagtatgggatgggggcatattagagtgagaaaaacagagcagggaccccgggaagcattgcatgacagataaggttttgcaatgcccaggctagcagcctgctccagagccctagagggaagtcttgggcgttagagtctcaggatgacctgggacagactgacccccaagccctacccaccacccttcaggggcaggggtcttcttttctgcctgaggtgcaagtcctctggccaatgcaggctgctagccatagtctgctctgtaaattcccttcatcctcaattcattacttagcaagtagctactgcaagcccctcagatggagtgcactgtgatgcatgtgctacagactgccctttcagagcttgcagtctggtggggccatgcacttggccactgcaaagagggggtgcccaggaggggatcctgactcaggggtgaggggccagggaggatgggctgaggggtggaaatgccatctgggtcttggagggtaaagaggaattaggggcagaggcacaatgaccatggtgggccgaatggagcatgggacattgcacgtggcaaaggggagagggtggagggaaaacggcattggggtgaagctttgaaggaagccctgttactgtttgtaacccaaacttatcccctccaaccatcgtcacagaaaagatgtcctttcgggcagccaggctcagcatgaggaacagaaggaatgacactctggacagcacccggaccctgtactccagcgcgtctcggagcacagacttgtcttacagtgaaagcgtaagtcatgcgcatcacctgtttgaaaggttatcattgtaaccttcgtaagccgtcaaatcctgcatttgcacattgacttttagaacattttaaatgccatgtctttaaaattcctttcactacttaatgctcagtgctcttgtttccggtctgagccttgaatcacagtcccttctccagctctatggccagggtctcagtttgggtccatctgcatttgttcttgtaatggcctcctagctgcactccttcacactgtctctcctggttccaggccagcttctacgctgccttcaggacacagacgtgcccaatcatggcttcttgggtgagctggagtcggggttgggtgccagcgggaggtgtgtccttagcacctctctacctcttcctgcctggctttgctgacactgggctgagttccctcctgcaggttttccacccactctcagatcctgtccaacactctcatatcctgtccaacactctcatttgtcaagaaattaagacaacattccagcctgacatccagttctcatggactacagtgttaaaagtcgggatagcggctagctttggaaagtaggaattggtggtgggaggcagttctggggtgttgcttaggattttgatctcactggtgggttccatgggggctgactttgtgatctatcattgagctgtaagaacacgcacacacaaacaaatacgcaaaaacctgctctcccccagtttgggtctacctcccagggcccgggctaggcaagtgaggcacccctgatgcaaaagttaaggaggtgccagccctcaggggctgcccctgcacttgcatgccttgggggactgagcacctccttgcacttgctccccagtcacacctcagtcctggccacaggagaagcaaacagtgggccaagggtggtggtagcttttccagcgtttacccccttgctctcttccttcaaccccagtgacgaagcacctctgggagggcccttctggaggggtccacctggcctcagcatcagagccctggaagacagagtctgtctctttctttctttctttctttctttctttctttctttctttctttctttctttctttctttctttctttctttctttctttcttttctttccttccttccttccttccttccttccttccttccttccttccttccttccttcctttctttctctttctttctttctttctttctttctttctttctttctttctttctttctctctctctctctttctctctctctctctctctctctctctctctctctctttctttctttctttctttttttttttgagacggagtctcgctgtatcgcccaggctggagtgcagtggcgagatctcggctcactgcaaactccacctcccaggttcatgccattctcctgcctcagcctcctaagtagctgggactacaggctcccgccactatgcctggctaattttttgtatttttagtagagacggggtttcactgtgttagccaggatggtctcgatctcctgacctcgtgagccgcccacctcggcctcccaaagtgctgggatcacaggcgtgacccactgcgcctggccgaggctgactctttcttgagcctgccactgtgacctcctgctggatgggtctcctctcctcagcccctgcgggtgaccccctcccagatgcaggcatccctatgggtagaactgctgagaccatgcaagagcatctcagttctggggggttcctttttgccccctaagcacatgcacacctctgcaaagtgcattttcagagggttttttaagcaacaaagcagttttaaaaaatcatcacccttcttccttgatcattgattacacagattacacagctgttttcttcctgcctgttaagtagacttgaaattagttaagtggatgaaaaaattacaagtaaaaatgggcatcacagactttcaaaactgtacaggtgagcactgaagctatttttgctttcaaaatgtttgtgttgaaagatacaaagaaaagaatgtatacaggtgaatttccagcttaaaaagaatattgaaaagaatgctcttgtgcccaccaccagcttgagaaatagcatatcgcccccatgtggccgccccgttggctttcctctttcctgtcagaggttataaccactatcctgaattttttgttacccattccttgcttttatttataattttatgacttgagtatatgtatctctctaaacaatacattgtttagttttgttctgttttgaacattcatggaattgtactatgagtatttttttgtgagtttcttttctttttttttttatttttttgctcaaaactgtttttgagattcatccacggtgagacgtgtaaccattgttgatttatttcatggctatgctgtgtcctactgtgtgcttatgtttgttcagcctaagggggatggtatgtggatttctggtctttgctatgaacaacaataccacttgtaacattcttagatgtggaagtcatgactaactggaaaatattatttgagttgaggcttggtgggtgaaggtaaacatccctctttcatggggtctgggtttaagacatacgacctatggggaaacttatgttcaaaggattgggaagataaggcacgtggtcacccttctctgataccacaggacttgcaggggcagaaggtgagaagggaagggggcacattgtgaacttcattccaggagaagggacatccccctttgcagtgcatggctggtggtagccttgctgcagggcataagaagtcagggctggctctggtgccagtggcctgtcttatgaggccaactgtgtgtaaagttgtctgagaactccagctgccagtatctggtgacctgtgggaagtggcactggattgctggggagaggaagttcctagcagccccacctccccagggaaaggcagccctctgaggctgaatatttatcgccaggcagctttgccaggcattctgggtgtgcaagtcattcatggggcaattctgcctttctccaccagagactcttcctcagggaggtaactttactggcaatagtggacaatattcaggaacggttgtatctgtttactgctctccccttcgactatgctgggtgtttattgcctttgatatttttactaacctggtgggtgtgaaatgggatctcactgtggttttcctttgcatttgctcattctgaatgaggttgagcttcctttcatatgtttatgggttattctctttcaatgaatgcttactcttgtctttggccatttttttcccatcggattgtctgtctcattcttactgatgtacagtgcttatatattctggctatcaatcttatgatgtttcatacatgatgcaaataccttcttccactttgaggagtgtaggtatttttaaaggagtttttcctttgtttccaaatagtttgcttctgctaacttaagggaagcttttggtttataaaggcttttggttttttgtcagaattaggtcccagatgtgcctaactacctctcccatggagggataaatacatttatgaacggtttttggaatatgtcttcttttaaacagcaaggataagaggaatgggaatctgcattgatatattatttatgaaaaactatcatccaatgcctatattctccctggtagccttagaggtggaaaaacataatttgtatgtatataatactgtttataaataagataagtccaaatcacttctagaaaaattttccatttagttataaaaattttaaagtttgcatctttaaaaaaaattttgtatactctaaaggcatgaacaaatgctggatgctatgaatatgtggtaaattcttaaagcctttgaagtggggttacatcatatttagtattcatcaatatcagcaaggggtgagaataaattagtaatgtgttattcaatgttctctctccaaaggacttggtgaattttattcaagcaaattttaagaaacgagaatgtgtc

SEQ ID NO: 8758 - DNA, 6000 bp, Homo sapiens
aaatggatatttttgagtgtggacttgtgaatttatcctactctatttgtacattctcttgttcaagagtcaagctatcagctaccactatacatgccaatcagttgttccctttcacttccccctgtacctttccttctcctctgcttccaaaatattactgatcaggctgggcgtgggggctcacatctgtaattccagcactttgggaagctgagtagggtggatcacttgaggtcatgagttcaaaaccagcctggccaatatggtgaaaccctgtctctaccaaaagtacaaaaaattagccaggcatggtggcacatgcctgtaatcccagctactaaggaggctgaagcaggagaatcgcttgaacccgagaggcagaggttgcagtgagctgagattgtgcccctgcactccagcctgggcgacagagcaagactccgtctcaaaaacaaaaacaaaaacaaaaacaaaaaaatattgctgatcagttagtgcttgaaagagacttctcaactaaaatgtttgattattgatttgaattgaaattattgactagttcctttaccccctagccttatgctttcaaagtaatacagtagtagttgcacatacaaaatgggaggctgaggggggcggatcatgaggtcaggagttcgagaccagcctgactgacatggtgaaaccccatctctactaaaaatacacaaattagctgggcatggtggcacacgcctgcaatctcagctactcaggaggctgaggtgggagaatcacttgaacctgagaggtagaggttgcagtgagccgagattgcacccctgcactccagcctgggtgacagagcaagactccacctcaaaaaaaaaaaaaaaaaaaggaaagaaaacctgtgtgttgctcaagattgaggggacagataactggttgacttatttttcttatatgttggaatttgaaaatgctagaaatgatcattttctagcttatttaataaaattaatcttttctaagatagtttttgttgtgcccaagagaatgcatgctatagaaacctttactattgggatattcttttttaaattgctctgggaacaggccagtcatcaaagactaaaacacatgcaaaaattggctcgttgtattttttccatgaagaaacaagcgatagtagataaatatatagatttgtcttttaagctgcttaaggtgttatgagggggaaaacataaattgagaagaaaaaaatactatttttcattttcatttttcctttaaaatggagaattgattattaaaacttacattgcaaagaggaggagatgatctttctgaatactctacgctatatctttccatcagtttaaataggttggccaaaaatttctaaattttacaggcatcagtttttttttcttagcctcacaagattatagctacacatgtagtaaaattaattcaacatcaccagtttaagaaaatgattactcaccctgagtgagtggatgaataattcttcacaagatgggaaatcaccctgaaattgccatactcacatggctcaatgtaagataatcaattgatttacaaacttggtccctgacatgactgtgttatttgtgatgagaaattccatgccattgaaatcaccttggagggataaggtgctctgtaacagcttggagtgagcgagactttttaaagctcccttgaaatatgtcttcttttcgggttttgtggatcagatttttaccagttgcttcttgacacaattcttttgtctacattatcattggagtgtctcagtgctgaaaacttgaaaatcctgaatctgataccttcctcacacccacctgcttcatagcatcagctatcaacctcttacatcgcaagtggatcttaggcaatgaggtattagcaactggtgcctcattatggtaatccttgggtggagtcccacccttcttataaaagaaggatgctgttatttttaccatgagttagcttcaatttcccaacttgttgcacatttccacctaggttaaatgtgtgcacttgctgtgttttcttacccatgcttgctttattagggcctgttggagaacaggttttgcagacacagaaacctgggttcaaattaatgttctgacacccattatctgtgtgacctcaggaagctacttgtcctatgcatcttcacgtatacagcaggtaaaataatgttgacctcacaggtcctgtatgcaatgagtatcccatagcaccttaatgtaaaagtcagttgatggtaaaacaaacaaacaaacaaagttgtcactgatgctatacacaacaaccagtgctgagacaaaggagtaaaattataatctggttgctgttaaaatttctgaactgttttacatcatcactaactcaattcacttgttttttctattcaaaaacagggtttcaagtctcaacttcaatcagtttctcattctactaacattttcatcatcccacagcatcggctttatcatactctatctcttaagaagagtttccaggaacttttcattttaaatccgcaatatgacatctcctcctctttggctttaggtccctaactctccaactttatcttctactacttcagaccagctcttagatttagttgggtcagaattctcaccattcaggaatacagaatttatctcaaaattgtggtgttccatgagacttggtccctgtactcaaggggctcagagtatggacagagagacagactgactatactagaaggtaataagggagttggctatctgtgcgaacaaagctttatgggaaaacagatgaaggggtgattaattcagccgggggtgggggtgtggtgggtggaagtgctggaaaaggcttcagaggggaagttacacttgagtcagtcatttgagaatgagcacaatttcattttgggcagagggaacagcatgaccaaagcctgaaagtgaacagtcctcatctaaagtattctagcagatggcaggagggagggctgaaggtggagagacaactgatgaagctggcaagagccaggctgggaagtgccgtgaggctctatgaagaagcctaaaagagcagccttccttctcctgaattcctggagcaactactctttgtgaactcattttggccataatttttcatgcgtgtacttacaaaaaaatctctacaagtgatttatagacctgcctagagaaacagggaaaatccctgatgttcatttgtttctcagctcttcctgtgaagtgtaatacatgggactggagaaaacatagcacagagattaacagtacagaaacgaggttcgagttccttctctgctgttcccactgtcctcactgctaactaggtgaaatccagcaagttatggcacttctaaatatcactttctttcactgaaaatgggaataatgacagtttctatataataggactcctaggatgattcaataagtccttagcaaacattgctacccaattaatagaattaattgactacttactatgaggcaggacctgtgctagattcctttttttggaggggggatggaatctcactcttttgcccaggctggagtgcagtggcgccatctcagctcactgcaacctctgcctcccggtttcaagcgattctccctcctcagcctcccaaatagctgggattacaggtgcccaccaccatgcctggctaatttttgtgtttttagtagagacggggtttcaccatgtttgcgaggctggtcttgaactcctgacctcaagtgatcagcccgtctcggcctcccaaattgctgggattacaggcatgagccaccgcacctggcgaagggagaactcttaatgctttaacggattttgcaagtaaagtctggattagtcagggtaggtgtgaggatcaaaggggagcttcaccctactagccttggctccagtagtttattcaattacattcagcagcaagtattgaacactaatgatatgtaaagtactgtgatataaaatagtccatgtcctcaaataatttataatcttgtaggaaaaataagacatacacaaataaaaataatgcaaaaactttaagttccttgagagagggcaacaaagaatgattcaaaggcaagagaatctatcctatgggatatatccaaaaaggcttcattgaagatgtcaacttggggataactttgaaaggcaggatcttagagagggaggaatgtatcatggaaagaggaaatagaaatgtcttggatcagcctgtgtcccctttcactataagagcctgaaacaatgtggcttgtctgtaatagacacgtgaatctccactcacgaattgagggactccagtttgtaatttatgtcccctacagcctacctttccttttctgccctgtgcttaacctagtacattgtgatgaaaggtgggacctggccaacatagtttcttcccccaaaatcgaaacattcaactttaggttaaaggtggacactttccctagtatatctaatgatgggctgaggctcagagctttgcagctaagctctggccttattgacttaaatcattttaatgacactttaatattaaagagtcactgggcccagtgtctgtgaaatgctctctgtgccctgcctctgctagagcagacactgtgtgcaggaaagaagacaagagaatgtaggacaagtcctactggccttgcaaaggtcccaccccctagtccctgtgacgcatccagtgcaggtgacatgttctctaaggtgtggataggcaattaatttcatggagagtaggaggtgtgggttcagctgctgcttttttttttttttcagtgaggcattatctgaatgatgctcattctctcttgagtctggacttcgtgcaacaagcagcaactggatattattttaaaataagcataagccacccaaagatactgatctgggtccttcttttggaagaagagttgattgagaagtgcctcttggttaaggattaaccacagggaaaaatccagcagaaacagaagaactgtgggtttcttaccccagccctcaaggaagctatgccgtgaaaggggtactgatacactgacatacagcaagttggacggggcatcagttcttcatttgtggagtggagaaaagaagaggaaatctctcatttggggcatttgaaggatggcttccctgtttcatcagcttcagatcctggtctggaaaaattggctaggtgtaaaaaggcagccggtgagttaaaaaaaagtgtgggagtatgggtcatggggcaatacgccaggtaatcctaaaatgtgatcttaatgagaagtgaaaacagaagagtttaaaggcattttccaaagcaggaagtaagatatttagaattcatccccctatctgtcttatagctaatggagcgagtcttaacatgcccccaaaagcagccttttcatttcagtaaattaaagagtaaaccaggacatgccctgggcaaaaaaaaaagaacatgactcattactggctgaactggaacgttgaattctggtttcaagccaaaaggctttcagaatttttcttaatgtagttaaaaatgggatagaggaaagaaaagtattatttgaaatgtacaataaatgggaagaaatatactggaaaactgaaagccatagaaagtttggttgaaaggtaaaatacagaacagaaatagtttgaaggctattagtatagaaaagctactgagaaattttagtatctaaaaatcatttactgggaataccaaacaagagtatgtatatgtgctatgttttaagaatattattgaatcacttagctttactactacaatctatcttctcttgctcattgcaacgtcttttttgtactcttacattaatgtttgcgttctaattacaaagttagctattagatcctcatcagatggctcccaggatgattgagaaa

SEQ ID NO: 8759 - DNA, 6000 bp, Homo sapiens; identical to SEQ ID NO: 2133

SEQ ID NO: 8760 - DNA, 6000 bp, Homo sapiens
caccaaatttgaccaatgaacagactgcaggtaagagtataccaaggcccctcagccctcaaagcactagggaacattgtatccttcctgcaagaaatcattatgtcaaagagtttgccttttgttttttgttgtttttttttttttttttttttttttttgagacagagtctcgctctgttgcccaggctggagtgcaattgcgcgatctcggctcactgcaagctccgcctcccaggttcacgccattctcctgcctcagcctcccgagtagctggaactacaggcacccaccgccatgccccgctaatttttttgtattagagtagagacggggtaaaaaaaattagaatttttttgtattagagtagagacggggtttcaccgtgttagccaggatggtctcgatctcctgacctcgtgatctgcctgccttggcctctcaaagtactgggattacaggcgtgagccaccgcgcccggcctgacttttgattttctcactgtgttcttttggtattgtaaaaatagtaaatgttaaaaaaaaaaaaaaaggaaaaagaaaaagaaaatctactttacaaaaagtaaattacaaaggactactactcatctttatgttcaaatttataacaaaatgggaaactcagttaggatgcttccatagccagggaaaggcaatggtcagaattttccagctgaggtttgatctgctattttccacattaaaagtcaaaaaagtcaaaacaatgtctcaacaaaagcaaaaaataagccatcattcattttgattatatgagagtgattaaccaaagtaggttaatttagtaataataaaaacattttcaaagctgaactctctcaagtaacaaatacaaggcaaaactatgaatatttttgctatttgaataaagcacaggtagcgttcatccttagagtctcttggcctcacatttttccaggtttcttagctatttgccctgccttaacagtccccaagtgactgctcccatccaggcctcctgaagcagatccagcctaagctcctggcagacgggcttccatcagggaagcaggaccattgtgaatatgttgaataaggaatttattatagaaattagggctgggcacagtggcttacacctgtaatcccagtactttgggaggctgaggtaggcagatcacctgaggtcaggagtttaagaccagcctggccaacatgataaaaccccatctctactaaaaatacaaaaaattagctgggcatggtggcaggcacctataatctgagctactcaggaagctgaggcgggagaattgcttgaacccaggaggtggaggttgcagtaagccgagatgacaccactgcactccagcatgggcgacagagggagactctgtttaaaaaaggaaaaaaaaaaaaaaaaaaaaaagacattacgtcacatttgtgggaggagttggagaagtaaaagtctaaaagtctgaaaaggggagttaagggatcagagaacaatcctgatttgggcagaggagtccaagcttgcagggaaatctggatattaggctaggcacatccagctgctgtagtgagagtacaaagatggttggtgtagacatctacagaaggttgttggctctttatgattgctgcctctgtgagtttctgtgaagagtctgttagctagcctgtggtcacagttacttgtcagaagcgaatacagagcagggaagaatgagaacaaacaggaactctcctgcatctcttctcattggttagaaatggcatttgtctctcgccacctctaaccaatgacgactttcattacatcttgacagttgtcactggttagaggtggcgagagacaaatgaagatgctgcttcagtattgcctcctaagtctcaggtaacttcaattttgtctgtctggaagcatatacaaaaggggatttggggaaacatagtttccagcataaccatgttgcctatagaacaatctagtatgatgaccataccttgtctgcaaagtatgggatttgtttctctagtcgctgtcagacaggtcagatgacgactcatcctggaagctggaggaaatgggaggtagctttcaggtaaatttcttcttcagtcttttctttgatagactgttcttgggcacagttttgcatggctaagcaattggctgtgtcttctcaggttcatgaagcacaggccaggttggtaacatatcactatgtatttgctttctattctttcctgtctcatttctcctattcctcatttgttgccctgggtttgcatctttcaaggaagcattagcacttcagccttcctaaaaactccagctaaaatagtactcatctaagaaaatgcaatgaaaacgaagtgggacttggatgaattgatgggggaaactgattcctatgaggctcagttcagttgtatgtgatggaattatagcatcgatggcttttaagaacatcattatctttcttcactggaaaagtccatgaacaagtattttctgagacaaaagggatggattaggggagctgagatccttttagtcaacatatgacttgtgactttaacactcagcaagaatgtacgcttaatgaaaactttgctctctggcactggcacttttttgagcaataatcctgccatagctcaaaaagcagtgaaaagcctgttattcatatttacatatctatgccagtctgagttttcaagatacactgatgcaccaatagggtggagaaactgccttgatctctagttccgcacagcccgctgtgtttaatccacccatttccccagatggatgcgtgtagtaccgttacctcttatttgaccattaatcaatgagatggggggagacttttttcccctgatgtttaaagccattttttaaaactattaaaacacacatagatactatggaatagagtgaaaagcgtgagaacattcttacactaaaacgtgagatttaggttgtggtagtcccctctctttccccatagtttatggttctctgctattaggggttcagagaaaaaattagataacctcttctttttctttctttttttttttttttgagagtctcactttgtagcccaggctggagtgcagtggcacgatctcagctcactgcatcctttgcctcccaggaagttgagatttcaggaagttcaagcgattcttgtgcctcagcctcccgggaagttgagatttcaggtgcctgccaccacaccctgctagtttttgtatttttagtagagacggggtttcaccatgttggtcaggctggtctccaactcctgacctcaagtgatccgcccgccttggcctcccaaagtgcgggaattaaaggcgtgagccaccgcgccgggcctagagaacttctttaggtaaagattctgtgtgctgtgtgtactctcatttccgttcacacttttgtatttctttttaaatacatgggttttagctttttttcttttaagggagaaagccatttcagtagagtttctgttaatggaactcagaaggagtaagtagaaagggtggctgtgatgaagcagaggtcagcatcccagctgctcccttgaggagcctgtcttcacagcaaaggaatgaaggacaaactgccattgtcgcagggtcccgcatctattattttgtgaccagaggacatgagaacattgctagtctagatggaaaaagctaatccaacaggtgagattggagattcaagagaaactgcatgtgggaaggagtgcataaagtcgactatgtttcatagcaaatcattttgtcagcacagggcacaatgaaatgccatcacagttgcctcattagtaagcaatatcttccatttttgaaggcaccccagcatgttctgtaatagctcccattaagtccagtcgatgtcctctggactccccctccgcctcccacccccagatgatgatgacacaaatgtcttgaaatattgacatgtccgcagtcactcgtttacagaatgtctgtacaaatatttacattaccccgtccctcccagcaaatttgcctttagattaatctgcacaccgaacgcaggccgggagtggcttggagtgtggaagggtttaagggtgtggaagggttgtagtgaggcgggactgactgactttgatcggctttgccaggggcttgaaggaaccggctcttcctttcgcagaacccaggtgtttctctgggcccgggaagtttttgctcccgagcgagtcagggacgggagcaggcacgcacagtcgcgtaagtgtatgaaatgacgacctcagaagggcgcccagggacatgggtttggcagccccgagcggaggccgccaggcagccgttcctttcggaattcggtctcccgcagtgctcccggctgcggcgctcctgggccgagcgctggagccgttctgggcaaccctcccgagcgcggccggctcacctccgccggactgcgcggggcgagggctccgctactgcgcgcaggcccgcggatggcaactcggggtttccactgcgggtgatctcgggacaccacgggttcccacggaggccgggccaggggagagccctggctgtgggaccccgcgtgaccagggcgcagggcgccgggtccttagcccatctggcggcgcagggaggggcgcccggtagggcgggtgcgcagcatgagccccagccgcttgccgctccactccagccgggcggacgggcgggagccgggggcggggaacccggagcgccgccccgccagcgcgccccgcccgtgggagaggaggggctgcagcgcagcggaccactggaggcgcagcacggtcgccgccgccgctgtcggtgctggagatcgcggctcggtgcaggcggcgcccatgcctcctctcctccactagcccgcgcgccagtccgcctgccggggccggctctccgcctcctgcctcccgtcgcagccgcgcagccgccgcagagtccgcggcgccaccgctcgccctccaggtaggtgtcctagctgcaaagggattgcttggggcgggcgccaaggtgcccgcatcgcggcccgggggcattgtgcgcctccggcgggccgaggaccccgagggacgcgtgggtgggcagccgcagcttcgggtccccaggacatcgccgtccccctggaggcgcccccggccgatagcccgggctacagggaagtgggggcggcggtgtcagcccattctcgcggccgggatgggagggggcgtctgtatcgcggtcccggtttgccgccctccctccccctcgttgccagggaattccggccgcctgccactagcgctcgcattccctcgcgcgggccggcgcccctgctccccgcaggctgcctggggattgaagcaggggcagggagaaggactgatgtaattgtcagcggaaaaccgaaccggcgcgggtgagagcgcccgcgcccgcgagagctaacgcctacgccgcacctttcagggaatcggggaagccgagaggagcggctggggaagttgtgcattgggttttattgtgcgcgtgcactgcggactgccctcgcggggcacccctgcccacccgctgctggcgcccctgcagccctcccggcagcctccgtccactcccccggccagggccaagtctgccttccctggttcagaccgggacagcgtttgcattgcagtcaagacgtgcttcccctgcatcaagccgggagctgcccgcagatcgtgtcgccggggatgctgggggaggagggaatgggagacctgaggagaaagcctggagaagtaatgacacaagcggattttctccccaaagcttctgctgcgtatagacacatctgcaaggcaccttttaagctgtttttgaaagttataaccagatactgattttgtgacaattctatgatatacctgaacggttgcttaaacatagagacctaaagctaggggaagc

SEQ ID NO: 8761 - DNA, 6000 bp, Homo sapiens
gttgctacaaagcactgaggctgctttttcctgtcacgcagctaccacttataaccacctggttaagtcgagatttggaggtggtttagtttggggcctggatgcaccttgcagagagagaccgctggctttttgtagcaactgtcatgatgcattttgtaagcattaagaggtgtgtggtgagcaaattgacagaataaccaaggtcgctgttaggagaacgatcctggtgttgatctatgcctggagcctgggtcaggcaggtggcaggttccatggtccccccacccctgcggttaggggtggtgttgactgtgtctctgtggcccctggggtggagaaatggatgcagactgccccaagtggaggatgagctcctccattacaggcaacttttgaggggacagttaaccagctgttctaggacaaacttgtctaacccgaggcccaggacagctttgaacatggcccaacacaaatttcttaaactttcttaaaacatgaggtttttttttgtttgttttgttttgtttttgtttgtttattagctatcattagtttattttatgtgtgtcccaagatcattcttcttgcattgtggcccagggaagacaaaagattggccacccctgttctaggacctcctttacttgcattttcccccctttttatcacttggtgagagtttgggtatcagcttacatcagaggttgtgaggaaaataaaaaggtatagtttgctggtaaaaaagagagtaaaactttgctaaaactcttaggttaacaatctcatagataattgagggttgtactttgacttctgatttattcttctttgctttagtggttttcccggattgtgtgtaggtgtgagatcaaccatgagttccgttgcagttttgacccaagagagttttgctgaacaccgaagtgggctggttccgcaacaaatcaaaggtgacagcccttttatgtgctcttcctggtaatgtctaaggcattgctccctctaaagcctttaccaaatcccatgccctttctagaagtaccttttggccctgtggttgtggggcagggagggtccaacatcttgtgcactgttttcgcattgctgtgcgtgcaggggcgactggccaggcatgaggaaatgaatcaagtacagtgagatttaacatgtgggcagctttctggaaagccagcgaatttgaccattggtaattaatgcagtccttttcaaaactgctttttcctaattgtggtaaactaaaatctgggctctgaagcatcccagagcattgcttaagcctgccttgaggatgaaggctggaccctggcttcggagttctcgaacgccactggctgggattaagagcagtgctgtacagtagaatagactacaagccacgtgtacaatttttaggattctctggtacttattaaaagggaacaggtgaaattaattttgatattttaccccaatatgtctaatacactgtcatttcaacatctctaatgtaaaaaaaagggggggaaccattgatatttgagattatttctcttcgaagtctgatgtgtatttacaacggtgggacatttccttccatttgaatgccagattttcatccaaaatccttgatctgtgtttagatgttataaaatcttcatttgaaagagcagattgttctactccaggttgttcgaaacacacttaaaagttttccaataactaaattgagtattagttcttaaaattaattaaaatataaaattaacttttccttagtcacactagccacatttcagaagctcatttctggtggctgctgtgtcaggtgttggaacccgagaagctgctttgttctgggggcctgggatcctcctcctggagccagcttccctgtgaagtctgtgtttccctttctagagagggaagacggcactgaaagaatgcttccacctgtcctgtcagcgctgtcgggtagatgggcatgcagctgggaagcgatgggcctggacttgggcatgagcctgtctgattccagagatcatccccctgttctctgtcacatccattcatggtgtttttcactgggccttgctattgccaagacgccatgctcagtcctggggatttgggttatccaaaacagtcacacccttgatttcatggagattgtggctaatggcacaaacacatgaacaaatagggcactatggaagatggaagtgatgataatcagggaacctgatttccacaagccttgctgtcctctgccttgggcagggcagggggagatcagcggtgacaattgccactgcagtctttttttttgagacggagttttgctcttgttgcccaggctggagtgcaatggcgcagtcttggctcactgcaacctctgcctcccgggttcaagcgattgttctgcctcagcctcccgagtagctgggattacaggcatgcaccacccacacctggctaatttgtattattagtagagacagggtttctccatgttggtcaggctggtctcgaactcccgacctcaggtgatctgcctgcctcggcctcccaaagtgctgggattacaggtgtgagccaccacgcccggcctccacggcaatcatttttaaccttgtatgttacagtggaaaatcagagtttgcttcaaaggcaattctcacaggtggtgctgggtaggaccattgttttgcaaatgcaggggtctgctctgtgcctggcattgccatagttgtgatttttttaagtgtgttattagactctagaggacttaaaaattgacgtagcaaggcttgctttcaagggactcaccccgttaggggagtggggctcacaatgtctgagctgatgtttaccaaggaggccatgtggatgggggtaggttcgctgtcagagactgggagtctctggcctcctctagctctcacactcagggtgctgggcctggtgacctcctggggccttttcctatcactatgaattagaagagaggggtggggggagttgtccttggagcatttgatggttcttgtttgtctgtttttaagcactaaaacccttaaaagtgtttttcatgtaatgctaaaagtagtgcttccttttaatctgtgttggctggtccagttgccactctaaattcagaagaggagagcgaccctccaacctacaaggatgccttccctccacttcctgagaaagctgcttgcctggaaagtgcccaggaaccctctggagcctgggggaacaagatccgacccatcaaggcttctgtcatcactcaggtagaaacaccattctttcttttaaaaattttatcatgtaacatgtctatgtaaatttttaaattttttttcttttttttttttttgagacagagtcccgctctgtcgcccaggctggagtgcagtggtgcgatctcggctcactgcacgctccgcctcccgggttcacgccattctcctgcctcagcctcccgagtagctgggactacaggtgcccgccaccacgcccggctaatttttgtatttttagtagagacggggtttcaccatcttaacaaggatggtctccatctcctgacctcgtgatccgccttcctcggcctcccaaagtgctgggattataggcatgagccaccgcgcccggccagttttttaaatttttaaaaattaattgctgttctttcttaacctatccttccaagcgtagaatctgatggaagagtttctgaatgtgcaagattgagaatgctttgagtagctaaagggagaaggccttcaatttaaatcatcccccaccccagagatgtttctgtcgaccacttctctcatgtccaccctgtatgctagcactcagtaggacaggcacgtggtcgttttgcaggcagtgtttgtcagatgaatgggtcctgttttctgttctctattcattatcctgctttctcgaagaggttaaccagtttcctggttttctttggcttcagtagcccttctctctgctacctgaatttgagatgttagtgagtttcaaaacttttatataaattcatatcatctggtcatggtggaaaattactatctcgctgccagtgtcttccctgaattttaggctcataaacagttgcatcccaatccttccattttcacctgtctgctatcttgttaatggttttgttaaatgtaccactgtctacttggtgactgtggtctcacaccagggtagttgatccctcttgcttccaccttgtccctcctcagttcttctccataaagcaacgggagggaccctgcaccatcaagcagaatgcctcctgctgaaaagcctgtgttgacttttactacagggtgggatgggtgatcctcttcactgtccccctctggtgtgtgcaccaggctccgcccccatccacctcctccgctttcctgcctgtacacccttagttccctcacctcttaacatggatagctgcctcgtgcttcaggacggtgtttcctggccgtccccagggtccacctcccactttctctcaaactctcttgcccctgttgatttcatcacagcacttgctagctgcctcattcatttgtgcagctgatgtggttctctccttaggatgtcagcctcttgaccttggccctttctccttgtctttcggctgctttatcccagggcttcgagcagtgcctgtgggcagggtggggctgctttgtgagtggatggtgatgaacacatgttctttactccctatctgttggccttcttttaatctcttaacctttccttttttgatcttttttgagcaggtgttccatgtacccctggaggagagaaaatacaaggatatgaaccagtttggagaaggtgaacaagcaaaaatctgccttgagatcatgcagagaactggtgctcacttggagctgtctttggccaaagaccaaggcctctccatcatggtgtcaggaaagctggatgctgtcatgaaagctcggaaggacattgttgctagactgcagactcaggtgggtagcctgaggcctacttctccccagtgactgtgtacccgttccattacccggctcctgatgcaggctagaacgtcactggacccttcctaccagtgggacagttccgtcttttggaggtaggacagcaacattcagagtcctctggcatttttagtggaaaaactcactaaactaataatagaactgggacacttaccatttttgctctttgagtgaatgaacttgaaagtaataataattttttttttaagagacagagtctcaccttgttgtctaggctcttgtgcagtggctattcacaagtgtggttatagtacactgtggcctcaaactcctgggctcaggcaatccacctagcctcccagttagctgggattacaggcacaccaccacatctggccaaactgaaaattagaagcttgtcccagagtttgagacacttaaaagaagctgggcttgctgaatggtaaagatgggtggttcccattgctttgctagtatgttcactaactacacatttccaggccccaaattgaggagattacaagttcaaattctgttttaagccagtttcctcgtctttggcagtctgatgccagtacttggactttatttaagaacatttgtaataagcaaatctctgatgcatttctccctaagtggtagcacttaaagaccaagaaaaatgtaaagaatcttactaaagtgttgcgtgactgctgttgtactagataggcttatttaggaatgggggttcttcccatctgctactgagtctccttgatcttgtgggagctggatctggagcaccctggagcatggtgattggacgatggggatttgatgggagagggcctgaggggtaggagtgcagggtgtagccaggaggcgaggcagaggagtgccacctaatgcaggtccagctgtgccacttaaccacatgggggcatcggga

SEQ ID NO: 8762 - DNA, 6000 bp, Homo sapiens
taaatgtctgtagatgtctgtaccatccttctggcctttaaccagagaggattgtatgttcttaggtttcataagtatcttaagaaacatgtcatttagtaattatggtgaaataacttcatgatactttggcgggccgggtgcggtggctcatgaggtcaggagatcgagaccatcctggctaacatggtgaaaccccgactctactaaaaatacaaaaaattagccgggcttggtggcgggcacctgtggtcccagctgcttgggaggctgaggcaggagaatggcgtgaacccgggaggtggagcttgcagtgagccgagatggcaccactgcattccagccttggcgacagagcgagactctgtctcaaaaaaaaaaaaaaaatactttgaagagcagaacttgtatacaaattgtattaagtgtgaatttaaagcgttctcagtttaccaaaggagattgtagcccccaggaaacatgaacaaaaaagaaataccagagaatccaaccatcatatttaattcctgttttatttaaactttgtttccaattaatgttacagtcctttttaaaaattaaattttttttattttattccttttttttagtgacaaagcctcactctgtcacccaggctggggtgcagtagcgcagtcatagctcactgcagccttgaactcatgggtcaagtgatccgctcgtctcagcttcccaagtagctggcactacaggcgccccaggctagttttcgtggaggcagagtcttactagttgcccaggttgatctcgaactcgtgggatcaagtagtcctcctacctcagcctcccaaaatattgaggttatgggtgtgagtcactgtgcccagccccttttactttgtatagcttcatataaggaccagtctgccttccttaactccttacctggaggataataaaccaggaactctggcagccttgtctatgtcaagcaagttactttaccaccttggtacagctatacgagttttaaaattccatccgtgctctgtctcattctttatgcaactcaagaggaccaggccttgtaaaagttcagatggtggaggagcatgtcgcatgtcgcatgctttatgttagtggcttctgtggggcaaacggtgtccttagtgagaggcaggattattcggccacagtatttagtttcctgactatggctccctaaccctccctttcaactttgtttgatggctgtggatatgtccctccctccctcacatctatgtgaagcagtttgggatcagaagccgctccgaagagagctcccactgggagctcaggggctgcagctgtgccattctgttttagctatctctttggttttggtgtggtaggttcacatcgagttcacagagggcgaagacaagatcaccctggagggccctacagaggatgtcaatgtggcccaggaacagatagaaggcatggtcaaagatttggtaaggtaccccttggaatgttgtgtgtgctggtgacaagggaggctctgagttgggcatgggcggtcatctctcgatgacatcccacatgtccgggcacagacacccagggcatcctagctgggtgagtaataggttctgaaacaaccagaagctggtcgaagtcctggaataatcgtgggtggaggaaacttcatcttgaagaaggcatctttcaggggagatgcaggggcagtctccaacaattcctgacagctgagtggtcagaaaaggcaaccgtggagactgctgggttttggttcagctcattggccaagtaaccaggcgcatccatggacctctgtgctcctcctgcagattaaccggatggactatgtggagatcaacatcgaccacaagttccacaggcacctcattgggaagagcggtgccaacagtgagtgaggctgtctgttgcggtggggccagtgtgccctgagacccttgtggggggtgtcagctgtgagaactgtgacgtccgtgcagacagtccaggcccattgctgcctgtaatgggagttacagactttacatcctcctgcctgctggaagaggccacttttccttttccctttggtgcagtggttggattagagctgcttggccagtgggtgaattgtcacttttggaaatccatctaagccctccccaaataacccacagaggccatgttgaaggcatgcccaagggcagcattctctatatttccgtcagacctgctaggttagccaatcagtgttggtagtactcatgccttctgaacgtggaaactgctgatctggaactcactgaagagtaaaaacattctagatttgtgcccaagtaaaacaacatggggagggatacttttttgagacagggtctcactctgtcacccaggctggagtgcagtggcgtgatctcagctcactacaacctctgcctaccgggctcaagcaattctccagcttcagcctcctgagtagctgggactacaggtgcatgccaccacagccaattaatttttgtatttttagaagagacggggtttcaccatgttggccaggcttgtctcaaattcctgggctcaggtgatctgcccaccttggcctcccaaggtgctgggattaaaagtgtgagccaccacacccagcagggggattctgttgaagaggcagtgatatgtcagccaaggtcgctatatgcctcacctgtgccaggttgtaggtgtagcacagttacaggacactgttggaagtatgtcatgtgggccaaggtcgctgtgtgcctcacctgtgccaggttgcaggtgtagcacagttacaggatgctgttagaagtgtgtcgtgggcattctgctgcaggtccaaggatgttttgtgttgtttgtttgttttttgggacggagtctcgctctgtcaccaggctggagtgcagtggcgtgatctcagttcactgcaacgtccacctcccaggttcaagcgattctcctgcctcagcctcccaagtagctgggattacaggcgtgcaccaccacacccagctaatttttttgtatttttagtagagatggaatttcaccatgttgtctaggctggtgtcaaactgctgaccttagttgatctgcccacctcggcctcccaaagtgctgggattacaggcatgagccactgtgcccaaccaagaatgtttttttacacctctttgtttaactgtatggctatactcacacactcgcgtgttctgaaaacaagtgcacacgtcgcgtgtgttacctttgggtggaaggtgagaaggcaagcacgtcctccattcctggatagttcagtggatgaaggagcctttcccaggtagtgggacaccgacctgcataacatgactgacgtccgtgtatccgtttttgttatgagtaaacatagccttggcagctgtgctgtggcctgtgcaatggtgagctctctggtgtcagtcttatgttttgtgggcattttacgtgacagcgacgagagtctgtaggcacaaagtgacctttttgcgcactacttgaaccacacatacaccataaacttgcttttacggttttgttttggttttggttaactgtagcgtttgtttaggcctgacacggtggctcttgcctgtaatcccagcattttgggagaccaaggcaggaggatcacttgagcccaggagttcgagatgagcctgggcaacatagtgagacccctgtctctacaaaaaagaaaaatttagccaggcctgtggtccccgctgctctggaggctgaggcaggaatatcacttgagcccaggaagtcaaggctgcagtgagctgtgattgtatcgtgccactgcattttagcctgggtgacagagcaagaccctgtctcaaaacacatatatatggaagtacagtagtgtaaatctaacattaatttctggtttctgcccccgagaaattgcagaatgtagcttagtcagtcatgtctgttctgttttcttctcatgcagttcctaactcttgtcttctttcgtaatctaaaaaaacctgctgcccagctcccatgtcctctgcttctcttgtcttgtgttgcttcacctggcacagctgcatgtccatgttcccccctcagtgcatcgcctcgttgctgcctctgcgtgtgcatgtgtttgggatggacgcacaaaaagccctcctcgtggtccttccagcaagctgggcttccctttactgcacagtgggcaagattcctgccttgtttcctgatgatacggcttctccagagtttggggggcctggaactcttaacttgggggtactgggttctatccagagaggttgacagcaggagggtttgcaacagcacttgtcttgcagacacagtgaagtgctcagtgtgaatctgagccaacagtagatggggtctctgggcagcagcatgggccccacaaggctcttaggcgtcagtgagtgcttttgtgtggagttaatgtgtgtggtttttttaacttgagaatagtagttcccaaacttactgcacattagaaacacctggaatccttcaactattctgaagccctggccaataccccagacgagctaaatcccagactgagtggccccaaccgtcagttatttgaaggtctcggggcatttccagcttctggtccaggctgagagcctgtcctccagaacccttgtgatccaggtgaagatcataactggcccccattctagacaatggagatttttgtttgggaagctaagcatcgtttttggtgatgggaatcacagataaggttatttagcgctttagcgctgtcctgcccagttatgtcattggcagaatgttgttggtctgtgtcctaaatgtgtttccttttgtgttcctaagtaaacagaatcaaagaccagtacaaggtgtccgtgcgcatccctcctgacagtgagaagagcaatttgatccgcatcgagggggacccacagggcgtgcagcaggccaagcgagagctgctggagcttgcatctcgcatggtaagtgccatggctgggccctctagaaaggcactggccttgcgtctcttggccccctctaaggagtagcgtgttgtggtgtgcggccttagagaatggaagtcgacaaatcccacgttgcactggaaccggattggactccctggggccacatttcctttatcctccccaggtcacctgcacgtcttgttctccatggctgtgtgctgtgctagaagggcacagagactgtgtggcagcgtcttggccttggccacaccctgggtgcccagatgcctgggtaccatctccagagattgtgacagacatttctggattctcaaaggcatcccaggtggttctcatgtaaggccagactcgaggatcactgcaaacctgaagtgggggctgttgctctctaccacctggcagaagcactgcactgctctgggctccccgacgtttcatacatgcttatgccaagctgtgagcacccttgcttctgtgagtcagatacccacacttgaaagtctctgggtgcctttaagtatccagagaagtcaaatactgcgtgagtgcctgcagcagcactttggcctgactgtgtgaggaacaagccccagggttccctgtcattcgcttaggggattctttgttcacctcaccccagtacccacacgaggaatctcaaattggcagacctcttttatagccctgagctgcattccagggcgtgatgcagcctcccactgcttgtggccttcccggagctcattccccagtctcatattccaggttctcctcttagcctggcctccagcccaggtcccttgtcctggctgctttatgcccttcctgattgctgagcccttacttctctgtcagccaatagccgtttgatccagaatctctcagaattcttggaaatgtttggttggctgttggtgttcttccctgaattccagctctgcttattctgtatttcttc

SEQ ID NO: 8763 - DNA, 6000 bp, Homo sapiens
tcacctgtgccaggttgcaggtgtagcacagttacaggatgctgttagaagtgtgtcgtgggcattctgctgcaggtccaaggatgttttgtgttgtttgtttgttttttgggacggagtctcgctctgtcaccaggctggagtgcagtggcgtgatctcagttcactgcaacgtccacctcccaggttcaagcgattctcctgcctcagcctcccaagtagctgggattacaggcgtgcaccaccacacccagctaatttttttgtatttttagtagagatggaatttcaccatgttgtctaggctggtgtcaaactgctgaccttagttgatctgcccacctcggcctcccaaagtgctgggattacaggcatgagccactgtgcccaaccaagaatgtttttttacacctctttgtttaactgtatggctatactcacacactcgcgtgttctgaaaacaagtgcacacgtcgcgtgtgttacctttgggtggaaggtgagaaggcaagcacgtcctccattcctggatagttcagtggatgaaggagcctttcccaggtagtgggacaccgacctgcataacatgactgacgtccgtgtatccgtttttgttatgagtaaacatagccttggcagctgtgctgtggcctgtgcaatggtgagctctctggtgtcagtcttatgttttgtgggcattttacgtgacagcgacgagagtctgtaggcacaaagtgacctttttgcgcactacttgaaccacacatacaccataaacttgcttttacggttttgttttggttttggttaactgtagcgtttgtttaggcctgacacggtggctcttgcctgtaatcccagcattttgggagaccaaggcaggaggatcacttgagcccaggagttcgagatgagcctgggcaacatagtgagacccctgtctctacaaaaaagaaaaatttagccaggcctgtggtccccgctgctctggaggctgaggcaggaatatcacttgagcccaggaagtcaaggctgcagtgagctgtgattgtatcgtgccactgcattttagcctgggtgacagagcaagaccctgtctcaaaacacatatatatggaagtacagtagtgtaaatctaacattaatttctggtttctgcccccgagaaattgcagaatgtagcttagtcagtcatgtctgttctgttttcttctcatgcagttcctaactcttgtcttctttcgtaatctaaaaaaacctgctgcccagctcccatgtcctctgcttctcttgtcttgtgttgcttcacctggcacagctgcatgtccatgttcccccctcagtgcatcgcctcgttgctgcctctgcgtgtgcatgtgtttgggatggacgcacaaaaagccctcctcgtggtccttccagcaagctgggcttccctttactgcacagtgggcaagattcctgccttgtttcctgatgatacggcttctccagagtttggggggcctggaactcttaacttgggggtactgggttctatccagagaggttgacagcaggagggtttgcaacagcacttgtcttgcagacacagtgaagtgctcagtgtgaatctgagccaacagtagatggggtctctgggcagcagcatgggccccacaaggctcttaggcgtcagtgagtgcttttgtgtggagttaatgtgtgtggtttttttaacttgagaatagtagttcccaaacttactgcacattagaaacacctggaatccttcaactattctgaagccctggccaataccccagacgagctaaatcccagactgagtggccccaaccgtcagttatttgaaggtctcggggcatttccagcttctggtccaggctgagagcctgtcctccagaacccttgtgatccaggtgaagatcataactggcccccattctagacaatggagatttttgtttgggaagctaagcatcgtttttggtgatgggaatcacagataaggttatttagcgctttagcgctgtcctgcccagttatgtcattggcagaatgttgttggtctgtgtcctaaatgtgtttccttttgtgttcctaagtaaacagaatcaaagaccagtacaaggtgtccgtgcgcatccctcctgacagtgagaagagcaatttgatccgcatcgagggggacccacagggcgtgcagcaggccaagcgagagctgctggagcttgcatctcgcatggtaagtgccatggctgggccctctagaaaggcactggccttgcgtctcttggccccctctaaggagtagcgtgttgtggtgtgcggccttagagaatggaagtcgacaaatcccacgttgcactggaaccggattggactccctggggccacatttcctttatcctccccaggtcacctgcacgtcttgttctccatggctgtgtgctgtgctagaagggcacagagactgtgtggcagcgtcttggccttggccacaccctgggtgcccagatgcctgggtaccatctccagagattgtgacagacatttctggattctcaaaggcatcccaggtggttctcatgtaaggccagactcgaggatcactgcaaacctgaagtgggggctgttgctctctaccacctggcagaagcactgcactgctctgggctccccgacgtttcatacatgcttatgccaagctgtgagcacccttgcttctgtgagtcagatacccacacttgaaagtctctgggtgcctttaagtatccagagaagtcaaatactgcgtgagtgcctgcagcagcactttggcctgactgtgtgaggaacaagccccagggttccctgtcattcgcttaggggattctttgttcacctcaccccagtacccacacgaggaatctcaaattggcagacctcttttatagccctgagctgcattccagggcgtgatgcagcctcccactgcttgtggccttcccggagctcattccccagtctcatattccaggttctcctcttagcctggcctccagcccaggtcccttgtcctggctgctttatgcccttcctgattgctgagcccttacttctctgtcagccaatagccgtttgatccagaatctctcagaattcttggaaatgtttggttggctgttggtgttcttccctgaattccagctctgcttattctgtatttcttctgacattttaatggggcctgtggaggagttgagagccatgtgggttcagtgccctgtgttgaacgttcttagccatgcggggaaagtggtccgagccaccctctgttcagaagggatcactcactgctatgcagaatgccaggcctccaagtagaagagctgggcctcccctgtagtacctgttaaaacagaagtgctcactgaattgctttggtgattactgctatcatgatagcacttttggttgaagggtcctacagcgagttccttaattggactttgttcagggaagtgacgtgcagcccatgttgcggagtgtagcgatgcttggtgagagcactcattatgcgctgtgcacactcttaacagctggttgctcccggggtgctacgaggtgccacctggagaccacctcacctgctccatgaaggactgtgcccagggctccctggtgtccccttgtgtcagtggggagttgctcgccgtgcttgtgataaatgacatctactttaattgtatttttaggaaaatgagcgtaccaaggatctaatcattgagcaaagatttcatcgcacaatcattgggcagaagggtgaacggatccgtgaaattcgtgacaaattcccagaggtaaagtttcccagagacattctgtaactctataggagtgatccaagtcacacttcaggaatatttgatatttgggatatatgtccttcctcatacttgaacttagtctccccatgatttgttctaggtcatcattaactttccagacccagcacaaaaaagtgacattgtccagctcagaggacctaagaatgaggtggaaaaatgcacaaaatacatgcagaagatggtggcagatctggtaggggtgtttcacatcctttcttgtatgacagcacctggggtgggtggggcatgcgtcctgtcagaagtcctgacccccacaggacccctgctctggggaaagcacataggccctgggctggccttccatctcagggacttgggacaaagtggtgacggcttctcacttaatacctggatgtttagattggcagtcattgttaagactgcagtgtttgtggaattcaggtggggagatttgccttttctcatgcccagttaccttgtttccttgaggagtcttcagatacttagagaaattgtcccatccagtaagataagaggtataacaggtgacatgaggagtcatatactgatttattatttttctcaaaaactgacgtgggaacaggtttagaaagtgtagtgagtagtggatgagaaggccacaggcagccatgtatttccgtgggcttcaccttagctgatggctgccctgggagaggcgatggtgaaggactccagcactgtgagctgctgtcacatcactgccgtgagtgcagaattgcccagagcgtaggggtccgtgctgtctccatgtgtgttctgagccccttccttaaccagctctgatcctggcatgggacatgaactctctcttagccaaaaagtagacttgcatcgattgactgtaatttgcaacgtaagttagttgttggacaaatgatctatctcacttaccctcatgacaaacctctgaaggtttgtttgcaaataccagtgctctgtcgtgttcatgctacccttaggggtagaagggatactgtattttactctctagcacaggtggtgaatcgggctgtgttttttgtctttaaggtggaaaatagctattcaatttctgttccgatcttcaaacagtttcacaagaatatcattgggaaaggaggcgcaaacattaaaaaggtgataacttgtccgctgcatcttgcttcttcttgccttgtcctctgtagccctgcaccattttggttttagactaggagggactcttccttacttctagccctgtgctcaactgtgtctcaactctgggagagctctagtcagcttctcatggtgatctctctccctgtagattcgtgaagaaagcaacaccaaaatcgaccttccagcagagaatagcaattcagagaccattatcatcacaggcaagcgagccaactgcgaagctgcccggagcaggattctgtctattcagaaagacctggtaatgggagatgttttctaatggagatcctccagtaaaatctctaacagcctctaagattgagcctggggttgagtcacgcagggtcattgggccagcgcaggctgatgtggaagattgcacctttcaatccaggctactgatgagttggtcagcagttttctgcctttgtctctcacgatacttacttacctggaccctgcagcagtaacatttgacgtgggcacttgtcttattagacattttcttcttgttacctgaaaatcttatctgaaggtatttacggtattttctttcctttaaaaaaaattgacatgcagtaaattgtacatatttacagtgtacaatgtaatagttttgacgtgtgtatacatccatggaatcattcccaccatcaccccaaaaatgtcccatgccattttgtattacagtctccctccatcccacttggcagctcctgaaaaccacactccccccacccccacttctatccccaggcaacccccagtctgctttcggccacagtagatgcttttggattgtctacgcttttgtgtgaatggaatcataacatctactctttattgggcccatctgctttcactttgcaggatattttgacatttgtgtgtgttgtcacctgtattgttggtttgttctttttta

SEQ ID NO: 8764 - DNA, 6000 bp, Homo sapiens
tttttttttttttttgagacaggatctcactttgttgcccaggctggagtgcagtggtgcagacacagctcatggcagccttgacctcctgggctcaagtgatcctcctgactcagcccttcaagtagttgagactgcaggcatgcaccatcaggcccggctttttttttgtttgttttttggcagatgcgggttttcaccatgttgcccactctggtctcaaacccctaggctcaaatgatccactcatttcagcctaccaaagtgttggaattacaggtgtgagccaccacgcccagccaatcctccccttttttaatgccattgattagtggggaccgtaggtttttggttctgctattgactgattatttttggtgaactggtgttagatctctaggggcttggttacttccacagtcagcttgttgggcaagaagaccctgtaggtggtgctgagtctgtgctgtgatagctggttgttctgctttgaactgattttgagattgatcattaggctcaggtctgggtcttcccttgtaaagttccctatcagtgctttgtgtaatcattttactatcaattggtgattgcccaaattcgttaagggttgcaaattatgcttttctaattctctccctgctcatacattagttgataattcttgtaaagaagaatttttcttcatcagcagttgggtgggaagtaccagataaataatcgattctttggcgctccggcgacttcagtgttgatcagtgactctctttagtgtcattatgaactcaggcattgtccatcattcttcatgctggagctgcttcatctttggccagtgggtcccctcctttcagttttgttccctgcagctttctgtcatgacctattaatatcaataccttctggccaggtgcagtggctcacgcctataatcctagcactttgggaggctgaggcgggcagatcacctcaggtcaggagtttgagaccagcctggccagtatggcgaaaccccatctctactaaaaatacaaaaaaattagccaggcgtggcggtgggtgcttgcaatctcagctacttgggaggctgaggcaggagaatcacttgaacccgggaggcagaggttgcagtgagccaagatcatgccattgcactccagcctgtgcaacaggagcaaaactctgtctcaaaataataaataaataaataaataacttcttaatttctaacacagaaagatgcctcaggctaatcttacatatttccttccacagaccttgagtcagctgtttctctctgaactctgaaccttttgagtaggaaattgcagttggagactccagtctccataggtgcacgtcgcaactaggttgtcagagcttctaggctttttcagaagacagagctaggataattgtacttttaagaaaggaaaagcaggcggtgactctcacgcctgtaatcctagcactttgggaggccgaggtgagcagattgcatgagcacaggaatttgagaccagcctgggcaacatggtcagaccccatctctacaaaaaatagtggtggcgtgctcacctgtaatcccagctacttagaagtctgaggagaaaggattgtttgagcctgggatgtggaggcttctgtgagcagtgtttgcaccaccacagcccagcctgggtgacagagtcccagaaaaggaaaatcatgagttcaaaatcacttgaagtaattccttttttctgagtttttctgtcatcttgatatagttaggtacatttgtttccatttactgtcaatttttaaagtatttcaacatttacatgcttgcaaagtcaacgttatataataaagtactttcagagaaatctcccctgcctgttaccttcaccctgctccctcctcacctttgcaggcggccattcctggtcctggtttatcctttgttgtttgttgtttgagagcagaagcaaaatacagcttgccatacaccctgttctatgccttgctttttttcttttattattttttggaggtgtctgcatatcagtaagtagtgatttttctcatttctttgttcagcagtgtaatattctgtgggcgtactgtaatttacccaggctttcctactgatgggcatttgggtagtttccagactttagctgttacaaattatgttacagtagcaatcgtgtgcatatgctatttcctgttttacccagtgtatcttgggatagattcctagaagtgagatggctgggtcagagggtggctgcatgtggaatcgggccatcggatgctaaatttccttccttaggaattagtgttttgccgtctcatcagcagtatgcaagagccaggctcttcacattcttgggttttagccgatgtgagaggcaaccaaatatactttaaatttgcatttttctgatgagcaagattgagcaccttttcaatatataagggccacttgcattttttattatcttgagtcattgttaggaaagttttttcactatcaggtcataagaaagtttatcttttcttctgctgcttgtaaatgtgttcttacatttcagtttctgatctatttggaatttattgcaaatagggttgaggcactgattgagtttcacttttttccatacggctttcgagttgtcagcactatttttttgtttgttgtaacacagggtctcagcctgccacataagctgaagtgccatggcatgatcacggctcaccggagcctcaacctcctaggctcaggcagttctcctgcctcagccaccccagtagctgggaccacaggcacacgtcaccatggccagctaattttttttttttttttttttttttttttgagacggagtcttgctctgtcgcccaggctggagtgcagtggcgcgatctcggctcactgcaagctccgcctcccgggttcacgccattcgcctgcctcagcctcccgagtagctgggattacaggcgcctgccaccatgctaatttttgtatttttggtgacctcgtgatccacccacctcggcctcccaaagtgctgggattacaggcgtgagccactgcgcctggccttggccagcttatttttaaaatttttgtagaagtcaggtctcaccatgttgcccaggctgatcttggactcctgggctcaaacaatcctctcatctcggcttcccggagtgctgggattacaggcgtgccatcactgtcttgaaaagacgttttgctctagtgaacttgagtggctgcttttatcatgtcctaaatgtttatattaacttagctctgtttctgggttttcagttcagaccagcaggtctttccgtatactggtatttcctgtgttaatgataatggtttcatgtttaatgtctaggaccactgttaacacctccaccctgcactattctttttcagggttttcttgttcatttttgttggttctgtgttacaacctttataatcaactgtttgaaattgtattaatattttaaagttaattgggatgatcgccatctacttaaaccttctgttagctattttaaggagtgttttctaatttcgaatgcacatactccaccttgtgttgggcttgtgtcttgctattttcttgtccttttttcttttttccttttttctattagaaacacatcttttggccaggcgcagtggctcacacctgcaatcccagcactttgggaggctgaggtgggcggatcacaaggtcaggaattcgagaccatcggggccaacatggtgaaaccctgcctctactaaaaatataaaaattagctgggcatggtggcgcacgcctgtagtcccagctaatcgagaggctgaggcaggagaatcccttgaacccaggaggcagaggttacagtgagccaagatggcaccactgcactccagcctgacgtcagagcgagactccgtctcaaaaaaaaagaaacgcatctctttcattacatcttctaagtagttgttgtttgtggaagttaatgttgttaacttcttgatttcagtcttttctctttgctataaatagaatttcacccagtagttttttcagggtttctggatatgcagtcatgcttcttcctgtccagcttttgtggatgttaactcttgtctccctttgtgggtgtatattccagtggatgttaagtagtggtgcagatacactcgaacttaccctaacctgggagtcagggcaaccttccccaagcatgtgatgtttaagctcatgctgttttaatggatgagttggtgctgctgggcaggaataagcaaagatggtgtttctgccagaatgtcttggaaaaatatgctccttcagaacctacaaatattcttgttttcttttattctcttcttgctataggcctcagcaactgttgccattcccaaagaacaccatcgctttgttattggcaaaaatggagagaaactgcaagacttggagctaaaaactgcaaccaaaatccagatcccacgcccagatgaccccagcaatcagatcaagatcactggcaccaaagagggcatcgagaaagctcgccatgaagtcttactcatctctgccgagcaggtgaggcctgtgtgagtgcctcgtgcccctgcctacctgcttgtgcagacctcactccctcatgggttgccgtgtccagtgtggacttcaaggcataatgtggtgggggtggagggcttgactccaactctaaaaagccctgtctgtccccagtttgttttcaaaggcctgttctcatcagatcatcccttcctttccaggacaaacgtgctgtggagaggctagaagtagaaaaggcattccaccccttcatcgctgggccgtataatagactggttggcgagatcatgcaggagacaggcacgcgcatcaacatccccccacccagcgtgaaccggacagagattgtcttcactggagagaaggaacagttggctcaggctgtggctcgcatcaagaagatttatgaggagaaggtacacgatttagaggaggcaaatccccatgggcaggaatagaaatgaggatttgggtctggagattcagttaaggcctggttctgccccttatctttttgtccttgatgaagatgcttattgtctctacacttgagtgacccgggtgagatcggtgcccgcccccccttgctgttgagcatctgcctggcagttgtccttgccgtcctgggcctctgactgtgctgacaggctgccagctgggctgccccgggtcagatgcacatcccggacttgttcacgtcttagattaagctgttagctcagcttagtgaactttgaggtctgaaacgtgttccttaattgagggaaaggattgggtgttttgcagtgttcaaggacgaagttatcagccggcgggtgactagactgaggggaaaaatccagtccttgaacagtgaagtttctggggattggctagtcctgatcacttgttgttcacttcttgggatcagcatctatagtctgggccgctttggcttgctttctgcagcagtggccatgcccacctgcccgcttcccacacctttccctttgactgccccttatggtgctcttatttagaaaaagaagactacaaccattgcagtggaagtgaagaaatcccaacacaagtatgtcattgggcccaagggcaattcattgcaggagatccttgagagaactggagtttccgttgagatcccaccctcagacagcatctctgagactgtaatacttcgaggcgaacctgaaaagttaggtcaggcgttgactgaagtctatgccaaggtaactgcctccgagcatgaagtgtgtctcctttgagtggagtccgcggggccttcatggatgagctctcgatttgtaaatcctggggcctggacacagtgcaggtgcccaggtttggggagagcgtgcctctgagccccaggtgagcagcctggctttcactg

SEQ ID NO: 8765 - DNA, 6000 bp, Homo sapiens
ttagctgatggctgccctgggagaggcgatggtgaaggactccagcactgtgagctgctgtcacatcactgccgtgagtgcagaattgcccagagcgtaggggtccgtgctgtctccatgtgtgttctgagccccttccttaaccagctctgatcctggcatgggacatgaactctctcttagccaaaaagtagacttgcatcgattgactgtaatttgcaacgtaagttagttgttggacaaatgatctatctcacttaccctcatgacaaacctctgaaggtttgtttgcaaataccagtgctctgtcgtgttcatgctacccttaggggtagaagggatactgtattttactctctagcacaggtggtgaatcgggctgtgttttttgtctttaaggtggaaaatagctattcaatttctgttccgatcttcaaacagtttcacaagaatatcattgggaaaggaggcgcaaacattaaaaaggtgataacttgtccgctgcatcttgcttcttcttgccttgtcctctgtagccctgcaccattttggttttagactaggagggactcttccttacttctagccctgtgctcaactgtgtctcaactctgggagagctctagtcagcttctcatggtgatctctctccctgtagattcgtgaagaaagcaacaccaaaatcgaccttccagcagagaatagcaattcagagaccattatcatcacaggcaagcgagccaactgcgaagctgcccggagcaggattctgtctattcagaaagacctggtaatgggagatgttttctaatggagatcctccagtaaaatctctaacagcctctaagattgagcctggggttgagtcacgcagggtcattgggccagcgcaggctgatgtggaagattgcacctttcaatccaggctactgatgagttggtcagcagttttctgcctttgtctctcacgatacttacttacctggaccctgcagcagtaacatttgacgtgggcacttgtcttattagacattttcttcttgttacctgaaaatcttatctgaaggtatttacggtattttctttcctttaaaaaaaattgacatgcagtaaattgtacatatttacagtgtacaatgtaatagttttgacgtgtgtatacatccatggaatcattcccaccatcaccccaaaaatgtcccatgccattttgtattacagtctccctccatcccacttggcagctcctgaaaaccacactccccccacccccacttctatccccaggcaacccccagtctgctttcggccacagtagatgcttttggattgtctacgcttttgtgtgaatggaatcataacatctactctttattgggcccatctgctttcactttgcaggatattttgacatttgtgtgtgttgtcacctgtattgttggtttgttcttttttatttcaggataatattgcactgtagggatagatcatctgtttctttgtgtgtacttggtaattagtgtctttcaaggggttttctattttctccaaggtgtcaaatgtattaacatgaagttttttagaatagtcctgcattatccttttgctgtcaatactgacgtcacctctctttcacagtatatgtaatctgtgccattataaaatgatgccttttccctggtagtatgcttggctccaaagtctatgttatttttttcccccttatatttaaaatttttttggagatgaggtcttgctgtcgtccaggctggagtgcagtggtgcagtcatggctcactacagccttggctttccagactcaagcagtcctcccaccttagccttccaagtagctgggaccacaggtgcatgctaccgcaccaggctaatttttttcttcttttagttagtagagatgaggtcttgttatgttgtccaggctggtctcaaactcctcaagtgatcctctcgccttggccttccaaactgctgggattacaggtgtgagccactgcacccagcctcctttatatgatactaaagtgagtttctttttggcagcttgctttttaaattaaatctatctactaatcccagcactttgggaggctcaggtgggcggatcacttgagctcacaagttcaagaccagcctgggcaaaaccccgtcactactaaaactacaaaaagaattagccagtaatggtgctgcatgcttgtagtctcagccactcaggaggttgaggtgagaggatggcttgagcctgggaggtggaggttgcagtgagctgagattgcgctgctgcactccagcctgggccatagagccagaccttgtctcaaaaaaaaaaaaaagaaaaaagattatgatgtttgcatttaattacagttgtgattatatatgttatatatcacatatttatatttattacatatgtttaacaaacacggttaaataacttactgtaatttttttcctcaattgtggtaaaatatacatagcagaatgtatcattttaatcgttttttaatggttaattcaactgagtacattcacaaggttgtgcaaccatcaccctgtccattttcagagcatttccatcatcttacacagaaactacacccattaaacagcaactaccaccatccccacgtgctcagccaccatgatgtcatgattttatatgattggctttcagtccaccatttacattattaacctttaaaaaaaattccattattttttaaagagatttaaataatatgaaaaaatgtatgtatttatccacacagttgccatttctagagctcttcatttcttggcgtgatccttgtcttcattttccttctgtctgaaggaaaccactcaacatctctcgtagtgtgtatccggtaatgacttctttcacattctgtatgtctgcaagtatttttttccttcactttcgaaaagctgtttctgctgcataaaggtttctaggttggcagtttttttcctttccagacttggcttcattgccgtctcctgttgtttctgatgagaaagctgatggtgcccctggctttgttcctctgtccatgacaaaccttctccctctggctgctgttagggttttaccaccgtctctgagcaagttaggatgtgtctctgtgtagttttcttcatgtctcttagcttggtgtttattgagcttcttgaatatatgtgttcagaatttcatcaaatgtggacaatttttggtcactatgagcattttgttgtgttagccccttgctgtctccccgtcagggactctggtgaccagggtatttagttgtcttctacttgtgctctgtttatttgagttgaggggaggagcgatattggttttctccatgagtttctttaaattcattaattctttgcagtgttctaatctgcctcatttcatctaatatcattttcattttagatgttgttttcttccctagaagttcactctgaattagtatcttctgtattttcagttcttaacatgttcagtctttctgcttttggccatagacaatacagttaaatacctgtttttctgtccttggctggctgattctaacactgtcatttctgggtggttttctattttcttttcctcgttatgggttttccccctattctttgcatttctggtgtttcttaatgagggtgtttttgtattcctctgaatattattttgtgtttgtgaagtcactctgaaacattttgctccttttaggacttgcttttaacgtttattagggaggatcagagcagtatttagttcaggcccaaatatttccactgctgagataagatccttctgagtactccacgtcccagaaagttgaaactgctgaggacggttctggaccaggctccgactgagctgcaggcactgtttcctggtgtctgagctgtaggtactataccaggccccgactgagctgcaggcactgtttcctggtgactgagctgcaggtactgtaccaggccccgactgagctgcaggcactgtttcctggtgtctgagctgcaggtactgtaccaggctccaactgagctaaaagcactgtttcctggtgtctgagctgtaggccactatacccggccctgactgacctaaaggcactgtatgaggcccagctgagctgcaggcactgtttcctgtgatccttctggggattctttcccaggcccagggtgatttcttcacgcgtatcagtatatgagtggctggtctccggatctcagaggttctcgatgccagtctctttgggctctgatctccggatggttctgtttcctcaccttcccgtactgtggcagcaacttggggcagctgtagggctcaccttgtttcctgtctccagggtcttgaaagtcaccattaggcggtaagttcagtccagtccctggtactgcatcttggctgaaagcagaatctttggttttaataggaaaagtttatgtatccataggcatatggagccacctctggcagagccggagcgttgactgaagaaatagagcattatgtgtggtctgaaattaccacgctcccacctcccaatccagcatagattcacgaggactctgggtcctgttgagttaaacacctcccagcgcgcctgctctgctgggcgcaccccactctccccaggacgtgcactctcctcccccgtgcaggtcaaaaatggcttggagaagtttggtcagtgcttgtaagtggcatctccagggctctaggcctgcgtgttcatcaccaccaaagatgatagtttatcttttcctctgccctttttgccacaaaaatgtgacttcctcctcctgccctgtgtttggtttcaggccaacatagccgaggtagaggtctccatccctgccaagctgcacaactccctcattggcaccaagggccgtctgatccgctccatcatggaggagtgcggcggggtccacattcactttcccgtggaaggttcaggaagcgacaccgttgttatcaggggcccttcctcggatgtggagaaggccaagaagcagctcctgcatctggcggaggagaaggtgagcatggggagggagcgtgactcttggcaggaagcctggtcctcagtacagtgttctcgcttctcactgtggaaacccctgaatgcccttcctttgtggcgggtcagaaaacagctctataatgtactgtttatgcgtctttgtttttgctgttactggagggcctttccaggtccaaacgctcacatatgcaatatataaaagttggtctttggcttattagttttggggtgcttttgttttttaaatatgatttacagtaaaattggccattcttcaggtatagttgagttttaagtaacatgcagtcatgtgaccacaatcatcaaaattcattttccatcacccctaaagattgcccatggaattgctgttgtccttgtgtcaaaacccatctgtgggtatgtttccgggctcttctggtgacaccaggtttatgggaagtctggaaatcagtagtgtgagccctcttaactttggctgttctacaccccttgctgatcagcctgtcaatttgtaggaaaaaagcactttcacgttttgattgggattgtgtgaaatttgaagatgagactggcgaggattgacagctcagcagttttgacttttgcaggcatttctccattttttttaggtctgtgattctttattggtgttttataatttttagcacatttttatgttcgacttaacagatctaactactgttactcttttagtgctattgtaaatggcactttttttccatttccagttgttagcacatggaagtgcctgtggtttttgtatgttgaccttcacgaggctgctaaataaagctcatgtatattagcgccagtcactgttttgtggatttttttttttttttttttttttttttttttttttttgagacggagtcttgctctgtcgccc

SEQ ID NO: 8766 - DNA, 6000 bp, Homo sapiens
ctgctggaaaggcgagaccctttaatccagtctactggatgctcccccattgccatgaaccgccttctcagctccggacccatgtgtcgtaagggcaagattattgtcacggtacgagtagtcttctccagttgagtggggtgttcctgttactgtcattgcttttcccattttagacacatgcctcactcctgtcagcagttccaccttttcatggttgaggagcacatgtggtcgccagcctcccatctccagagtcccctaaggcaaggtgactcaccctcctacttcacagagttcttggtcctccccagacagcctttgaaggttcctttcaatcctgcgatttcatgacctggtttctagatccccagtggattagaaaggactgaaggacttttacaggctaacagcaagaagaacaaagtaactgcaaaatagacggagaattcttgaagacggtagctcttggtcaccataagcgctgcagagaccccgaggtccacattctgttgtaggtcagagcccagcacaacaacccttcttctggttcagccgcccagcggttatgtggggtacgggaaagatgatccagccatgcaggagagcaccagtggttctgtgaggattttacttcaaaatagttaagtttagaagtttggcacttaaaagatcactccctcaggtccctggaatagttgtcctctgcaagttggagctggttcatgttttgttttaatatgttttgtttcaagctaacgttttttttttcttccaagaaacttgcctgagtattggtgttagtaaccaaagcataaatatcttgaccttttctgattttgaggtaaaaagatctgagttgtaaaatgtagataagtaacttttctctggtttcctctctctcctctcccacttcccatcccataccagcaaaagctggcaggctgacagaggcggcctcaggacggaccttctggctactgaccgttttgctggtaagtttgaccctgtctgaagacttcctgtccctgggctgtgtgtggacctgggggcgcagggatgcgtattttcttagtcctgtgtgtaccttctttctttatatcacaccttcaagtttctcgtggttcgtcagagatgtctccatagcttcacctcccagcaggaaccatctatagacgtgtgtcccttagatgtgtcatctggcttccgtctgtttttaatcttttatttcttaaatgtgaattatgtttattcagtattatctgaattggggtcttgcttctctttaggattgcaggccttaacttttcttcaacttggggagaggtcttaattatgttataaaaattatgcaaaattcactccttattacttggccttgttgtgcgagtaattgatgcgtaattgtgtaaagaaaatgggttcttcctcactgtagtagtttggagctcacctggaactggggagagggaaggagagggaaggagaggaagctaacattcctacctcagaatgctgaatgtaccccatttttcacataagggagctgtggctttcggagcccatatcccgctgagcactgtggctgtgctaatgagaaactcagcgcccttgggccaggtttcccctgctgtgcgagttctgtcccacacctggagggatgggagaataaccagtcagtgtggatcaagggcatttagcgcaatttgtgggtctgttactgttgctacaaagcactgaggctgctttttcctgtcacgcagctaccacttataaccacctggttaagtcgagatttggaggtggtttagtttggggcctggatgcaccttgcagagagagaccgctggctttttgtagcaactgtcatgatgcattttgtaagcattaagaggtgtgtggtgagcaaattgacagaataaccaaggtcgctgttaggagaacgatcctggtgttgatctatgcctggagcctgggtcaggcaggtggcaggttccatggtccccccacccctgcggttaggggtggtgttgactgtgtctctgtggcccctggggtggagaaatggatgcagactgccccaagtggaggatgagctcctccattacaggcaacttttgaggggacagttaaccagctgttctaggacaaacttgtctaacccgaggcccaggacagctttgaacatggcccaacacaaatttcttaaactttcttaaaacatgaggtttttttttgtttgttttgttttgtttttgtttgtttattagctatcattagtttattttatgtgtgtcccaagatcattcttcttgcattgtggcccagggaagacaaaagattggccacccctgttctaggacctcctttacttgcattttcccccctttttatcacttggtgagagtttgggtatcagcttacatcagaggttgtgaggaaaataaaaaggtatagtttgctggtaaaaaagagagtaaaactttgctaaaactcttaggttaacaatctcatagataattgagggttgtactttgacttctgatttattcttctttgctttagtggttttcccggattgtgtgtaggtgtgagatcaaccatgagttccgttgcagttttgacccaagagagttttgctgaacaccgaagtgggctggttccgcaacaaatcaaaggtgacagcccttttatgtgctcttcctggtaatgtctaaggcattgctccctctaaagcctttaccaaatcccatgccctttctagaagtaccttttggccctgtggttgtggggcagggagggtccaacatcttgtgcactgttttcgcattgctgtgcgtgcaggggcgactggccaggcatgaggaaatgaatcaagtacagtgagatttaacatgtgggcagctttctggaaagccagcgaatttgaccattggtaattaatgcagtccttttcaaaactgctttttcctaattgtggtaaactaaaatctgggctctgaagcatcccagagcattgcttaagcctgccttgaggatgaaggctggaccctggcttcggagttctcgaacgccactggctgggattaagagcagtgctgtacagtagaatagactacaagccacgtgtacaatttttaggattctctggtacttattaaaagggaacaggtgaaattaattttgatattttaccccaatatgtctaatacactgtcatttcaacatctctaatgtaaaaaaaagggggggaaccattgatatttgagattatttctcttcgaagtctgatgtgtatttacaacggtgggacatttccttccatttgaatgccagattttcatccaaaatccttgatctgtgtttagatgttataaaatcttcatttgaaagagcagattgttctactccaggttgttcgaaacacacttaaaagttttccaataactaaattgagtattagttcttaaaattaattaaaatataaaattaacttttccttagtcacactagccacatttcagaagctcatttctggtggctgctgtgtcaggtgttggaacccgagaagctgctttgttctgggggcctgggatcctcctcctggagccagcttccctgtgaagtctgtgtttccctttctagagagggaagacggcactgaaagaatgcttccacctgtcctgtcagcgctgtcgggtagatgggcatgcagctgggaagcgatgggcctggacttgggcatgagcctgtctgattccagagatcatccccctgttctctgtcacatccattcatggtgtttttcactgggccttgctattgccaagacgccatgctcagtcctggggatttgggttatccaaaacagtcacacccttgatttcatggagattgtggctaatggcacaaacacatgaacaaatagggcactatggaagatggaagtgatgataatcagggaacctgatttccacaagccttgctgtcctctgccttgggcagggcagggggagatcagcggtgacaattgccactgcagtctttttttttgagacggagttttgctcttgttgcccaggctggagtgcaatggcgcagtcttggctcactgcaacctctgcctcccgggttcaagcgattgttctgcctcagcctcccgagtagctgggattacaggcatgcaccacccacacctggctaatttgtattattagtagagacagggtttctccatgttggtcaggctggtctcgaactcccgacctcaggtgatctgcctgcctcggcctcccaaagtgctgggattacaggtgtgagccaccacgcccggcctccacggcaatcatttttaaccttgtatgttacagtggaaaatcagagtttgcttcaaaggcaattctcacaggtggtgctgggtaggaccattgttttgcaaatgcaggggtctgctctgtgcctggcattgccatagttgtgatttttttaagtgtgttattagactctagaggacttaaaaattgacgtagcaaggcttgctttcaagggactcaccccgttaggggagtggggctcacaatgtctgagctgatgtttaccaaggaggccatgtggatgggggtaggttcgctgtcagagactgggagtctctggcctcctctagctctcacactcagggtgctgggcctggtgacctcctggggccttttcctatcactatgaattagaagagaggggtggggggagttgtccttggagcatttgatggttcttgtttgtctgtttttaagcactaaaacccttaaaagtgtttttcatgtaatgctaaaagtagtgcttccttttaatctgtgttggctggtccagttgccactctaaattcagaagaggagagcgaccctccaacctacaaggatgccttccctccacttcctgagaaagctgcttgcctggaaagtgcccaggaaccctctggagcctgggggaacaagatccgacccatcaaggcttctgtcatcactcaggtagaaacaccattctttcttttaaaaattttatcatgtaacatgtctatgtaaatttttaaattttttttcttttttttttttttgagacagagtcccgctctgtcgcccaggctggagtgcagtggtgcgatctcggctcactgcacgctccgcctcccgggttcacgccattctcctgcctcagcctcccgagtagctgggactacaggtgcccgccaccacgcccggctaatttttgtatttttagtagagacggggtttcaccatcttaacaaggatggtctccatctcctgacctcgtgatccgccttcctcggcctcccaaagtgctgggattataggcatgagccaccgcgcccggccagttttttaaatttttaaaaattaattgctgttctttcttaacctatccttccaagcgtagaatctgatggaagagtttctgaatgtgcaagattgagaatgctttgagtagctaaagggagaaggccttcaatttaaatcatcccccaccccagagatgtttctgtcgaccacttctctcatgtccaccctgtatgctagcactcagtaggacaggcacgtggtcgttttgcaggcagtgtttgtcagatgaatgggtcctgttttctgttctctattcattatcctgctttctcgaagaggttaaccagtttcctggttttctttggcttcagtagcccttctctctgctacctgaatttgagatgttagtgagtttcaaaacttttatataaattcatatcatctggtcatggtggaaaattactatctcgctgccagtgtcttccctgaattttaggctcataaacagttgcatcccaatccttccattttcacctgtctgctatcttgttaatggttttgttaaatgtaccactgtctacttggtgactgtggtctcacaccagggtagttgatccctcttgcttccaccttgtccctcctcagt

SEQ ID NO: 8767 - DNA, 6000 bp, Homo sapiens
actgctgaggacggttctggaccaggctccgactgagctgcaggcactgtttcctggtgtctgagctgtaggtactataccaggccccgactgagctgcaggcactgtttcctggtgactgagctgcaggtactgtaccaggccccgactgagctgcaggcactgtttcctggtgtctgagctgcaggtactgtaccaggctccaactgagctaaaagcactgtttcctggtgtctgagctgtaggccactatacccggccctgactgacctaaaggcactgtatgaggcccagctgagctgcaggcactgtttcctgtgatccttctggggattctttcccaggcccagggtgatttcttcacgcgtatcagtatatgagtggctggtctccggatctcagaggttctcgatgccagtctctttgggctctgatctccggatggttctgtttcctcaccttcccgtactgtggcagcaacttggggcagctgtagggctcaccttgtttcctgtctccagggtcttgaaagtcaccattaggcggtaagttcagtccagtccctggtactgcatcttggctgaaagcagaatctttggttttaataggaaaagtttatgtatccataggcatatggagccacctctggcagagccggagcgttgactgaagaaatagagcattatgtgtggtctgaaattaccacgctcccacctcccaatccagcatagattcacgaggactctgggtcctgttgagttaaacacctcccagcgcgcctgctctgctgggcgcaccccactctccccaggacgtgcactctcctcccccgtgcaggtcaaaaatggcttggagaagtttggtcagtgcttgtaagtggcatctccagggctctaggcctgcgtgttcatcaccaccaaagatgatagtttatcttttcctctgccctttttgccacaaaaatgtgacttcctcctcctgccctgtgtttggtttcaggccaacatagccgaggtagaggtctccatccctgccaagctgcacaactccctcattggcaccaagggccgtctgatccgctccatcatggaggagtgcggcggggtccacattcactttcccgtggaaggttcaggaagcgacaccgttgttatcaggggcccttcctcggatgtggagaaggccaagaagcagctcctgcatctggcggaggagaaggtgagcatggggagggagcgtgactcttggcaggaagcctggtcctcagtacagtgttctcgcttctcactgtggaaacccctgaatgcccttcctttgtggcgggtcagaaaacagctctataatgtactgtttatgcgtctttgtttttgctgttactggagggcctttccaggtccaaacgctcacatatgcaatatataaaagttggtctttggcttattagttttggggtgcttttgttttttaaatatgatttacagtaaaattggccattcttcaggtatagttgagttttaagtaacatgcagtcatgtgaccacaatcatcaaaattcattttccatcacccctaaagattgcccatggaattgctgttgtccttgtgtcaaaacccatctgtgggtatgtttccgggctcttctggtgacaccaggtttatgggaagtctggaaatcagtagtgtgagccctcttaactttggctgttctacaccccttgctgatcagcctgtcaatttgtaggaaaaaagcactttcacgttttgattgggattgtgtgaaatttgaagatgagactggcgaggattgacagctcagcagttttgacttttgcaggcatttctccattttttttaggtctgtgattctttattggtgttttataatttttagcacatttttatgttcgacttaacagatctaactactgttactcttttagtgctattgtaaatggcactttttttccatttccagttgttagcacatggaagtgcctgtggtttttgtatgttgaccttcacgaggctgctaaataaagctcatgtatattagcgccagtcactgttttgtggatttttttttttttttttttttttttttttttttttttgagacggagtcttgctctgtcgcccaggctggagtgtagtggcgcaatctcgcctcactgcaagctccgcctcctgggttcacgccattctcctgcctcagcctcccgagtagctgggaccacaggcgcccgacacctcacccagctaattttttgtatttttagtagagatggggtttcacagtgttagctaggatggtctcgatctcctgacctcgtgatccgcccgcctcggcctcccaaagtgctgggattacaggcgtgagccactgcgcccggcccactgttttgtggatccttattttatatgtcacaatcacgtggtctgtggacagttacatttctctctaatctggagccttgtatttcttgtcttttttgttgttgttattagattgatgtttttgtctttgtgtttaaccagccttgcgtttctggggtaatccctgcttggtttggtaggttgtctttggccatattgctagattgcatttgcctaattgattgcctaatgtttgactaatgctgctatttgtggatgtctttgaaaagtagcagagtctctaggtggtatttggtgaaacctgcacttaaaaggtagcaaagttgttatttaatatttttgtgctagcatgtttttctttggtatttttgcttgcgggccagatcttgggtccggagaaaggcaagagctccccgtgtggacctgagtcccgtggagcagcgcccttctcggggcccctgcgtgggtctgccagaagcactggtgtccacaagcagtgtccggggcctttccaggaccctcgttttcttactgccacacaagggcgtcgcactacacgaggcctctgaggaccggtctctaactgtagccttggttggcttgtgtccctctgagcttgagcttgagcctggggagtggctggttttgtggaggctgatctgtagcactcgtgggaagaaagggagcctggcccagatttgtgtgtgcttggtctggaagcaggtagaagagtgggagcatggtgcacacctcttgggcagcttgcttcctgctctgctgggcacaccccacgctccccaggacgtgcactccgccaacatatcgtccggcgcgttgctcccacctccccctgtgcagatcaaaaatggcttggagaagtttggtcagtgcttgtaagtggcaggaccagggttctaagcctgtgtgttcatcccaccagcatctggttgttgtggaagagaagtaggtgtgcagtctgggtattcatctgtttattcagtgaggtgtgctagccccattttgggggtattggtgcaacatcaggacactggtgacaatgtaaggggagcccgagcttgctgtcctacagaccctcttgtcttcctcactgtggtccaggcacgtggtgtcaggctaacacagtgggattggtttctgcagcaaaccaagagtttcactgttgacatccgcgccaagccagaataccacaaattcctcatcggcaaggggggcggcaaaattcgcaaggtgcgcgacagcactggagcacgtgtcatcttccctgcggctgaggacaaggaccaggacctgatcaccatcattggaaaggaggacgccgtccgagaggcacagaaggagctggaggccttgatccaaaacctggtagggagcgggcctcggcggccgactctgctggggccgtgatggggtggcttatcttccatctcttcttaacactgcaggataatgtggtggaagactccatgctggtggaccccaagcaccaccgccacttcgtcatccgcagaggccaggtcttgcgggagattgctgaagagtatggcggggtgatggtcagcttcccacgctctggcacacagagcgacaaagtcaccctcaagggcgccaaggactgtgtggaggcagccaagaaacgcattcaggagatcattgaggacctggtaggcacttgggtgctcggggaggggttctcaccccccagtggccactcaccgaagccgtgtatgagtgttcgctccaccctgtagggaggtgactccctcatacagccctggaaggcttcagaaggggctttctggtgctcgctcttctttcctcagcctgtctggcctccttcctgatagttggtgagaattctgcctgcgagaagcacttaaaaaaaaaaagagagagagaaggagaagaggagaggggagagagagagaggaaagaaagcaagagaaagaaagaaaatgcattctgtataagggatcaggaaaaatgaaaatgcagtctaaggggtcagctctcttctcccctctgtgaaggaaagaaaatcgatttgagggcatccacgtgaatccatgggaagtcatgagaagacgtggtctttagaagcagtctttagagagtgtcccctccaggccactcccctgccagggccttggattccctttccctaataatcaagtctgatgcctcctcatggagtcagaggctaccccaggaggtcccactcctttggctgaattggccaccctccagggatggcacctggccttctgggacacatttcagaggaggcccacccccttagacctgtcctgctacctccctcctccctgcgcctggagccctggactcgggagaaggggagcatctgtgccaagtggctgtagaggacagggaggaaggtggtgtgaagagtgctgtaaaacttgccctaaggaatttaatctttgctcttttcttttttctttgtgtacctccctccaggaagctcaggtgacattagaatgtgctataccccagaaattccatcgatctgtcatgggccccaaaggttccagaatccagcagattactcgggatttcagtgttcaaattaaattcccagacagagaggagaacgcaggtgggtcccccattagccctgctctgcttgttaatagtggcgcctcccatgtgagaggcggggctgtcgcacatactggtgaggctctttcctgtctctgctggaaaaccatctatgtattctgggggcttccagaggttcagggtcactccctggcctttaaaagatggaccacgtcagttactgacagagtgaccaggtgaccttcataggtcctagagacacacaaggtagccagtcccaaggcgatgaggagcgtgcagcctcatcctcgggtgtcccgagttcagtcccagtgattctcatgacatcgtttggatcgcatgagccccgtcgtagagcttcctcctccacatctcccatcactgtggggtgtcccctgtgaggcaggcagctgcagcctctggctggccagagggcaccatccaagtggccggcagttctaggagagcattcagttccccgtaccatgcttgcccccagctctgctcatgcacctggtggtggggaggcgacctgtgggatgcgggtcggttgcctctctctcacttgctctgcatttgtgaaacaaaaggtatgccctccactctgtgttatcagatgcccgccctccactctgtgttatcagtcttggttgagctgtttgggcggcaggtggccctgcagcctgctgagtgcacatagtgtcatctctctgggcatccaggaagcatgtcacacacagccattcaagcccctttgttttcctgagaatacagggtgttttgagtaggaaactaataaactcatactgcactctgtctatgttttacacttcagtggttatttaaaactttgattttgatagaatttcacagaatagtataaagacacatcctgtggcaccagtttcttttctcaacttctccccttttacacacgttttttttctgaatgtcatttttagacatgtccctttattcatggtgggt

SEQ ID NO: 8768 - DNA, 6000 bp, Homo sapiens
cacttgaacccgggaggcagaggttgcagtgagccaagatcatgccattgcactccagcctgtgcaacaggagcaaaactctgtctcaaaataataaataaataaataaataacttcttaatttctaacacagaaagatgcctcaggctaatcttacatatttccttccacagaccttgagtcagctgtttctctctgaactctgaaccttttgagtaggaaattgcagttggagactccagtctccataggtgcacgtcgcaactaggttgtcagagcttctaggctttttcagaagacagagctaggataattgtacttttaagaaaggaaaagcaggcggtgactctcacgcctgtaatcctagcactttgggaggccgaggtgagcagattgcatgagcacaggaatttgagaccagcctgggcaacatggtcagaccccatctctacaaaaaatagtggtggcgtgctcacctgtaatcccagctacttagaagtctgaggagaaaggattgtttgagcctgggatgtggaggcttctgtgagcagtgtttgcaccaccacagcccagcctgggtgacagagtcccagaaaaggaaaatcatgagttcaaaatcacttgaagtaattccttttttctgagtttttctgtcatcttgatatagttaggtacatttgtttccatttactgtcaatttttaaagtatttcaacatttacatgcttgcaaagtcaacgttatataataaagtactttcagagaaatctcccctgcctgttaccttcaccctgctccctcctcacctttgcaggcggccattcctggtcctggtttatcctttgttgtttgttgtttgagagcagaagcaaaatacagcttgccatacaccctgttctatgccttgctttttttcttttattattttttggaggtgtctgcatatcagtaagtagtgatttttctcatttctttgttcagcagtgtaatattctgtgggcgtactgtaatttacccaggctttcctactgatgggcatttgggtagtttccagactttagctgttacaaattatgttacagtagcaatcgtgtgcatatgctatttcctgttttacccagtgtatcttgggatagattcctagaagtgagatggctgggtcagagggtggctgcatgtggaatcgggccatcggatgctaaatttccttccttaggaattagtgttttgccgtctcatcagcagtatgcaagagccaggctcttcacattcttgggttttagccgatgtgagaggcaaccaaatatactttaaatttgcatttttctgatgagcaagattgagcaccttttcaatatataagggccacttgcattttttattatcttgagtcattgttaggaaagttttttcactatcaggtcataagaaagtttatcttttcttctgctgcttgtaaatgtgttcttacatttcagtttctgatctatttggaatttattgcaaatagggttgaggcactgattgagtttcacttttttccatacggctttcgagttgtcagcactatttttttgtttgttgtaacacagggtctcagcctgccacataagctgaagtgccatggcatgatcacggctcaccggagcctcaacctcctaggctcaggcagttctcctgcctcagccaccccagtagctgggaccacaggcacacgtcaccatggccagctaattttttttttttttttttttttttttttgagacggagtcttgctctgtcgcccaggctggagtgcagtggcgcgatctcggctcactgcaagctccgcctcccgggttcacgccattcgcctgcctcagcctcccgagtagctgggattacaggcgcctgccaccatgctaatttttgtatttttggtgacctcgtgatccacccacctcggcctcccaaagtgctgggattacaggcgtgagccactgcgcctggccttggccagcttatttttaaaatttttgtagaagtcaggtctcaccatgttgcccaggctgatcttggactcctgggctcaaacaatcctctcatctcggcttcccggagtgctgggattacaggcgtgccatcactgtcttgaaaagacgttttgctctagtgaacttgagtggctgcttttatcatgtcctaaatgtttatattaacttagctctgtttctgggttttcagttcagaccagcaggtctttccgtatactggtatttcctgtgttaatgataatggtttcatgtttaatgtctaggaccactgttaacacctccaccctgcactattctttttcagggttttcttgttcatttttgttggttctgtgttacaacctttataatcaactgtttgaaattgtattaatattttaaagttaattgggatgatcgccatctacttaaaccttctgttagctattttaaggagtgttttctaatttcgaatgcacatactccaccttgtgttgggcttgtgtcttgctattttcttgtccttttttcttttttccttttttctattagaaacacatcttttggccaggcgcagtggctcacacctgcaatcccagcactttgggaggctgaggtgggcggatcacaaggtcaggaattcgagaccatcggggccaacatggtgaaaccctgcctctactaaaaatataaaaattagctgggcatggtggcgcacgcctgtagtcccagctaatcgagaggctgaggcaggagaatcccttgaacccaggaggcagaggttacagtgagccaagatggcaccactgcactccagcctgacgtcagagcgagactccgtctcaaaaaaaaagaaacgcatctctttcattacatcttctaagtagttgttgtttgtggaagttaatgttgttaacttcttgatttcagtcttttctctttgctataaatagaatttcacccagtagttttttcagggtttctggatatgcagtcatgcttcttcctgtccagcttttgtggatgttaactcttgtctccctttgtgggtgtatattccagtggatgttaagtagtggtgcagatacactcgaacttaccctaacctgggagtcagggcaaccttccccaagcatgtgatgtttaagctcatgctgttttaatggatgagttggtgctgctgggcaggaataagcaaagatggtgtttctgccagaatgtcttggaaaaatatgctccttcagaacctacaaatattcttgttttcttttattctcttcttgctataggcctcagcaactgttgccattcccaaagaacaccatcgctttgttattggcaaaaatggagagaaactgcaagacttggagctaaaaactgcaaccaaaatccagatcccacgcccagatgaccccagcaatcagatcaagatcactggcaccaaagagggcatcgagaaagctcgccatgaagtcttactcatctctgccgagcaggtgaggcctgtgtgagtgcctcgtgcccctgcctacctgcttgtgcagacctcactccctcatgggttgccgtgtccagtgtggacttcaaggcataatgtggtgggggtggagggcttgactccaactctaaaaagccctgtctgtccccagtttgttttcaaaggcctgttctcatcagatcatcccttcctttccaggacaaacgtgctgtggagaggctagaagtagaaaaggcattccaccccttcatcgctgggccgtataatagactggttggcgagatcatgcaggagacaggcacgcgcatcaacatccccccacccagcgtgaaccggacagagattgtcttcactggagagaaggaacagttggctcaggctgtggctcgcatcaagaagatttatgaggagaaggtacacgatttagaggaggcaaatccccatgggcaggaatagaaatgaggatttgggtctggagattcagttaaggcctggttctgccccttatctttttgtccttgatgaagatgcttattgtctctacacttgagtgacccgggtgagatcggtgcccgcccccccttgctgttgagcatctgcctggcagttgtccttgccgtcctgggcctctgactgtgctgacaggctgccagctgggctgccccgggtcagatgcacatcccggacttgttcacgtcttagattaagctgttagctcagcttagtgaactttgaggtctgaaacgtgttccttaattgagggaaaggattgggtgttttgcagtgttcaaggacgaagttatcagccggcgggtgactagactgaggggaaaaatccagtccttgaacagtgaagtttctggggattggctagtcctgatcacttgttgttcacttcttgggatcagcatctatagtctgggccgctttggcttgctttctgcagcagtggccatgcccacctgcccgcttcccacacctttccctttgactgccccttatggtgctcttatttagaaaaagaagactacaaccattgcagtggaagtgaagaaatcccaacacaagtatgtcattgggcccaagggcaattcattgcaggagatccttgagagaactggagtttccgttgagatcccaccctcagacagcatctctgagactgtaatacttcgaggcgaacctgaaaagttaggtcaggcgttgactgaagtctatgccaaggtaactgcctccgagcatgaagtgtgtctcctttgagtggagtccgcggggccttcatggatgagctctcgatttgtaaatcctggggcctggacacagtgcaggtgcccaggtttggggagagcgtgcctctgagccccaggtgagcagcctggctttcactgtgacacgaccttgagctctgcaaacccatggctgttctcccattttcttaggccaatagcttcaccgtctcctctgtcgccgccccttcctggcttcaccgtttcatcattggcaagaaagggcagaacctggccaaaatcactcagcagatgccaaaggtaaggacacgtttttcacctgttgtattgaatttgtcttgttttctgtctttctgtttctgatattgctttgttgacctttgtactgtggatgcccttgaaaactggtgtatttttctgaattaactggcctgtttgacatggtcaacttccgtgttagcttaaagaacagcagaataaatgtctgtagatgtctgtaccatccttctggcctttaaccagagaggattgtatgttcttaggtttcataagtatcttaagaaacatgtcatttagtaattatggtgaaataacttcatgatactttggcgggccgggtgcggtggctcatgaggtcaggagatcgagaccatcctggctaacatggtgaaaccccgactctactaaaaatacaaaaaattagccgggcttggtggcgggcacctgtggtcccagctgcttgggaggctgaggcaggagaatggcgtgaacccgggaggtggagcttgcagtgagccgagatggcaccactgcattccagccttggcgacagagcgagactctgtctcaaaaaaaaaaaaaaaatactttgaagagcagaacttgtatacaaattgtattaagtgtgaatttaaagcgttctcagtttaccaaaggagattgtagcccccaggaaacatgaacaaaaaagaaataccagagaatccaaccatcatatttaattcctgttttatttaaactttgtttccaattaatgttacagtcctttttaaaaattaaattttttttattttattccttttttttagtgacaaagcctcactctgtcacccaggctggggtgcagtagcgcagtcatagctcactgcagccttgaactcatgggtcaagtgatccgctcgtctcagcttcccaagtagctggcactacaggcgccccaggctagttttcgtggaggcagagt

SEQ ID NO: 8769 - DNA, 6000 bp, Homo sapiens
ggagtcttgctctgtcgcccaggctggagtgcagtggcgcgatctcggctcactgcaagctccgcctcccgggttcacgccattcgcctgcctcagcctcccgagtagctgggattacaggcgcctgccaccatgctaatttttgtatttttggtgacctcgtgatccacccacctcggcctcccaaagtgctgggattacaggcgtgagccactgcgcctggccttggccagcttatttttaaaatttttgtagaagtcaggtctcaccatgttgcccaggctgatcttggactcctgggctcaaacaatcctctcatctcggcttcccggagtgctgggattacaggcgtgccatcactgtcttgaaaagacgttttgctctagtgaacttgagtggctgcttttatcatgtcctaaatgtttatattaacttagctctgtttctgggttttcagttcagaccagcaggtctttccgtatactggtatttcctgtgttaatgataatggtttcatgtttaatgtctaggaccactgttaacacctccaccctgcactattctttttcagggttttcttgttcatttttgttggttctgtgttacaacctttataatcaactgtttgaaattgtattaatattttaaagttaattgggatgatcgccatctacttaaaccttctgttagctattttaaggagtgttttctaatttcgaatgcacatactccaccttgtgttgggcttgtgtcttgctattttcttgtccttttttcttttttccttttttctattagaaacacatcttttggccaggcgcagtggctcacacctgcaatcccagcactttgggaggctgaggtgggcggatcacaaggtcaggaattcgagaccatcggggccaacatggtgaaaccctgcctctactaaaaatataaaaattagctgggcatggtggcgcacgcctgtagtcccagctaatcgagaggctgaggcaggagaatcccttgaacccaggaggcagaggttacagtgagccaagatggcaccactgcactccagcctgacgtcagagcgagactccgtctcaaaaaaaaagaaacgcatctctttcattacatcttctaagtagttgttgtttgtggaagttaatgttgttaacttcttgatttcagtcttttctctttgctataaatagaatttcacccagtagttttttcagggtttctggatatgcagtcatgcttcttcctgtccagcttttgtggatgttaactcttgtctccctttgtgggtgtatattccagtggatgttaagtagtggtgcagatacactcgaacttaccctaacctgggagtcagggcaaccttccccaagcatgtgatgtttaagctcatgctgttttaatggatgagttggtgctgctgggcaggaataagcaaagatggtgtttctgccagaatgtcttggaaaaatatgctccttcagaacctacaaatattcttgttttcttttattctcttcttgctataggcctcagcaactgttgccattcccaaagaacaccatcgctttgttattggcaaaaatggagagaaactgcaagacttggagctaaaaactgcaaccaaaatccagatcccacgcccagatgaccccagcaatcagatcaagatcactggcaccaaagagggcatcgagaaagctcgccatgaagtcttactcatctctgccgagcaggtgaggcctgtgtgagtgcctcgtgcccctgcctacctgcttgtgcagacctcactccctcatgggttgccgtgtccagtgtggacttcaaggcataatgtggtgggggtggagggcttgactccaactctaaaaagccctgtctgtccccagtttgttttcaaaggcctgttctcatcagatcatcccttcctttccaggacaaacgtgctgtggagaggctagaagtagaaaaggcattccaccccttcatcgctgggccgtataatagactggttggcgagatcatgcaggagacaggcacgcgcatcaacatccccccacccagcgtgaaccggacagagattgtcttcactggagagaaggaacagttggctcaggctgtggctcgcatcaagaagatttatgaggagaaggtacacgatttagaggaggcaaatccccatgggcaggaatagaaatgaggatttgggtctggagattcagttaaggcctggttctgccccttatctttttgtccttgatgaagatgcttattgtctctacacttgagtgacccgggtgagatcggtgcccgcccccccttgctgttgagcatctgcctggcagttgtccttgccgtcctgggcctctgactgtgctgacaggctgccagctgggctgccccgggtcagatgcacatcccggacttgttcacgtcttagattaagctgttagctcagcttagtgaactttgaggtctgaaacgtgttccttaattgagggaaaggattgggtgttttgcagtgttcaaggacgaagttatcagccggcgggtgactagactgaggggaaaaatccagtccttgaacagtgaagtttctggggattggctagtcctgatcacttgttgttcacttcttgggatcagcatctatagtctgggccgctttggcttgctttctgcagcagtggccatgcccacctgcccgcttcccacacctttccctttgactgccccttatggtgctcttatttagaaaaagaagactacaaccattgcagtggaagtgaagaaatcccaacacaagtatgtcattgggcccaagggcaattcattgcaggagatccttgagagaactggagtttccgttgagatcccaccctcagacagcatctctgagactgtaatacttcgaggcgaacctgaaaagttaggtcaggcgttgactgaagtctatgccaaggtaactgcctccgagcatgaagtgtgtctcctttgagtggagtccgcggggccttcatggatgagctctcgatttgtaaatcctggggcctggacacagtgcaggtgcccaggtttggggagagcgtgcctctgagccccaggtgagcagcctggctttcactgtgacacgaccttgagctctgcaaacccatggctgttctcccattttcttaggccaatagcttcaccgtctcctctgtcgccgccccttcctggcttcaccgtttcatcattggcaagaaagggcagaacctggccaaaatcactcagcagatgccaaaggtaaggacacgtttttcacctgttgtattgaatttgtcttgttttctgtctttctgtttctgatattgctttgttgacctttgtactgtggatgcccttgaaaactggtgtatttttctgaattaactggcctgtttgacatggtcaacttccgtgttagcttaaagaacagcagaataaatgtctgtagatgtctgtaccatccttctggcctttaaccagagaggattgtatgttcttaggtttcataagtatcttaagaaacatgtcatttagtaattatggtgaaataacttcatgatactttggcgggccgggtgcggtggctcatgaggtcaggagatcgagaccatcctggctaacatggtgaaaccccgactctactaaaaatacaaaaaattagccgggcttggtggcgggcacctgtggtcccagctgcttgggaggctgaggcaggagaatggcgtgaacccgggaggtggagcttgcagtgagccgagatggcaccactgcattccagccttggcgacagagcgagactctgtctcaaaaaaaaaaaaaaaatactttgaagagcagaacttgtatacaaattgtattaagtgtgaatttaaagcgttctcagtttaccaaaggagattgtagcccccaggaaacatgaacaaaaaagaaataccagagaatccaaccatcatatttaattcctgttttatttaaactttgtttccaattaatgttacagtcctttttaaaaattaaattttttttattttattccttttttttagtgacaaagcctcactctgtcacccaggctggggtgcagtagcgcagtcatagctcactgcagccttgaactcatgggtcaagtgatccgctcgtctcagcttcccaagtagctggcactacaggcgccccaggctagttttcgtggaggcagagtcttactagttgcccaggttgatctcgaactcgtgggatcaagtagtcctcctacctcagcctcccaaaatattgaggttatgggtgtgagtcactgtgcccagccccttttactttgtatagcttcatataaggaccagtctgccttccttaactccttacctggaggataataaaccaggaactctggcagccttgtctatgtcaagcaagttactttaccaccttggtacagctatacgagttttaaaattccatccgtgctctgtctcattctttatgcaactcaagaggaccaggccttgtaaaagttcagatggtggaggagcatgtcgcatgtcgcatgctttatgttagtggcttctgtggggcaaacggtgtccttagtgagaggcaggattattcggccacagtatttagtttcctgactatggctccctaaccctccctttcaactttgtttgatggctgtggatatgtccctccctccctcacatctatgtgaagcagtttgggatcagaagccgctccgaagagagctcccactgggagctcaggggctgcagctgtgccattctgttttagctatctctttggttttggtgtggtaggttcacatcgagttcacagagggcgaagacaagatcaccctggagggccctacagaggatgtcaatgtggcccaggaacagatagaaggcatggtcaaagatttggtaaggtaccccttggaatgttgtgtgtgctggtgacaagggaggctctgagttgggcatgggcggtcatctctcgatgacatcccacatgtccgggcacagacacccagggcatcctagctgggtgagtaataggttctgaaacaaccagaagctggtcgaagtcctggaataatcgtgggtggaggaaacttcatcttgaagaaggcatctttcaggggagatgcaggggcagtctccaacaattcctgacagctgagtggtcagaaaaggcaaccgtggagactgctgggttttggttcagctcattggccaagtaaccaggcgcatccatggacctctgtgctcctcctgcagattaaccggatggactatgtggagatcaacatcgaccacaagttccacaggcacctcattgggaagagcggtgccaacagtgagtgaggctgtctgttgcggtggggccagtgtgccctgagacccttgtggggggtgtcagctgtgagaactgtgacgtccgtgcagacagtccaggcccattgctgcctgtaatgggagttacagactttacatcctcctgcctgctggaagaggccacttttccttttccctttggtgcagtggttggattagagctgcttggccagtgggtgaattgtcacttttggaaatccatctaagccctccccaaataacccacagaggccatgttgaaggcatgcccaagggcagcattctctatatttccgtcagacctgctaggttagccaatcagtgttggtagtactcatgccttctgaacgtggaaactgctgatctggaactcactgaagagtaaaaacattctagatttgtgcccaagtaaaacaacatggggagggatacttttttgagacagggtctcactctgtcacccaggctggagtgcagtggcgtgatctcagctcactacaacctctgcctaccgggctcaagcaattctccagcttcagcctcctgagtagctgggactacaggtgcatgccaccacagccaattaatttttgtattt

SEQ ID NO: 8770 - DNA, 6000 bp, Homo sapiens
gcccgcctcggcctcccaaagtgctgggattataggcgtgagccacctcgcccggccttgttgtaagttttatatttgtttctttgaagattggggaaggttggttattgaaactatatttctaactcagtttgggtaacttatttttctagaatttgcccatttcatctgttttcgagtttttgacactactcttctcaatagaattcttacatgatttttcaaagtctccattttagctgtagtttttgacccccttttaattcttaatattgcctacttatactgtccttttttcaggaatcatttttgccagagattgaacttgtcttttaaaaaatttggatgtaggttttgtttatcctttgtggtatatgtcttttagttcattaatatcttatctttatttccttctacctttcttttgtttattctggtgttttttgttctagtttcagtagtggatgattagcttattttatttttttcctcttcactaataggatggcttaaagttacaaggctttaagcaacaatcttgtttcattccacaaggtgggatatataattgcttaatggcttagttttaaatgttttcagatttcttccttgttccatgagttacttagaagcaagttttaaaacttatatagtctttaaatttttaagttgagttctaattgagtggtggtctgagaatgttactatgatttaattctttactatttgtttaattttttttttttttttagctcctggccaggttttatggttttttaaaaaggtgtcacttttaatcatgtgttcaataaagtagatttattaattgtgtttgcatcctctatacattttccaatcccataacctgtgttaccaagagagttgggtcagtctcaccctttaaccttggatatatcaatttctcctagtaaccttcagtttttactttatatgttttgcagctatgttattagatacatgtaatcagagttactgaatttttaagttcttgaccttctctgttcttaataatgatttttatcctacagtctgtgttatctgaaaataatataaccaactttcatatggttagtatttgctcggagtacttcttccatctctttatttcagcctatatgtctgtatggtttaggactgttgaatggcctatagctgctgttagagttggtcagtttagtctgttaacacgtatttagattactgatgggtttgaattcattcctctcatcagttttgtgttttatttaccttgctttttcattgcttcttttacttttcttgcctcctattcttttttcttgttttctctcttttctttaacaattattaatacagtataatgtaaccagtaataatgtacatcgtaatgaataccgctgaacctaccacctaatccaagatctagaacattgccaataacttccatttgagtaagagtttagtttgaatgttaaaaactctttgtttttcctagattgtctttaaatttttaacattcattctcaacaagggctaaaattagtatctctagcctctccccaaataataagaatcttgaaaccttgcaacttcatatcccccttccaccttatatattattgctgcctaagcattttaattctgtcttttattttattttgtacttgcatattctgcttacgtacctatctataatttaattcccttcaaattttattgttgatattagtatagggtcaccacttgtttcactttatctaggttgctggtttatcagtattccttctttctggtctctctggctttcattttcttgctgaaatatgtcctttagtaggtctgtcagcagggatctattggtagtagttgctttatctttgaatatgtctattctcattcttaaatgaaaaagaattcttaaatccaaattgacagttatttctttcgccataatttatatatagccattatcctctggtatgtattgttttaagtggtctgcctttggtctcatagtattctttatgagtaacctgtcttttctctctagttgcttttaaggtcctgctcttgtctttggtgctctgaggttactctgtagtgtgttttgatttggattagtttaaattatcctgctagacaccttctctgtcttttttgggatgagggaagaatgttgtatcattaaatcttagaattttctcagctattttaaaaaatgtttcttctctgttctttggattttttcttttctctttttgttttggaactccagttatagacatatgttagagtttctcattccatggttcttagctctttcattcgttccatctctcgattttttttctaaaatgtcacctttatgtctcttatgcttttttattgtctcaatcttagttctgtctcccgaagttcttgagtctaatcctacttctaatccatccttccttctttttgagctttgggcttttagcctctctaccatttgtgctgatctgtgggtatcctttttagcctggtatgaggtttattctttcctgaggcggggtgggggggaattgctttctgttttgttaatatctcagtttgggctaggggttcctggacaaatgggcttggttgtagagtactagtccattgtccctacagctcaagagatgcttctgtctgccagctcaggatagtcagagaaggcatcctgtagtcccctctacactagtgggcttttcttcttctttttttgatctacctatcttctggtaagtgtagcccttttggggatcatgactttatggaataggagggtatctcttctcacctcctaccttgagcagacccaaacttctcccccgtccctttgagggctgaaaactcaaatgtcacagacagacgttcacacttcatttggtctgaatattgctagccatggaatttctaaaatttgcttctacgaactatttattagtttcagtgtgctaagcctgctgggaggaaatgctggttgtgagcatcagcacagaagcattctggacggttattagcacaaagttagcatatgattttgtaatctcttctgctaacagtgttttttaaactaactctttacggtgtcctgtgtactaggtactgtgcctgtgctgacttcctagctttattggaagttccttgacagcggaccgaatccctacccgttactctttctccatctccctctgcagtgctgagccctcaaaaacaaaacagcaacaaaaaacacacttgcactagttgctgattggttaatccccacggaaaggttaccaacaaaccacagcagtgacacagaagggaatgcctatttccacatctagggaggcccacctgcccagttccgtgctgctgacttagagcacggctttgctgatgatatccttggctccttctctgcgtcaagccgcaggtgttctctgccttctgtgattctgctcccctccctaggtggtgtcatgaagtgcatggtatttctgctggctcctaggcttttcccctgaccttgcacatacagttgcctgctccacttccccacctgcccagtcagggcatcacacccccttatccatccagtcttccttgaattttacccacctcagtgagggcagctcttcccagtcactcaggccaagaacctgtgtctttcttaacttcttttacacccctcttctggtcaataaggaacttcttggtgcttctttctgaatatataccaaatctggccatttatttcctccattatgcccaccataatgcaagccattgtcatctttagactgaactatagtaggcctcccctgccctcccctcccctgccacttagtgtcagtgttccacgaaaaaaaaaaaaacacgtctgatcctgccttctgctgcttgcagcccccacccagctcccaccatcctcaacagcacccgtggcctggctgcaggctgtgcggacctgaccccattccctgggtaaggctgggtgtgcccctacctcttcccctgtgtgggacggtcttgtccccagatacctgtagttgatcctgtgccctatgcaggattctgttgacctgcgactttgccagaggttcagactgacatctctacagattgctcgactccctttatacccttaaaagaaacagtggcagttatcacttagtaaacacaatggatgcagaagtgacaagtccttcccggagggtggagaccccgagagtagggattccgttccgcccagtcctgcgtatccaccgtgggctcagaggccacacaccggttcttttgcgtgtatacatctatgtagagatggagccataagtaatacacgctttaaaggaaggggattttacattttgggggggagattaagttgattgccaaggaatcgggtggggatagtttataaaagtgagggacataaggaataggcacgcaggaatgagggaatgaaagccctggagccgcctgggagcctcactgcgctgtaggacctcgtgccagtgtggccatccgtttacgatgtggtgggcatcctttgaggtttttcttctgattttggggaggtgggcggtactggtgacatctgcttccagagcagccgtccttcctgctccctttctggtcttcggttgtttccactcgggttcttgcggggcgcgctccctctgctttctggaggtgattaatttcccaactcctcggcaccgccttccccacccgaaaaaaggatgcagaaccacgcctgcagttgggtgggcctcccgggtgctgggcggcccggggcggcggggaccccagcggcggggcgggcgggcgctgacgtgtccaggcgggattgggccgccgccctatatagcagccggggcccgggcgccgcgcctcggagcgtcccggcttctcccgcgcggggggcgagtaagccagcggcaggaccagcgggcgggggcccacgagtgagcgcgcaacacggggctgggaggcctgggcgggcgggcggacggggcgggcgggctgccgggcgggggggtggggggtggctgctgacgtggaggccgcggagggggaggggcccgggtgccgcggcccccacccgggccccaggctgcggcccccgcccgcgggtgtcctgcttaccgcgcgtggcggttccgggccagacctggggccggctccgagtctcttctgcgcgtggccgtggcgcggaggggcgcgcacaaactttctcaagtccggtggcgccgctgggccgctcttggctgcaagctgggctcccccgcctcctcccggggcttcggtggggcacccctggtgccgtggccgcacggcgcggaggggcggccgacctgagcccaggtcgctgacgttggcggggccggccctcccctcccccgctccggcgggggcgccgtgtgcggccagggtgggggtccctgggaggccagcggggtccttccccccaggtggcggcggggcgggggtctgggcgcagaccgggcggcggggcccccgcagcacctccacctgccgcgcggggcccgcgtcagtctacgtgttcgggggtggggaaagctgctcttcttgggcctggagtgcaacttggacgtgccccagggtcgtggatgaaaaatacattacggaaaagtaccgaatttggatgaaaggcggggaggccgaggggttgctgtccctttaagcctgtccccgcccgcgggccctcgtggcctgtgggagggccgtgctgaggtggcatctgcgaaagttcctccatgcaggatgggtgccgacttccagaacttggtgagaagtgcggagcggagcctgccttctgctcgccagtcgcctgtggtctctcctagatttcgatcttgtgatctctgagtggatcaggattttattttcccattctgaactttggtttgtggtcttgagtaattttagttttggaagaggagaagtctgggtttcagccggaggctt

SEQ ID NO: 8771 - DNA, 6000 bp, Homo sapiens
tggcatcgccaccttttggagatctctgtcactgttgcatggtgtttacggtacatgttcagtccatgtcaaatgtgctgaaattgagaccactagaaagagatttgttacctgcaatgtgttttcctaaaggtcatattttatgagtttgtgtgtgtgtagctttaagacagtatttggaatgtagtaaatatgacaaaagtgtcagcaaatattaaatatcattatctattatataatggcacacagatactcattacccacagatgattcagaacccagtgctacttggttaggagtctgttcactgctttccctggtgtgcctgccaaagcctttcagctctctaggcctgcctttatcaggtttttactttggaggttatctcttgttaccttgagatgactggttttgggtgacatttttatagcagcaaattcgtctgtcagatccaagattagcactgcctgttcggttctcaggcatcacaccaaatagacagggccacagtatcatgagttaatgaagcccagagggtctcattcagtaggcccttgaaaaggcctgagaatctgttgtttacagaagccaccccaggagactgttattcactcagttttggaaatgatcactttacagagaacatttttaggtgtttcattagaactataaaaacgtcatcccaaaggaccataggtctacaaaactgctttatttgattttcaacttggacaaacagaaaatcttacctccctttgtccagtatccactgtaactctcctggactggaagtgaaatattcttacaaaggtaaaggaaagttctgcacatactgtatgttttatatttcaagtgccagacttcctgacctcaactcccaattaagagctgatttctcaaaaattttaatagccagcactggtgaggcttcaaggaaatagatactctcctgcactactgctaagcatgttaattgatttagcttttttggagtgaaatttagtgatatgtatctaaagtctttttaaaaagtcataccatgggacccagtaactcagcttctaaaaacatgtattctaaggaaacaaagatacatgttaaagatttcagttaaaaaaatgtttatcaaagtatttttatagtggtaaaaaaattagaaacagtctaatgttcaacaggagatatttaaataacctctctcatagccacacagtgaaatattgcacagctgctaaaaatgcttttgaatatttaatgctgtgggaaccttttacttttaaaacctctgtagccacagtttccagatccgtggattgaaccagccattgttgagccatatgaagagttacatacataacatggtttatgtaactgccgtggattgaaaatatcccccctgctacaacacaacaatcaaaataatgcaaataaaaaacaatacagtataacaactacttacatcgcatttacatagtattaggtatcacaagtaatatggagatgatttaaagtatatggaaagatgtgcataggttatatgcaaatactatggcattatgtataagggacttgaggatttgtggattttggtatctgcagaaggtcctggagtcagtcccccaaggataccaagggaggactgtattgctaattgaaaccaaaaaacaaacaaacaaaaaggctattaaattgaaaaaatagtacaatttttattttgtttttaagaattgagtgtgtatatgcattgaaaaaaagctgaaagaagatatatcaaaatattgaaaaagtttattgctggttatgggtggttttaatttctatttttctgttttccccccaaaatttctgcaaagaatgtgtttctctaaaggtcatattatatgagtttgtgtgtgtatatctttaaaacagtatttggaatgtagtaaatatgataaaattgtcagcaaatattaaatatcattatgtattatattaaaatataatgaaattgcaaaccctacctcgataagaataaaattagaagttaaatgagtatgaaggatattatgccacataggaagcttggcacaagtttttcaaaccactttgaggtgctgaggcatgaggtgggtcaccttttgtcttctttcctgcttacatttgatctcacggtaatttaacttaattatgtcgcagcagaaacttagacaccatatatatatatatatatatatatatatatatatatatatatagaataattattcattcattcagcaaacatttatgagaacatattgtatatgatgaatatttgctgaatgaaagaacatatattctcataaatataagatctgatatcaatacatgttcttataaatatttgctgaaagaatgaatatgatatatatatgaatgatatgctctcagtttataagggtgatcaaaacagtccaactttctgtctcaaatgaacctacataaatattaaaaagatgtatatggacttttttttttttgcttgtattgttagcaaaatcacgtaagtgattatcatactaaaaaatccttaccctgggtaattttaaaagccttttagaaaattacagattaactttagtattattttcaggtcacagttttcctgcctttaaactgactctacatgttccagagcgttagctcttgatatgccctggtatttgtctatgtgatttgccatttgtttataattgccgtaatgaagcatgatccgtatgtgcttatactctggttgctgtggtttcctctgatttagttatgctgttgagtgttatgagtacagaataaggaggaagttcaccagtaagctctggttctatttctacttaaaggcaactgtgggaattaaaaagctgtttattcccataccttttatctctttcatagtcaatattgctgaactactctttgctatcaatggaccacttgatgggtccacatggtatttcttacaatacagggtgtcttaaaacaggccagttcaatggtgaggctatagtggttgattcataattctgtgcaggaagggatgggactgtgctcactttgcttttctcccttcagaatttcccaggtgtgctgtgtagacttttttcagccactgtttctaaaattttctactttcattcattttaagggtgcttatatagagacctactgttaatgcacttctgcatctttcagtgaaggccagataatggagaaagtagtataattgctacttcttcagccatggccttttggctttggtgattttaatattttatgctagtgcaaagaaaaaactgttttgaaggaaaatccacatgcatcttctgctgcaggcattcagaaggatgcaatctatgccgccatcactgctgttgccttcccattagagaatatctaggccatctctctcaactcacgttgacagctctctcaccaaattttgatgtcctgatcatgaggtgatgctgaccatggttactgggtttgctgggtaacgtgatggtcatggaaggcacggcttcctcacttccaaaagggctcccaggtgtcagacaccagcaaagtgtttgaaagtcatctttctgtggcatgggaatgcgtaagattcctagatatttattcctgtaatgtttataactgagatgatagctgctatttattgggtgcctactgtgtgccagcctttgggcagcactgtgcatacactggatgcctaccctgtgacttgcagtgtcttgtaaggtagatattattatcctcattttacagatagaggacactgaggttgaaagaggttaatggtttgtctacgtgtcatagtaaatagcagatgagggttggtatgctggtctgtagagctgcaaaatttatgttcttttgtctgcaccatacaccatacccccaaagtaaaagctagctgacttgctctcagttctggaaaattacaaattgtctggtttgagtgtgtttttgaaaataaaataaaattagaaattggaaattaacttgagtgtgctgtaagggtaacaaagaaattatccctaagattgtaccatatttaagagtgctataattttttcttttttatttcactcatttctacttctctatatccacagaagattgtggtaaagaatgctttgtgatatgttcatttatcaatttgaaatttctgttatttttgtcatttgacattagctttcatgttaattcagaaggccatatatacaagcttgactcgagtaaaatcttgtcaccttccaactccaacccttagtgactgtgtgcctctcttaatctctatatccctttatctggtcagtcaggcagatcattaaatagtcattattcaaaggcttgtgaagatggaatgcaataattcatgtaaagcatagagataggaatgtaaaaaccagtaactattaactgccattgtcatcattatcatcaacactatcctacagaagttactagtaccactgaaatagtgttgctacgttcaaagtagcagctataactagaagagatacatgcgagatagctgaaagcttgaagaacgtactttagaaattcctaaattattttggatatttttctttgaaaatattttgggtaatctgtgaatataaaaatagcttagctaagatagttaggtgaacaatttcaatggagttaacattcagagagcagtggaccaattctctttactactgtcctaaatttatagaaaaagtgagtctgtaaagaaatttgtagcctcagtctaaaacatttccagcaatgtctttatatctttgtaatgaaatttaagtaagtaaatgacaagatccctattcaacagatctcctggactctcattttgagaatcacgtttctctccgcgtgagttgcaccaaaccattcagctattattaagtgtctcattgtctgtctgtttacctatgtctttgataccaagtaaactagactacagtcatgttggcacatttccacttgctgctcaggaggtattgagatcaatgaacactaacctgaggagcatatttttaccaaattaaagagctacagtgaaatatgtgttccaggttcctggttttaagctaaatatgcatcagttatctctgatcaggggaaacagagggcgggtaagtacttccaccttctctgtgtgttctaagttccttaaaaaactgacctggaaattaacttataattttagcatttgagaggaaacttgattttagaagaataattaactggtttacataaccctttatttaacttgcttacataatgtgtgtaacaccttgaaagtagtggcatgtgtttccaattcactctgaaagaatatgaaaacagctatcttgtgaagaaaagtacaaaaattataccacaaattatgatcttaaaggaagccttatgaaaagaactgatttttataactgaagatgtcatgaaattaaatttgatgtgttccctaatgactactcatagctttaaattgaataagtaagagttctgtgattaatccgctagattttcctgttttaaaacttaggctttttaactgttttcaaaagttctatcctattggagcatgatttttataattccaagataggctgggtgcagtggctcacgcctgtaatctcagcactttgggaggccgaggcgggtggatcacaaagtcaagagatcgagaccatcctggccaacattgtgaaaccccgtctctactaaaaatacaaccgggcgtggtggcacgcacctgtaatcccaactactctggaggctgaggcaggagaatctcttgaacccgggaggcggaggttgtagtgagctgagattgtgtcactgcactccagcctggcgatggagcaagactctgtctcaaaaataataataataattccaagataaagctggaaggtaattgattgctgaaggactgttctctgcaaattagcactaaaaaattccacacat

SEQ ID NO: 8772 - DNA, 6000 bp, Homo sapiens; identical to SEQ ID NO: 2131

SEQ ID NO: 8773 - DNA, 6000 bp, Homo sapiens
tctctgatggaccccacttacctctaggtctacctgggaaactctttttaactgaagttaaaagtgcatagctgtgtttgatgttagaatttgctccggaatgttgttcatccttctttctggtgggcctagtactgcttcaaaagcaacttctacttaagaatctgctttaagtgtgtcatcaggcactgagtaacatgtgatttgtttttcttcttttctctcaggaagctgacagctgggaaattatagaagggctgaaaataggccaaaccaatgtccagaaaccagacaaacatgagggctttatgctgaagaaaagaaaatggcctttaaaaggctggcacaaggtaacatttttatcatattcaggttcagaccatcttcataaataaagaagatcttatttgctatcatggggtgggaaactaagaatatggcagtatgtgtaaaactagctttttaaaacttttttttgagacagattctcactctgttacccaagctggagtgcagtggcatgatctcagctcactgcagcttccacctcgcaggttcaagcgattcttccacctcagcctcctgagtagctaggactacaggtgcatgccaccatgcctgactaatttttttatttttagtagagacagatttttgccctgttagccaggctggtcttgaactcacagccccaagtgatccgcccacctcagcctcacaaagtcctgggattacaggtgtgagccaccacacccggctgtaaaactaacttttaaggccttattttaaccacatgggttgtagtctattatagttaacagagactgagatctgtaatatacatatggagggaaaaaaatatgtgatatttaatccagttggtatgtattgttgtctgatttgcttttttcacttaaattagtatagataagttctcattaaatactctttgaaatatgaggtattttaaatgcatgcatgtatcactttggatggatctatattatatatcccactgctatcgaactaattccctgttgctggatatgtaagacatgccttatttttttactattgtgatgtgatgaacatccttacacatgaacttctatttagttctttgggatacattcctagaattattgttaccagtacaaactaaagctggagttcactgatcccagaagtttgtttactgctctttgaaggctacagtttattcctctccttcctcccaacatccttgtcctatctctaagtttaaattatagagaaaatattttttactgcattttaccattacccaaatagcaaggattctgtcatactaaggaggagaaagttgccgtacattttcagtttaaactattatttttatttatttacttatttttttttttttttgagacagagtctcactctgtcacccaggctggagtgcaatggcacaatcacggctcattgcaacctccacctctcgggttcaagtgattcttctgcctcagcctccctccagagtagctgggactacaggcgcacgccaccacgcttggctaatttttttttatttttatttttagtagagattgggtttcaccatatcggccaggctggtctcaaactcctgacctcatgatctgcctgcctcggcctcccaaagtgctgggattacaggcgtgagccaccacgtcagtttaaactctttagtgggccacccagtatcctctttgaaatcagtggaagaataaatctatatatttggcacatctgcacgtggatttcatctcagggcagataaatttattggcccaaatggccagtggtggctgcccattggctcagtgcagggaggttatgtatgttaacttccttgaggaaacattttatgtgttttaagggaaagacttaaaaatgaacacatgggaaatgttgccccggtgccctgtctctgaaagtgccttcttccttgtcagaaacgatctttcctgaacccataatattatcgtagtgccaaggacctgtcctcactgtcgttcttcctgagattttcgccaattggccatcctccttcctacaatcactgttgcctttcatcctttgtgtttccccaaattgatggccttgctaatctctttccttatgatatgctataggtgatctctgctgaaattcttggatagacagaaatggaaaccacaggaaaaaaccgtcaaagaaacaaattttgtatgaattgctaactttaatttagcactttcagtccatgtttcaacaaaactggctgtggtttggcagcaactttctagaccgtgcctttgaacattttgctacataaataacaggagggcctgctttgcattgttgtcttttcttctgatctctacaaccaccatgtgtttattcagatgtcagcccatttgattgaccaagttaagggcaactgattttaatcaagtgtttttcaaccgtagagactctttttttccagtgtttacttgttgtcccgcagaacctgtaacaaagggtttacagtggccttctgtcagtcctgtgcagaactcataggggttctctgtgcagaactcacagaaggccactgtacttacagaaggcgatcccgaggcctgactgcctgccatcttagcagctaagaggtcccaaatcacataaaaacttaccagcagagtaatttgccaggaacagaaaaattccttgcatctgtagaactagagggcacaggacccattctttgaccgggccctgggagctgtttgttctcttgtgaattgcccgtggaagaaaaatcaacagctgagagttcctgagtgtttgtagagcaaaaagggcaaatccattcagactgtactaggattatcttggaggagaaaaaattgccaaaaacccctctctttttttacccttagtgtagttcagaaataattttcaacctctttgattaatggtagaatgcaaacatttgctaactagagatgcaagcatattactaagcccacttaaattttccagataattcattattcatagattcagtccactggcttctgtaatggacatgaacattttcaggaattgtctgtggtatccagggaaaattcagaagtttatattcacggtgaaaaattccctgtagacctgtatagagctccttacagagtcactgtgatcatttctcactttgaaaaacatcccaatgtggttcattcaggggattgtagcttcaggtcctcagattcctcccctgttaagaaaaatcatggtgaaaagactccatccccattggattatgtataaaagaatcttggtaggttaacagtatggaactagagctcttatctccttaccatttaatgtgactgactgtggccaaatgcactgaatccagatacattaaaatgatcaaacatattgattaataaatgccaagcaacattagacccacatttgtgaatgttttatgtaattcaaaatacagacagtaactgggggtgtttggttcttgcagcgtttttttgtcctggataatggaatgttaaagtattcaaaggcaccactcgatgtaagtagcacacaggacatgtttcaaaggttgatttcgaattctgcttgaagtgagtaaacactgtaattgtacaagccttgtgccatagttaccagctttgtgcatgtctgggcctgtaagatttcacaagctcccaaacctccatgttctaaagtgtgtcaacctagtgcatgaagatttaactattttgatgtgtgttattaaaaacagaagcttaaaccttaaaagtgacgcatgagtaaaatcaccttctgtcacttggatagaaaacgcaaatgggcttttttcctccatcttccaataaactctgctttatgtgtgctgctctgttcttgtcaatgtccttttaaaaactatcttacaaattttatttctacgtcatacatctttttatcttggagatcccaattcacaaaaattatttcaaattgtttttgtttagtatacaaaggagtagtttgcatgtaacactggaaaattccttccttcatcattgtggtgtaggggaagtaactgaaggcttaggtttcagttttgtccccatccctgccattgaatcagccatgtccttgatcagtggagcagccagaaggaagagctggctgctccttgctttctggtcccagctgccctgttctgccccagcagctgtctgccagctgattactcagggatgttctgggttatacgtcaaagattgaccgcagttattttaggaccgctaaagatgtccttttgggagaatataagctgtgcaatctagaattatgaagaattagtattacattctatgccaaaacaggaataagatgaatagtcttatttataaaaattgacgtgaagtcactgcaacatcaactgtcctagaacctaatccatagaaccttaactattttctgtttgttaaggaggtatatgtagtattccacttcccatagataagttaaagattactttgagttcacttaaatacagtacagaaacatcaaatcatatatcctttcagcctatttactagtcttttgatttcagattcagaaaggaaaggtccatgggagcatagatgtgggactctcagtcatgtcaattaaaaagaaagctcgaagaatagaccttgacaccgaagagcacatctatcatttgaaggtgaaatcagttttcaacagtttctctgccattatcaggggaaacgatttgcctacaccagtggtaggcaggagagttattttacaattactttctcctctcgttcattgttttaggtgaaatcccaggactggtttgatgcatgggtctccaaactgcgacatcatcggttgtatcgtcagaatgaaattgtgagatcaccaagagatgctagttttcacatatttccttcaacgtccacagctgaatcctcaccagctgctaatgtttctgtaatggatggaaaggtatgactttgttctataaaaaccagcctgaaaattgcttagaaaattatgcaaattttggccaggcactgtggctcacgtgtgtaatcccagcactttgggaggccaaggcgggtggatcgcctgacagccaggagttcgagaccagcctgggcaacatggtgaaaaccccatctctactaaaaacacaaaaatttgtcaaatgtgatgctgcatagctgtaatcccaggtactcgggaggctgaagcacgaaaattgcttgaacctgggaggcggaggttgtagtgagccaagattgtgccactactgaatagcctgggcaatagagcaagactgcgtctcaaaaataaataaataaaataaaataaaaaagaaaattatgcaaatgcataactgagtctcatttgggaaaaccagaaagaggaggtttgctttgtaaactaacactcagaagacaacagtgacatttggcatgaaagttaattgcaagtataaattaggcagaaatgtggatcaccaagagaattagcagttaattttcccttttatgaacggactaccttttaactttatgtggctttgtaggaatactaggaagtaagtaaacatttatttaatcaacattcagaaatcaggtgccttcctggatggtaataagaaaacctcagtcttgaaaatgaaacttgcctttgtgtcttgacctataatatatacatgagaggctattaaatttctccatgaagtaattacatgtgagctcaagaatgtgacaataatataaatagcagcctatttaagtggtcaggcactgtgttaagcatttggcactcattcgtctctgatctttcaaataaccaaagttcagagacagtaaaaaatttgtccagaagtgacatagccattaaacagctgagccaggatccaagcccacatctgttcccaaagtcagtgccctttccatttttaccaggtgccagactaaggga

SEQ ID NO: 8774 - DNA, 6000 bp, Homo sapiens
caggcattgtccatcattcttcatgctggagctgcttcatctttggccagtgggtcccctcctttcagttttgttccctgcagctttctgtcatgacctattaatatcaataccttctggccaggtgcagtggctcacgcctataatcctagcactttgggaggctgaggcgggcagatcacctcaggtcaggagtttgagaccagcctggccagtatggcgaaaccccatctctactaaaaatacaaaaaaattagccaggcgtggcggtgggtgcttgcaatctcagctacttgggaggctgaggcaggagaatcacttgaacccgggaggcagaggttgcagtgagccaagatcatgccattgcactccagcctgtgcaacaggagcaaaactctgtctcaaaataataaataaataaataaataacttcttaatttctaacacagaaagatgcctcaggctaatcttacatatttccttccacagaccttgagtcagctgtttctctctgaactctgaaccttttgagtaggaaattgcagttggagactccagtctccataggtgcacgtcgcaactaggttgtcagagcttctaggctttttcagaagacagagctaggataattgtacttttaagaaaggaaaagcaggcggtgactctcacgcctgtaatcctagcactttgggaggccgaggtgagcagattgcatgagcacaggaatttgagaccagcctgggcaacatggtcagaccccatctctacaaaaaatagtggtggcgtgctcacctgtaatcccagctacttagaagtctgaggagaaaggattgtttgagcctgggatgtggaggcttctgtgagcagtgtttgcaccaccacagcccagcctgggtgacagagtcccagaaaaggaaaatcatgagttcaaaatcacttgaagtaattccttttttctgagtttttctgtcatcttgatatagttaggtacatttgtttccatttactgtcaatttttaaagtatttcaacatttacatgcttgcaaagtcaacgttatataataaagtactttcagagaaatctcccctgcctgttaccttcaccctgctccctcctcacctttgcaggcggccattcctggtcctggtttatcctttgttgtttgttgtttgagagcagaagcaaaatacagcttgccatacaccctgttctatgccttgctttttttcttttattattttttggaggtgtctgcatatcagtaagtagtgatttttctcatttctttgttcagcagtgtaatattctgtgggcgtactgtaatttacccaggctttcctactgatgggcatttgggtagtttccagactttagctgttacaaattatgttacagtagcaatcgtgtgcatatgctatttcctgttttacccagtgtatcttgggatagattcctagaagtgagatggctgggtcagagggtggctgcatgtggaatcgggccatcggatgctaaatttccttccttaggaattagtgttttgccgtctcatcagcagtatgcaagagccaggctcttcacattcttgggttttagccgatgtgagaggcaaccaaatatactttaaatttgcatttttctgatgagcaagattgagcaccttttcaatatataagggccacttgcattttttattatcttgagtcattgttaggaaagttttttcactatcaggtcataagaaagtttatcttttcttctgctgcttgtaaatgtgttcttacatttcagtttctgatctatttggaatttattgcaaatagggttgaggcactgattgagtttcacttttttccatacggctttcgagttgtcagcactatttttttgtttgttgtaacacagggtctcagcctgccacataagctgaagtgccatggcatgatcacggctcaccggagcctcaacctcctaggctcaggcagttctcctgcctcagccaccccagtagctgggaccacaggcacacgtcaccatggccagctaattttttttttttttttttttttttttttgagacggagtcttgctctgtcgcccaggctggagtgcagtggcgcgatctcggctcactgcaagctccgcctcccgggttcacgccattcgcctgcctcagcctcccgagtagctgggattacaggcgcctgccaccatgctaatttttgtatttttggtgacctcgtgatccacccacctcggcctcccaaagtgctgggattacaggcgtgagccactgcgcctggccttggccagcttatttttaaaatttttgtagaagtcaggtctcaccatgttgcccaggctgatcttggactcctgggctcaaacaatcctctcatctcggcttcccggagtgctgggattacaggcgtgccatcactgtcttgaaaagacgttttgctctagtgaacttgagtggctgcttttatcatgtcctaaatgtttatattaacttagctctgtttctgggttttcagttcagaccagcaggtctttccgtatactggtatttcctgtgttaatgataatggtttcatgtttaatgtctaggaccactgttaacacctccaccctgcactattctttttcagggttttcttgttcatttttgttggttctgtgttacaacctttataatcaactgtttgaaattgtattaatattttaaagttaattgggatgatcgccatctacttaaaccttctgttagctattttaaggagtgttttctaatttcgaatgcacatactccaccttgtgttgggcttgtgtcttgctattttcttgtccttttttcttttttccttttttctattagaaacacatcttttggccaggcgcagtggctcacacctgcaatcccagcactttgggaggctgaggtgggcggatcacaaggtcaggaattcgagaccatcggggccaacatggtgaaaccctgcctctactaaaaatataaaaattagctgggcatggtggcgcacgcctgtagtcccagctaatcgagaggctgaggcaggagaatcccttgaacccaggaggcagaggttacagtgagccaagatggcaccactgcactccagcctgacgtcagagcgagactccgtctcaaaaaaaaagaaacgcatctctttcattacatcttctaagtagttgttgtttgtggaagttaatgttgttaacttcttgatttcagtcttttctctttgctataaatagaatttcacccagtagttttttcagggtttctggatatgcagtcatgcttcttcctgtccagcttttgtggatgttaactcttgtctccctttgtgggtgtatattccagtggatgttaagtagtggtgcagatacactcgaacttaccctaacctgggagtcagggcaaccttccccaagcatgtgatgtttaagctcatgctgttttaatggatgagttggtgctgctgggcaggaataagcaaagatggtgtttctgccagaatgtcttggaaaaatatgctccttcagaacctacaaatattcttgttttcttttattctcttcttgctataggcctcagcaactgttgccattcccaaagaacaccatcgctttgttattggcaaaaatggagagaaactgcaagacttggagctaaaaactgcaaccaaaatccagatcccacgcccagatgaccccagcaatcagatcaagatcactggcaccaaagagggcatcgagaaagctcgccatgaagtcttactcatctctgccgagcaggtgaggcctgtgtgagtgcctcgtgcccctgcctacctgcttgtgcagacctcactccctcatgggttgccgtgtccagtgtggacttcaaggcataatgtggtgggggtggagggcttgactccaactctaaaaagccctgtctgtccccagtttgttttcaaaggcctgttctcatcagatcatcccttcctttccaggacaaacgtgctgtggagaggctagaagtagaaaaggcattccaccccttcatcgctgggccgtataatagactggttggcgagatcatgcaggagacaggcacgcgcatcaacatccccccacccagcgtgaaccggacagagattgtcttcactggagagaaggaacagttggctcaggctgtggctcgcatcaagaagatttatgaggagaaggtacacgatttagaggaggcaaatccccatgggcaggaatagaaatgaggatttgggtctggagattcagttaaggcctggttctgccccttatctttttgtccttgatgaagatgcttattgtctctacacttgagtgacccgggtgagatcggtgcccgcccccccttgctgttgagcatctgcctggcagttgtccttgccgtcctgggcctctgactgtgctgacaggctgccagctgggctgccccgggtcagatgcacatcccggacttgttcacgtcttagattaagctgttagctcagcttagtgaactttgaggtctgaaacgtgttccttaattgagggaaaggattgggtgttttgcagtgttcaaggacgaagttatcagccggcgggtgactagactgaggggaaaaatccagtccttgaacagtgaagtttctggggattggctagtcctgatcacttgttgttcacttcttgggatcagcatctatagtctgggccgctttggcttgctttctgcagcagtggccatgcccacctgcccgcttcccacacctttccctttgactgccccttatggtgctcttatttagaaaaagaagactacaaccattgcagtggaagtgaagaaatcccaacacaagtatgtcattgggcccaagggcaattcattgcaggagatccttgagagaactggagtttccgttgagatcccaccctcagacagcatctctgagactgtaatacttcgaggcgaacctgaaaagttaggtcaggcgttgactgaagtctatgccaaggtaactgcctccgagcatgaagtgtgtctcctttgagtggagtccgcggggccttcatggatgagctctcgatttgtaaatcctggggcctggacacagtgcaggtgcccaggtttggggagagcgtgcctctgagccccaggtgagcagcctggctttcactgtgacacgaccttgagctctgcaaacccatggctgttctcccattttcttaggccaatagcttcaccgtctcctctgtcgccgccccttcctggcttcaccgtttcatcattggcaagaaagggcagaacctggccaaaatcactcagcagatgccaaaggtaaggacacgtttttcacctgttgtattgaatttgtcttgttttctgtctttctgtttctgatattgctttgttgacctttgtactgtggatgcccttgaaaactggtgtatttttctgaattaactggcctgtttgacatggtcaacttccgtgttagcttaaagaacagcagaataaatgtctgtagatgtctgtaccatccttctggcctttaaccagagaggattgtatgttcttaggtttcataagtatcttaagaaacatgtcatttagtaattatggtgaaataacttcatgatactttggcgggccgggtgcggtggctcatgaggtcaggagatcgagaccatcctggctaacatggtgaaaccccgactctactaaaaatacaaaaaattagccgggcttggtggcgggcacctgtggtcccagctgcttgggaggctgaggcaggagaatggcgtgaacccgggaggtggagcttgcagtgagccgagatggcaccactgcattccagccttggcgacagagcgagactctgtctcaaaaaaaaaaaaaaaatactttgaagagcagaacttgtatacaaattgtattaagtgtgaatttaaagcgttctcagtt

SEQ ID NO: 8775 - DNA, 6000 bp, Homo sapiens
acttttaatcatgtgttcaataaagtagatttattaattgtgtttgcatcctctatacattttccaatcccataacctgtgttaccaagagagttgggtcagtctcaccctttaaccttggatatatcaatttctcctagtaaccttcagtttttactttatatgttttgcagctatgttattagatacatgtaatcagagttactgaatttttaagttcttgaccttctctgttcttaataatgatttttatcctacagtctgtgttatctgaaaataatataaccaactttcatatggttagtatttgctcggagtacttcttccatctctttatttcagcctatatgtctgtatggtttaggactgttgaatggcctatagctgctgttagagttggtcagtttagtctgttaacacgtatttagattactgatgggtttgaattcattcctctcatcagttttgtgttttatttaccttgctttttcattgcttcttttacttttcttgcctcctattcttttttcttgttttctctcttttctttaacaattattaatacagtataatgtaaccagtaataatgtacatcgtaatgaataccgctgaacctaccacctaatccaagatctagaacattgccaataacttccatttgagtaagagtttagtttgaatgttaaaaactctttgtttttcctagattgtctttaaatttttaacattcattctcaacaagggctaaaattagtatctctagcctctccccaaataataagaatcttgaaaccttgcaacttcatatcccccttccaccttatatattattgctgcctaagcattttaattctgtcttttattttattttgtacttgcatattctgcttacgtacctatctataatttaattcccttcaaattttattgttgatattagtatagggtcaccacttgtttcactttatctaggttgctggtttatcagtattccttctttctggtctctctggctttcattttcttgctgaaatatgtcctttagtaggtctgtcagcagggatctattggtagtagttgctttatctttgaatatgtctattctcattcttaaatgaaaaagaattcttaaatccaaattgacagttatttctttcgccataatttatatatagccattatcctctggtatgtattgttttaagtggtctgcctttggtctcatagtattctttatgagtaacctgtcttttctctctagttgcttttaaggtcctgctcttgtctttggtgctctgaggttactctgtagtgtgttttgatttggattagtttaaattatcctgctagacaccttctctgtcttttttgggatgagggaagaatgttgtatcattaaatcttagaattttctcagctattttaaaaaatgtttcttctctgttctttggattttttcttttctctttttgttttggaactccagttatagacatatgttagagtttctcattccatggttcttagctctttcattcgttccatctctcgattttttttctaaaatgtcacctttatgtctcttatgcttttttattgtctcaatcttagttctgtctcccgaagttcttgagtctaatcctacttctaatccatccttccttctttttgagctttgggcttttagcctctctaccatttgtgctgatctgtgggtatcctttttagcctggtatgaggtttattctttcctgaggcggggtgggggggaattgctttctgttttgttaatatctcagtttgggctaggggttcctggacaaatgggcttggttgtagagtactagtccattgtccctacagctcaagagatgcttctgtctgccagctcaggatagtcagagaaggcatcctgtagtcccctctacactagtgggcttttcttcttctttttttgatctacctatcttctggtaagtgtagcccttttggggatcatgactttatggaataggagggtatctcttctcacctcctaccttgagcagacccaaacttctcccccgtccctttgagggctgaaaactcaaatgtcacagacagacgttcacacttcatttggtctgaatattgctagccatggaatttctaaaatttgcttctacgaactatttattagtttcagtgtgctaagcctgctgggaggaaatgctggttgtgagcatcagcacagaagcattctggacggttattagcacaaagttagcatatgattttgtaatctcttctgctaacagtgttttttaaactaactctttacggtgtcctgtgtactaggtactgtgcctgtgctgacttcctagctttattggaagttccttgacagcggaccgaatccctacccgttactctttctccatctccctctgcagtgctgagccctcaaaaacaaaacagcaacaaaaaacacacttgcactagttgctgattggttaatccccacggaaaggttaccaacaaaccacagcagtgacacagaagggaatgcctatttccacatctagggaggcccacctgcccagttccgtgctgctgacttagagcacggctttgctgatgatatccttggctccttctctgcgtcaagccgcaggtgttctctgccttctgtgattctgctcccctccctaggtggtgtcatgaagtgcatggtatttctgctggctcctaggcttttcccctgaccttgcacatacagttgcctgctccacttccccacctgcccagtcagggcatcacacccccttatccatccagtcttccttgaattttacccacctcagtgagggcagctcttcccagtcactcaggccaagaacctgtgtctttcttaacttcttttacacccctcttctggtcaataaggaacttcttggtgcttctttctgaatatataccaaatctggccatttatttcctccattatgcccaccataatgcaagccattgtcatctttagactgaactatagtaggcctcccctgccctcccctcccctgccacttagtgtcagtgttccacgaaaaaaaaaaaaacacgtctgatcctgccttctgctgcttgcagcccccacccagctcccaccatcctcaacagcacccgtggcctggctgcaggctgtgcggacctgaccccattccctgggtaaggctgggtgtgcccctacctcttcccctgtgtgggacggtcttgtccccagatacctgtagttgatcctgtgccctatgcaggattctgttgacctgcgactttgccagaggttcagactgacatctctacagattgctcgactccctttatacccttaaaagaaacagtggcagttatcacttagtaaacacaatggatgcagaagtgacaagtccttcccggagggtggagaccccgagagtagggattccgttccgcccagtcctgcgtatccaccgtgggctcagaggccacacaccggttcttttgcgtgtatacatctatgtagagatggagccataagtaatacacgctttaaaggaaggggattttacattttgggggggagattaagttgattgccaaggaatcgggtggggatagtttataaaagtgagggacataaggaataggcacgcaggaatgagggaatgaaagccctggagccgcctgggagcctcactgcgctgtaggacctcgtgccagtgtggccatccgtttacgatgtggtgggcatcctttgaggtttttcttctgattttggggaggtgggcggtactggtgacatctgcttccagagcagccgtccttcctgctccctttctggtcttcggttgtttccactcgggttcttgcggggcgcgctccctctgctttctggaggtgattaatttcccaactcctcggcaccgccttccccacccgaaaaaaggatgcagaaccacgcctgcagttgggtgggcctcccgggtgctgggcggcccggggcggcggggaccccagcggcggggcgggcgggcgctgacgtgtccaggcgggattgggccgccgccctatatagcagccggggcccgggcgccgcgcctcggagcgtcccggcttctcccgcgcggggggcgagtaagccagcggcaggaccagcgggcgggggcccacgagtgagcgcgcaacacggggctgggaggcctgggcgggcgggcggacggggcgggcgggctgccgggcgggggggtggggggtggctgctgacgtggaggccgcggagggggaggggcccgggtgccgcggcccccacccgggccccaggctgcggcccccgcccgcgggtgtcctgcttaccgcgcgtggcggttccgggccagacctggggccggctccgagtctcttctgcgcgtggccgtggcgcggaggggcgcgcacaaactttctcaagtccggtggcgccgctgggccgctcttggctgcaagctgggctcccccgcctcctcccggggcttcggtggggcacccctggtgccgtggccgcacggcgcggaggggcggccgacctgagcccaggtcgctgacgttggcggggccggccctcccctcccccgctccggcgggggcgccgtgtgcggccagggtgggggtccctgggaggccagcggggtccttccccccaggtggcggcggggcgggggtctgggcgcagaccgggcggcggggcccccgcagcacctccacctgccgcgcggggcccgcgtcagtctacgtgttcgggggtggggaaagctgctcttcttgggcctggagtgcaacttggacgtgccccagggtcgtggatgaaaaatacattacggaaaagtaccgaatttggatgaaaggcggggaggccgaggggttgctgtccctttaagcctgtccccgcccgcgggccctcgtggcctgtgggagggccgtgctgaggtggcatctgcgaaagttcctccatgcaggatgggtgccgacttccagaacttggtgagaagtgcggagcggagcctgccttctgctcgccagtcgcctgtggtctctcctagatttcgatcttgtgatctctgagtggatcaggattttattttcccattctgaactttggtttgtggtcttgagtaattttagttttggaagaggagaagtctgggtttcagccggaggcttttttggtgccctccatacccggtcctgtctggtgctttaaagcacttgcgggtctcattaactgaggctgaaatgaaattcttcctggagtattactgataattctcttcgaagactgttgccccttgaatatgtagttggcaaaacttatcacaagggaatcaacttaattacttcctcgtttaaaagcaaaaaagtagaacccctcatgtgaagccttttttgttgctgtcagaaacctgttagacttgtgctaaacttgtaagcaccaggtttcccacgcaacacacagctctgtcaggactccacgttttgctctacacgtattagggcggaaaggggtcttggttcctgccctccttcctttagttctagttctgtttgctgaaagttaaattctgagatgtgaccttttttgctttggatgtttgcactctgggaaacaaaattaaaagtccaggttcagtatagtttgaggtttacattaggtggacctggacactgattgatccgagcttcctatgggaaaagtagttgggagagccagaatcacgaagggactggggccatatgggagggactgaaggagacaggagatagggctcacctaccagaaggagccttggaggagagcggacttgttctccatggccagaaaggggaaagaagttgtagattttgtcataacttgaggtggagcgtttacagccatgcaggggtggacccgggccctgagaaggccatgaatttcctgtccctggtggtattaagaaatgggattagattaat

SEQ ID NO: 8776 - DNA, 6000 bp, Homo sapiens
tgttgtctaggctggtgtcaaactgctgaccttagttgatctgcccacctcggcctcccaaagtgctgggattacaggcatgagccactgtgcccaaccaagaatgtttttttacacctctttgtttaactgtatggctatactcacacactcgcgtgttctgaaaacaagtgcacacgtcgcgtgtgttacctttgggtggaaggtgagaaggcaagcacgtcctccattcctggatagttcagtggatgaaggagcctttcccaggtagtgggacaccgacctgcataacatgactgacgtccgtgtatccgtttttgttatgagtaaacatagccttggcagctgtgctgtggcctgtgcaatggtgagctctctggtgtcagtcttatgttttgtgggcattttacgtgacagcgacgagagtctgtaggcacaaagtgacctttttgcgcactacttgaaccacacatacaccataaacttgcttttacggttttgttttggttttggttaactgtagcgtttgtttaggcctgacacggtggctcttgcctgtaatcccagcattttgggagaccaaggcaggaggatcacttgagcccaggagttcgagatgagcctgggcaacatagtgagacccctgtctctacaaaaaagaaaaatttagccaggcctgtggtccccgctgctctggaggctgaggcaggaatatcacttgagcccaggaagtcaaggctgcagtgagctgtgattgtatcgtgccactgcattttagcctgggtgacagagcaagaccctgtctcaaaacacatatatatggaagtacagtagtgtaaatctaacattaatttctggtttctgcccccgagaaattgcagaatgtagcttagtcagtcatgtctgttctgttttcttctcatgcagttcctaactcttgtcttctttcgtaatctaaaaaaacctgctgcccagctcccatgtcctctgcttctcttgtcttgtgttgcttcacctggcacagctgcatgtccatgttcccccctcagtgcatcgcctcgttgctgcctctgcgtgtgcatgtgtttgggatggacgcacaaaaagccctcctcgtggtccttccagcaagctgggcttccctttactgcacagtgggcaagattcctgccttgtttcctgatgatacggcttctccagagtttggggggcctggaactcttaacttgggggtactgggttctatccagagaggttgacagcaggagggtttgcaacagcacttgtcttgcagacacagtgaagtgctcagtgtgaatctgagccaacagtagatggggtctctgggcagcagcatgggccccacaaggctcttaggcgtcagtgagtgcttttgtgtggagttaatgtgtgtggtttttttaacttgagaatagtagttcccaaacttactgcacattagaaacacctggaatccttcaactattctgaagccctggccaataccccagacgagctaaatcccagactgagtggccccaaccgtcagttatttgaaggtctcggggcatttccagcttctggtccaggctgagagcctgtcctccagaacccttgtgatccaggtgaagatcataactggcccccattctagacaatggagatttttgtttgggaagctaagcatcgtttttggtgatgggaatcacagataaggttatttagcgctttagcgctgtcctgcccagttatgtcattggcagaatgttgttggtctgtgtcctaaatgtgtttccttttgtgttcctaagtaaacagaatcaaagaccagtacaaggtgtccgtgcgcatccctcctgacagtgagaagagcaatttgatccgcatcgagggggacccacagggcgtgcagcaggccaagcgagagctgctggagcttgcatctcgcatggtaagtgccatggctgggccctctagaaaggcactggccttgcgtctcttggccccctctaaggagtagcgtgttgtggtgtgcggccttagagaatggaagtcgacaaatcccacgttgcactggaaccggattggactccctggggccacatttcctttatcctccccaggtcacctgcacgtcttgttctccatggctgtgtgctgtgctagaagggcacagagactgtgtggcagcgtcttggccttggccacaccctgggtgcccagatgcctgggtaccatctccagagattgtgacagacatttctggattctcaaaggcatcccaggtggttctcatgtaaggccagactcgaggatcactgcaaacctgaagtgggggctgttgctctctaccacctggcagaagcactgcactgctctgggctccccgacgtttcatacatgcttatgccaagctgtgagcacccttgcttctgtgagtcagatacccacacttgaaagtctctgggtgcctttaagtatccagagaagtcaaatactgcgtgagtgcctgcagcagcactttggcctgactgtgtgaggaacaagccccagggttccctgtcattcgcttaggggattctttgttcacctcaccccagtacccacacgaggaatctcaaattggcagacctcttttatagccctgagctgcattccagggcgtgatgcagcctcccactgcttgtggccttcccggagctcattccccagtctcatattccaggttctcctcttagcctggcctccagcccaggtcccttgtcctggctgctttatgcccttcctgattgctgagcccttacttctctgtcagccaatagccgtttgatccagaatctctcagaattcttggaaatgtttggttggctgttggtgttcttccctgaattccagctctgcttattctgtatttcttctgacattttaatggggcctgtggaggagttgagagccatgtgggttcagtgccctgtgttgaacgttcttagccatgcggggaaagtggtccgagccaccctctgttcagaagggatcactcactgctatgcagaatgccaggcctccaagtagaagagctgggcctcccctgtagtacctgttaaaacagaagtgctcactgaattgctttggtgattactgctatcatgatagcacttttggttgaagggtcctacagcgagttccttaattggactttgttcagggaagtgacgtgcagcccatgttgcggagtgtagcgatgcttggtgagagcactcattatgcgctgtgcacactcttaacagctggttgctcccggggtgctacgaggtgccacctggagaccacctcacctgctccatgaaggactgtgcccagggctccctggtgtccccttgtgtcagtggggagttgctcgccgtgcttgtgataaatgacatctactttaattgtatttttaggaaaatgagcgtaccaaggatctaatcattgagcaaagatttcatcgcacaatcattgggcagaagggtgaacggatccgtgaaattcgtgacaaattcccagaggtaaagtttcccagagacattctgtaactctataggagtgatccaagtcacacttcaggaatatttgatatttgggatatatgtccttcctcatacttgaacttagtctccccatgatttgttctaggtcatcattaactttccagacccagcacaaaaaagtgacattgtccagctcagaggacctaagaatgaggtggaaaaatgcacaaaatacatgcagaagatggtggcagatctggtaggggtgtttcacatcctttcttgtatgacagcacctggggtgggtggggcatgcgtcctgtcagaagtcctgacccccacaggacccctgctctggggaaagcacataggccctgggctggccttccatctcagggacttgggacaaagtggtgacggcttctcacttaatacctggatgtttagattggcagtcattgttaagactgcagtgtttgtggaattcaggtggggagatttgccttttctcatgcccagttaccttgtttccttgaggagtcttcagatacttagagaaattgtcccatccagtaagataagaggtataacaggtgacatgaggagtcatatactgatttattatttttctcaaaaactgacgtgggaacaggtttagaaagtgtagtgagtagtggatgagaaggccacaggcagccatgtatttccgtgggcttcaccttagctgatggctgccctgggagaggcgatggtgaaggactccagcactgtgagctgctgtcacatcactgccgtgagtgcagaattgcccagagcgtaggggtccgtgctgtctccatgtgtgttctgagccccttccttaaccagctctgatcctggcatgggacatgaactctctcttagccaaaaagtagacttgcatcgattgactgtaatttgcaacgtaagttagttgttggacaaatgatctatctcacttaccctcatgacaaacctctgaaggtttgtttgcaaataccagtgctctgtcgtgttcatgctacccttaggggtagaagggatactgtattttactctctagcacaggtggtgaatcgggctgtgttttttgtctttaaggtggaaaatagctattcaatttctgttccgatcttcaaacagtttcacaagaatatcattgggaaaggaggcgcaaacattaaaaaggtgataacttgtccgctgcatcttgcttcttcttgccttgtcctctgtagccctgcaccattttggttttagactaggagggactcttccttacttctagccctgtgctcaactgtgtctcaactctgggagagctctagtcagcttctcatggtgatctctctccctgtagattcgtgaagaaagcaacaccaaaatcgaccttccagcagagaatagcaattcagagaccattatcatcacaggcaagcgagccaactgcgaagctgcccggagcaggattctgtctattcagaaagacctggtaatgggagatgttttctaatggagatcctccagtaaaatctctaacagcctctaagattgagcctggggttgagtcacgcagggtcattgggccagcgcaggctgatgtggaagattgcacctttcaatccaggctactgatgagttggtcagcagttttctgcctttgtctctcacgatacttacttacctggaccctgcagcagtaacatttgacgtgggcacttgtcttattagacattttcttcttgttacctgaaaatcttatctgaaggtatttacggtattttctttcctttaaaaaaaattgacatgcagtaaattgtacatatttacagtgtacaatgtaatagttttgacgtgtgtatacatccatggaatcattcccaccatcaccccaaaaatgtcccatgccattttgtattacagtctccctccatcccacttggcagctcctgaaaaccacactccccccacccccacttctatccccaggcaacccccagtctgctttcggccacagtagatgcttttggattgtctacgcttttgtgtgaatggaatcataacatctactctttattgggcccatctgctttcactttgcaggatattttgacatttgtgtgtgttgtcacctgtattgttggtttgttcttttttatttcaggataatattgcactgtagggatagatcatctgtttctttgtgtgtacttggtaattagtgtctttcaaggggttttctattttctccaaggtgtcaaatgtattaacatgaagttttttagaatagtcctgcattatccttttgctgtcaatactgacgtcacctctctttcacagtatatgtaatctgtgccattataaaatgatgccttttccctggtagtatgcttggctccaaagtctatgttatttttttcccccttatatttaaaatttttttggagatgag

SEQ ID NO: 8777 - DNA, 6000 bp, Homo sapiens
gaaggaaaccactcaacatctctcgtagtgtgtatccggtaatgacttctttcacattctgtatgtctgcaagtatttttttccttcactttcgaaaagctgtttctgctgcataaaggtttctaggttggcagtttttttcctttccagacttggcttcattgccgtctcctgttgtttctgatgagaaagctgatggtgcccctggctttgttcctctgtccatgacaaaccttctccctctggctgctgttagggttttaccaccgtctctgagcaagttaggatgtgtctctgtgtagttttcttcatgtctcttagcttggtgtttattgagcttcttgaatatatgtgttcagaatttcatcaaatgtggacaatttttggtcactatgagcattttgttgtgttagccccttgctgtctccccgtcagggactctggtgaccagggtatttagttgtcttctacttgtgctctgtttatttgagttgaggggaggagcgatattggttttctccatgagtttctttaaattcattaattctttgcagtgttctaatctgcctcatttcatctaatatcattttcattttagatgttgttttcttccctagaagttcactctgaattagtatcttctgtattttcagttcttaacatgttcagtctttctgcttttggccatagacaatacagttaaatacctgtttttctgtccttggctggctgattctaacactgtcatttctgggtggttttctattttcttttcctcgttatgggttttccccctattctttgcatttctggtgtttcttaatgagggtgtttttgtattcctctgaatattattttgtgtttgtgaagtcactctgaaacattttgctccttttaggacttgcttttaacgtttattagggaggatcagagcagtatttagttcaggcccaaatatttccactgctgagataagatccttctgagtactccacgtcccagaaagttgaaactgctgaggacggttctggaccaggctccgactgagctgcaggcactgtttcctggtgtctgagctgtaggtactataccaggccccgactgagctgcaggcactgtttcctggtgactgagctgcaggtactgtaccaggccccgactgagctgcaggcactgtttcctggtgtctgagctgcaggtactgtaccaggctccaactgagctaaaagcactgtttcctggtgtctgagctgtaggccactatacccggccctgactgacctaaaggcactgtatgaggcccagctgagctgcaggcactgtttcctgtgatccttctggggattctttcccaggcccagggtgatttcttcacgcgtatcagtatatgagtggctggtctccggatctcagaggttctcgatgccagtctctttgggctctgatctccggatggttctgtttcctcaccttcccgtactgtggcagcaacttggggcagctgtagggctcaccttgtttcctgtctccagggtcttgaaagtcaccattaggcggtaagttcagtccagtccctggtactgcatcttggctgaaagcagaatctttggttttaataggaaaagtttatgtatccataggcatatggagccacctctggcagagccggagcgttgactgaagaaatagagcattatgtgtggtctgaaattaccacgctcccacctcccaatccagcatagattcacgaggactctgggtcctgttgagttaaacacctcccagcgcgcctgctctgctgggcgcaccccactctccccaggacgtgcactctcctcccccgtgcaggtcaaaaatggcttggagaagtttggtcagtgcttgtaagtggcatctccagggctctaggcctgcgtgttcatcaccaccaaagatgatagtttatcttttcctctgccctttttgccacaaaaatgtgacttcctcctcctgccctgtgtttggtttcaggccaacatagccgaggtagaggtctccatccctgccaagctgcacaactccctcattggcaccaagggccgtctgatccgctccatcatggaggagtgcggcggggtccacattcactttcccgtggaaggttcaggaagcgacaccgttgttatcaggggcccttcctcggatgtggagaaggccaagaagcagctcctgcatctggcggaggagaaggtgagcatggggagggagcgtgactcttggcaggaagcctggtcctcagtacagtgttctcgcttctcactgtggaaacccctgaatgcccttcctttgtggcgggtcagaaaacagctctataatgtactgtttatgcgtctttgtttttgctgttactggagggcctttccaggtccaaacgctcacatatgcaatatataaaagttggtctttggcttattagttttggggtgcttttgttttttaaatatgatttacagtaaaattggccattcttcaggtatagttgagttttaagtaacatgcagtcatgtgaccacaatcatcaaaattcattttccatcacccctaaagattgcccatggaattgctgttgtccttgtgtcaaaacccatctgtgggtatgtttccgggctcttctggtgacaccaggtttatgggaagtctggaaatcagtagtgtgagccctcttaactttggctgttctacaccccttgctgatcagcctgtcaatttgtaggaaaaaagcactttcacgttttgattgggattgtgtgaaatttgaagatgagactggcgaggattgacagctcagcagttttgacttttgcaggcatttctccattttttttaggtctgtgattctttattggtgttttataatttttagcacatttttatgttcgacttaacagatctaactactgttactcttttagtgctattgtaaatggcactttttttccatttccagttgttagcacatggaagtgcctgtggtttttgtatgttgaccttcacgaggctgctaaataaagctcatgtatattagcgccagtcactgttttgtggatttttttttttttttttttttttttttttttttttttgagacggagtcttgctctgtcgcccaggctggagtgtagtggcgcaatctcgcctcactgcaagctccgcctcctgggttcacgccattctcctgcctcagcctcccgagtagctgggaccacaggcgcccgacacctcacccagctaattttttgtatttttagtagagatggggtttcacagtgttagctaggatggtctcgatctcctgacctcgtgatccgcccgcctcggcctcccaaagtgctgggattacaggcgtgagccactgcgcccggcccactgttttgtggatccttattttatatgtcacaatcacgtggtctgtggacagttacatttctctctaatctggagccttgtatttcttgtcttttttgttgttgttattagattgatgtttttgtctttgtgtttaaccagccttgcgtttctggggtaatccctgcttggtttggtaggttgtctttggccatattgctagattgcatttgcctaattgattgcctaatgtttgactaatgctgctatttgtggatgtctttgaaaagtagcagagtctctaggtggtatttggtgaaacctgcacttaaaaggtagcaaagttgttatttaatatttttgtgctagcatgtttttctttggtatttttgcttgcgggccagatcttgggtccggagaaaggcaagagctccccgtgtggacctgagtcccgtggagcagcgcccttctcggggcccctgcgtgggtctgccagaagcactggtgtccacaagcagtgtccggggcctttccaggaccctcgttttcttactgccacacaagggcgtcgcactacacgaggcctctgaggaccggtctctaactgtagccttggttggcttgtgtccctctgagcttgagcttgagcctggggagtggctggttttgtggaggctgatctgtagcactcgtgggaagaaagggagcctggcccagatttgtgtgtgcttggtctggaagcaggtagaagagtgggagcatggtgcacacctcttgggcagcttgcttcctgctctgctgggcacaccccacgctccccaggacgtgcactccgccaacatatcgtccggcgcgttgctcccacctccccctgtgcagatcaaaaatggcttggagaagtttggtcagtgcttgtaagtggcaggaccagggttctaagcctgtgtgttcatcccaccagcatctggttgttgtggaagagaagtaggtgtgcagtctgggtattcatctgtttattcagtgaggtgtgctagccccattttgggggtattggtgcaacatcaggacactggtgacaatgtaaggggagcccgagcttgctgtcctacagaccctcttgtcttcctcactgtggtccaggcacgtggtgtcaggctaacacagtgggattggtttctgcagcaaaccaagagtttcactgttgacatccgcgccaagccagaataccacaaattcctcatcggcaaggggggcggcaaaattcgcaaggtgcgcgacagcactggagcacgtgtcatcttccctgcggctgaggacaaggaccaggacctgatcaccatcattggaaaggaggacgccgtccgagaggcacagaaggagctggaggccttgatccaaaacctggtagggagcgggcctcggcggccgactctgctggggccgtgatggggtggcttatcttccatctcttcttaacactgcaggataatgtggtggaagactccatgctggtggaccccaagcaccaccgccacttcgtcatccgcagaggccaggtcttgcgggagattgctgaagagtatggcggggtgatggtcagcttcccacgctctggcacacagagcgacaaagtcaccctcaagggcgccaaggactgtgtggaggcagccaagaaacgcattcaggagatcattgaggacctggtaggcacttgggtgctcggggaggggttctcaccccccagtggccactcaccgaagccgtgtatgagtgttcgctccaccctgtagggaggtgactccctcatacagccctggaaggcttcagaaggggctttctggtgctcgctcttctttcctcagcctgtctggcctccttcctgatagttggtgagaattctgcctgcgagaagcacttaaaaaaaaaaagagagagagaaggagaagaggagaggggagagagagagaggaaagaaagcaagagaaagaaagaaaatgcattctgtataagggatcaggaaaaatgaaaatgcagtctaaggggtcagctctcttctcccctctgtgaaggaaagaaaatcgatttgagggcatccacgtgaatccatgggaagtcatgagaagacgtggtctttagaagcagtctttagagagtgtcccctccaggccactcccctgccagggccttggattccctttccctaataatcaagtctgatgcctcctcatggagtcagaggctaccccaggaggtcccactcctttggctgaattggccaccctccagggatggcacctggccttctgggacacatttcagaggaggcccacccccttagacctgtcctgctacctccctcctccctgcgcctggagccctggactcgggagaaggggagcatctgtgccaagtggctgtagaggacagggaggaaggtggtgtgaagagtgctgtaaaacttgccctaaggaatttaatctttgctcttttcttttttctttgtgtacctccctccaggaagctcaggtgacattagaatgtgctataccccagaaattccatcgatctgtcatgggccccaaaggttccagaatccagcagattactcgggatttc

SEQ ID NO: 8778 - DNA, 6000 bp, Homo sapiens
gtgtctgctagtcagtggatatttgagcttctgttttgtaatcaacactgtaggggaaagggccacttcactgaatatatggatcagaatgaagacattgacccctgacactctcctactcctcaattatcttcagacaaatcccagatacattattgtgccttagttcagatcttcccgttttcatgtatacatatatatagtcattgtgctcctaactcatgtaatcatattgatagtggtttcttaatattatacctttttaacccagtctctgtttggactttcctcatcatctccaagatgtttctttcagttggtcttttcaagtcagtgtccaaacaaggtcacaatgttgcatttgattatagagtcctgtctctcattctttaacagtgcttactccctcctacccccttttttttttttttttttgagacaggatctcactttgttgcccaggctggagtgcagtggtgcagacacagctcatggcagccttgacctcctgggctcaagtgatcctcctgactcagcccttcaagtagttgagactgcaggcatgcaccatcaggcccggctttttttttgtttgttttttggcagatgcgggttttcaccatgttgcccactctggtctcaaacccctaggctcaaatgatccactcatttcagcctaccaaagtgttggaattacaggtgtgagccaccacgcccagccaatcctccccttttttaatgccattgattagtggggaccgtaggtttttggttctgctattgactgattatttttggtgaactggtgttagatctctaggggcttggttacttccacagtcagcttgttgggcaagaagaccctgtaggtggtgctgagtctgtgctgtgatagctggttgttctgctttgaactgattttgagattgatcattaggctcaggtctgggtcttcccttgtaaagttccctatcagtgctttgtgtaatcattttactatcaattggtgattgcccaaattcgttaagggttgcaaattatgcttttctaattctctccctgctcatacattagttgataattcttgtaaagaagaatttttcttcatcagcagttgggtgggaagtaccagataaataatcgattctttggcgctccggcgacttcagtgttgatcagtgactctctttagtgtcattatgaactcaggcattgtccatcattcttcatgctggagctgcttcatctttggccagtgggtcccctcctttcagttttgttccctgcagctttctgtcatgacctattaatatcaataccttctggccaggtgcagtggctcacgcctataatcctagcactttgggaggctgaggcgggcagatcacctcaggtcaggagtttgagaccagcctggccagtatggcgaaaccccatctctactaaaaatacaaaaaaattagccaggcgtggcggtgggtgcttgcaatctcagctacttgggaggctgaggcaggagaatcacttgaacccgggaggcagaggttgcagtgagccaagatcatgccattgcactccagcctgtgcaacaggagcaaaactctgtctcaaaataataaataaataaataaataacttcttaatttctaacacagaaagatgcctcaggctaatcttacatatttccttccacagaccttgagtcagctgtttctctctgaactctgaaccttttgagtaggaaattgcagttggagactccagtctccataggtgcacgtcgcaactaggttgtcagagcttctaggctttttcagaagacagagctaggataattgtacttttaagaaaggaaaagcaggcggtgactctcacgcctgtaatcctagcactttgggaggccgaggtgagcagattgcatgagcacaggaatttgagaccagcctgggcaacatggtcagaccccatctctacaaaaaatagtggtggcgtgctcacctgtaatcccagctacttagaagtctgaggagaaaggattgtttgagcctgggatgtggaggcttctgtgagcagtgtttgcaccaccacagcccagcctgggtgacagagtcccagaaaaggaaaatcatgagttcaaaatcacttgaagtaattccttttttctgagtttttctgtcatcttgatatagttaggtacatttgtttccatttactgtcaatttttaaagtatttcaacatttacatgcttgcaaagtcaacgttatataataaagtactttcagagaaatctcccctgcctgttaccttcaccctgctccctcctcacctttgcaggcggccattcctggtcctggtttatcctttgttgtttgttgtttgagagcagaagcaaaatacagcttgccatacaccctgttctatgccttgctttttttcttttattattttttggaggtgtctgcatatcagtaagtagtgatttttctcatttctttgttcagcagtgtaatattctgtgggcgtactgtaatttacccaggctttcctactgatgggcatttgggtagtttccagactttagctgttacaaattatgttacagtagcaatcgtgtgcatatgctatttcctgttttacccagtgtatcttgggatagattcctagaagtgagatggctgggtcagagggtggctgcatgtggaatcgggccatcggatgctaaatttccttccttaggaattagtgttttgccgtctcatcagcagtatgcaagagccaggctcttcacattcttgggttttagccgatgtgagaggcaaccaaatatactttaaatttgcatttttctgatgagcaagattgagcaccttttcaatatataagggccacttgcattttttattatcttgagtcattgttaggaaagttttttcactatcaggtcataagaaagtttatcttttcttctgctgcttgtaaatgtgttcttacatttcagtttctgatctatttggaatttattgcaaatagggttgaggcactgattgagtttcacttttttccatacggctttcgagttgtcagcactatttttttgtttgttgtaacacagggtctcagcctgccacataagctgaagtgccatggcatgatcacggctcaccggagcctcaacctcctaggctcaggcagttctcctgcctcagccaccccagtagctgggaccacaggcacacgtcaccatggccagctaattttttttttttttttttttttttttttgagacggagtcttgctctgtcgcccaggctggagtgcagtggcgcgatctcggctcactgcaagctccgcctcccgggttcacgccattcgcctgcctcagcctcccgagtagctgggattacaggcgcctgccaccatgctaatttttgtatttttggtgacctcgtgatccacccacctcggcctcccaaagtgctgggattacaggcgtgagccactgcgcctggccttggccagcttatttttaaaatttttgtagaagtcaggtctcaccatgttgcccaggctgatcttggactcctgggctcaaacaatcctctcatctcggcttcccggagtgctgggattacaggcgtgccatcactgtcttgaaaagacgttttgctctagtgaacttgagtggctgcttttatcatgtcctaaatgtttatattaacttagctctgtttctgggttttcagttcagaccagcaggtctttccgtatactggtatttcctgtgttaatgataatggtttcatgtttaatgtctaggaccactgttaacacctccaccctgcactattctttttcagggttttcttgttcatttttgttggttctgtgttacaacctttataatcaactgtttgaaattgtattaatattttaaagttaattgggatgatcgccatctacttaaaccttctgttagctattttaaggagtgttttctaatttcgaatgcacatactccaccttgtgttgggcttgtgtcttgctattttcttgtccttttttcttttttccttttttctattagaaacacatcttttggccaggcgcagtggctcacacctgcaatcccagcactttgggaggctgaggtgggcggatcacaaggtcaggaattcgagaccatcggggccaacatggtgaaaccctgcctctactaaaaatataaaaattagctgggcatggtggcgcacgcctgtagtcccagctaatcgagaggctgaggcaggagaatcccttgaacccaggaggcagaggttacagtgagccaagatggcaccactgcactccagcctgacgtcagagcgagactccgtctcaaaaaaaaagaaacgcatctctttcattacatcttctaagtagttgttgtttgtggaagttaatgttgttaacttcttgatttcagtcttttctctttgctataaatagaatttcacccagtagttttttcagggtttctggatatgcagtcatgcttcttcctgtccagcttttgtggatgttaactcttgtctccctttgtgggtgtatattccagtggatgttaagtagtggtgcagatacactcgaacttaccctaacctgggagtcagggcaaccttccccaagcatgtgatgtttaagctcatgctgttttaatggatgagttggtgctgctgggcaggaataagcaaagatggtgtttctgccagaatgtcttggaaaaatatgctccttcagaacctacaaatattcttgttttcttttattctcttcttgctataggcctcagcaactgttgccattcccaaagaacaccatcgctttgttattggcaaaaatggagagaaactgcaagacttggagctaaaaactgcaaccaaaatccagatcccacgcccagatgaccccagcaatcagatcaagatcactggcaccaaagagggcatcgagaaagctcgccatgaagtcttactcatctctgccgagcaggtgaggcctgtgtgagtgcctcgtgcccctgcctacctgcttgtgcagacctcactccctcatgggttgccgtgtccagtgtggacttcaaggcataatgtggtgggggtggagggcttgactccaactctaaaaagccctgtctgtccccagtttgttttcaaaggcctgttctcatcagatcatcccttcctttccaggacaaacgtgctgtggagaggctagaagtagaaaaggcattccaccccttcatcgctgggccgtataatagactggttggcgagatcatgcaggagacaggcacgcgcatcaacatccccccacccagcgtgaaccggacagagattgtcttcactggagagaaggaacagttggctcaggctgtggctcgcatcaagaagatttatgaggagaaggtacacgatttagaggaggcaaatccccatgggcaggaatagaaatgaggatttgggtctggagattcagttaaggcctggttctgccccttatctttttgtccttgatgaagatgcttattgtctctacacttgagtgacccgggtgagatcggtgcccgcccccccttgctgttgagcatctgcctggcagttgtccttgccgtcctgggcctctgactgtgctgacaggctgccagctgggctgccccgggtcagatgcacatcccggacttgttcacgtcttagattaagctgttagctcagcttagtgaactttgaggtctgaaacgtgttccttaattgagggaaaggattgggtgttttgcagtgttcaaggacgaagttatcagccggcgggtgactagactgaggggaaaaatccagtccttgaacagtgaagtttctggggattggctagtcctgatcacttgttgttcacttcttgggatcagcatctatagtctgggccgctttggcttgctttctgcagcagtggccatgcccacctgccc

SEQ ID NO: 8779 - DNA, 6000 bp, Homo sapiens
gattaaccggatggactatgtggagatcaacatcgaccacaagttccacaggcacctcattgggaagagcggtgccaacagtgagtgaggctgtctgttgcggtggggccagtgtgccctgagacccttgtggggggtgtcagctgtgagaactgtgacgtccgtgcagacagtccaggcccattgctgcctgtaatgggagttacagactttacatcctcctgcctgctggaagaggccacttttccttttccctttggtgcagtggttggattagagctgcttggccagtgggtgaattgtcacttttggaaatccatctaagccctccccaaataacccacagaggccatgttgaaggcatgcccaagggcagcattctctatatttccgtcagacctgctaggttagccaatcagtgttggtagtactcatgccttctgaacgtggaaactgctgatctggaactcactgaagagtaaaaacattctagatttgtgcccaagtaaaacaacatggggagggatacttttttgagacagggtctcactctgtcacccaggctggagtgcagtggcgtgatctcagctcactacaacctctgcctaccgggctcaagcaattctccagcttcagcctcctgagtagctgggactacaggtgcatgccaccacagccaattaatttttgtatttttagaagagacggggtttcaccatgttggccaggcttgtctcaaattcctgggctcaggtgatctgcccaccttggcctcccaaggtgctgggattaaaagtgtgagccaccacacccagcagggggattctgttgaagaggcagtgatatgtcagccaaggtcgctatatgcctcacctgtgccaggttgtaggtgtagcacagttacaggacactgttggaagtatgtcatgtgggccaaggtcgctgtgtgcctcacctgtgccaggttgcaggtgtagcacagttacaggatgctgttagaagtgtgtcgtgggcattctgctgcaggtccaaggatgttttgtgttgtttgtttgttttttgggacggagtctcgctctgtcaccaggctggagtgcagtggcgtgatctcagttcactgcaacgtccacctcccaggttcaagcgattctcctgcctcagcctcccaagtagctgggattacaggcgtgcaccaccacacccagctaatttttttgtatttttagtagagatggaatttcaccatgttgtctaggctggtgtcaaactgctgaccttagttgatctgcccacctcggcctcccaaagtgctgggattacaggcatgagccactgtgcccaaccaagaatgtttttttacacctctttgtttaactgtatggctatactcacacactcgcgtgttctgaaaacaagtgcacacgtcgcgtgtgttacctttgggtggaaggtgagaaggcaagcacgtcctccattcctggatagttcagtggatgaaggagcctttcccaggtagtgggacaccgacctgcataacatgactgacgtccgtgtatccgtttttgttatgagtaaacatagccttggcagctgtgctgtggcctgtgcaatggtgagctctctggtgtcagtcttatgttttgtgggcattttacgtgacagcgacgagagtctgtaggcacaaagtgacctttttgcgcactacttgaaccacacatacaccataaacttgcttttacggttttgttttggttttggttaactgtagcgtttgtttaggcctgacacggtggctcttgcctgtaatcccagcattttgggagaccaaggcaggaggatcacttgagcccaggagttcgagatgagcctgggcaacatagtgagacccctgtctctacaaaaaagaaaaatttagccaggcctgtggtccccgctgctctggaggctgaggcaggaatatcacttgagcccaggaagtcaaggctgcagtgagctgtgattgtatcgtgccactgcattttagcctgggtgacagagcaagaccctgtctcaaaacacatatatatggaagtacagtagtgtaaatctaacattaatttctggtttctgcccccgagaaattgcagaatgtagcttagtcagtcatgtctgttctgttttcttctcatgcagttcctaactcttgtcttctttcgtaatctaaaaaaacctgctgcccagctcccatgtcctctgcttctcttgtcttgtgttgcttcacctggcacagctgcatgtccatgttcccccctcagtgcatcgcctcgttgctgcctctgcgtgtgcatgtgtttgggatggacgcacaaaaagccctcctcgtggtccttccagcaagctgggcttccctttactgcacagtgggcaagattcctgccttgtttcctgatgatacggcttctccagagtttggggggcctggaactcttaacttgggggtactgggttctatccagagaggttgacagcaggagggtttgcaacagcacttgtcttgcagacacagtgaagtgctcagtgtgaatctgagccaacagtagatggggtctctgggcagcagcatgggccccacaaggctcttaggcgtcagtgagtgcttttgtgtggagttaatgtgtgtggtttttttaacttgagaatagtagttcccaaacttactgcacattagaaacacctggaatccttcaactattctgaagccctggccaataccccagacgagctaaatcccagactgagtggccccaaccgtcagttatttgaaggtctcggggcatttccagcttctggtccaggctgagagcctgtcctccagaacccttgtgatccaggtgaagatcataactggcccccattctagacaatggagatttttgtttgggaagctaagcatcgtttttggtgatgggaatcacagataaggttatttagcgctttagcgctgtcctgcccagttatgtcattggcagaatgttgttggtctgtgtcctaaatgtgtttccttttgtgttcctaagtaaacagaatcaaagaccagtacaaggtgtccgtgcgcatccctcctgacagtgagaagagcaatttgatccgcatcgagggggacccacagggcgtgcagcaggccaagcgagagctgctggagcttgcatctcgcatggtaagtgccatggctgggccctctagaaaggcactggccttgcgtctcttggccccctctaaggagtagcgtgttgtggtgtgcggccttagagaatggaagtcgacaaatcccacgttgcactggaaccggattggactccctggggccacatttcctttatcctccccaggtcacctgcacgtcttgttctccatggctgtgtgctgtgctagaagggcacagagactgtgtggcagcgtcttggccttggccacaccctgggtgcccagatgcctgggtaccatctccagagattgtgacagacatttctggattctcaaaggcatcccaggtggttctcatgtaaggccagactcgaggatcactgcaaacctgaagtgggggctgttgctctctaccacctggcagaagcactgcactgctctgggctccccgacgtttcatacatgcttatgccaagctgtgagcacccttgcttctgtgagtcagatacccacacttgaaagtctctgggtgcctttaagtatccagagaagtcaaatactgcgtgagtgcctgcagcagcactttggcctgactgtgtgaggaacaagccccagggttccctgtcattcgcttaggggattctttgttcacctcaccccagtacccacacgaggaatctcaaattggcagacctcttttatagccctgagctgcattccagggcgtgatgcagcctcccactgcttgtggccttcccggagctcattccccagtctcatattccaggttctcctcttagcctggcctccagcccaggtcccttgtcctggctgctttatgcccttcctgattgctgagcccttacttctctgtcagccaatagccgtttgatccagaatctctcagaattcttggaaatgtttggttggctgttggtgttcttccctgaattccagctctgcttattctgtatttcttctgacattttaatggggcctgtggaggagttgagagccatgtgggttcagtgccctgtgttgaacgttcttagccatgcggggaaagtggtccgagccaccctctgttcagaagggatcactcactgctatgcagaatgccaggcctccaagtagaagagctgggcctcccctgtagtacctgttaaaacagaagtgctcactgaattgctttggtgattactgctatcatgatagcacttttggttgaagggtcctacagcgagttccttaattggactttgttcagggaagtgacgtgcagcccatgttgcggagtgtagcgatgcttggtgagagcactcattatgcgctgtgcacactcttaacagctggttgctcccggggtgctacgaggtgccacctggagaccacctcacctgctccatgaaggactgtgcccagggctccctggtgtccccttgtgtcagtggggagttgctcgccgtgcttgtgataaatgacatctactttaattgtatttttaggaaaatgagcgtaccaaggatctaatcattgagcaaagatttcatcgcacaatcattgggcagaagggtgaacggatccgtgaaattcgtgacaaattcccagaggtaaagtttcccagagacattctgtaactctataggagtgatccaagtcacacttcaggaatatttgatatttgggatatatgtccttcctcatacttgaacttagtctccccatgatttgttctaggtcatcattaactttccagacccagcacaaaaaagtgacattgtccagctcagaggacctaagaatgaggtggaaaaatgcacaaaatacatgcagaagatggtggcagatctggtaggggtgtttcacatcctttcttgtatgacagcacctggggtgggtggggcatgcgtcctgtcagaagtcctgacccccacaggacccctgctctggggaaagcacataggccctgggctggccttccatctcagggacttgggacaaagtggtgacggcttctcacttaatacctggatgtttagattggcagtcattgttaagactgcagtgtttgtggaattcaggtggggagatttgccttttctcatgcccagttaccttgtttccttgaggagtcttcagatacttagagaaattgtcccatccagtaagataagaggtataacaggtgacatgaggagtcatatactgatttattatttttctcaaaaactgacgtgggaacaggtttagaaagtgtagtgagtagtggatgagaaggccacaggcagccatgtatttccgtgggcttcaccttagctgatggctgccctgggagaggcgatggtgaaggactccagcactgtgagctgctgtcacatcactgccgtgagtgcagaattgcccagagcgtaggggtccgtgctgtctccatgtgtgttctgagccccttccttaaccagctctgatcctggcatgggacatgaactctctcttagccaaaaagtagacttgcatcgattgactgtaatttgcaacgtaagttagttgttggacaaatgatctatctcacttaccctcatgacaaacctctgaaggtttgtttgcaaataccagtgctctgtcgtgttcatgctacccttaggggtagaagggatactgtattttactctctagcacaggtggtgaatcgggctgtgttttttgtctttaaggtggaaaatagctattcaatttctgttccgatcttcaaacagtttcacaagaatatcattgggaaaggaggcgcaaacattaaaaaggtgataacttgtccgctgc

SEQ ID NO: 8780 - DNA, 6000 bp, Homo sapiens
aggggagggcggggaaactctttggctcccagccggctcacactaaaatgcggtaaacaaggtctgtgttgcaatcgggcgcctgagaggaggtcaaggaggttgaatgctgggctggggctcaaggcagagcagggcagggcgcagggagccctagctggagggaaaggaaccagcctggaaaggtctggaatcaggaaaaccatggcgtgggggctgggagaagaggaagacctggttggtaaaggcggggcagcaggaggagaggagagggaagaggccatgggccacagacaaggcaagacctggagaggtcagaagtacaaggcacgggcggcagggagggtgggtcatcctggcaccatgcagctttaaagctacccagtgagcttcaaggggctgctccttgccaactccctgctattacctctgggtgtttggagtgtgtctgccccacctcgtccctcccaccttccaactcctcaaaagagaaacttccagcactgggaactacccccaagactaaatctccgcacaggggagtcgcctctcagatctaagtttccctgggagcagggaccgcgcaaacttagagccccctggaaactggatggtaaagatcatgagttatttagacttatgcatatgccagccgggatggtgcacctgacaccttatgcacattcattgcttcatgggatcctctcaacaccaggagggagatgcttcccatttgacagaaaagtgaggagcacagaggggaagtatttgctcagaatgcattagaagcctggttcttctgtaagcaaaccttattgaccaacctgtatttagggactgggcatggagtggtgaaagagggaaaaagtcccagctctcatggagcccatgatattttagagagggaaagggacaatccaggaaatagacaaatagccactttcagctagtgatcaagaatttacaaaggtaaaagagtggcaagtggggggtggagtgttactctggctgggaaagtcaggagatgcccctgaaaaggccctgcagacacccaggggaaggtcttggcaggaaggtcgggggctggggggccaggaaccaaagcttcctgagccttggaaaagagggatgggaagatgcttgaagggacagaggaagtgagagtgaaggctgttccacaggcatccaggctagagaggaggggatctggggtgggctgaagccgggcaggcactggaggggcagagaggagaggatggagtatatggagggcgtgagggcaaagagagcaggaggatgtggagcctgaactaccgaggcctgggagagagcagaaatggagaggtaggtttggactctaaaactcaagcactttaccattgacagggactttgtctttttcttctttgtccctcattggtcaggacagttgtgactacatagtaggtattcaatcacttcattcatttagtcaatgaatatttattgagaacctactacatgcctggctctgtcgtaggcaccagcgatacactggtgaacaggacaatgcccttggcctcttggagcttacattaaaagggggagagaggacaagtaaatatgtgtatgtgggcagaagagaaaagagaatggaggggctgttttagatgtgggggtcgtcgtaggcctctctgataaggtgacatctgagcccagactttaaagaagtgagctggtgagtcttaaatgggagtatctggaggaagaacatttcaggcagaagaagcagcaagtacaaaggccccgagatgaaagagtgtttgctgactgaacaacagatctagtgcttgttgactgaatgatcaggaattgtgtccctaccaatacacttgaaactctctaaggaacatgcctggatcttcctcatcaggcaagagtggtcagaggggtgggaaggagccacttcctgcctttctttaagccattcctctttccccagccctggccaggcctagaagcaggggtcagggagggtcaagtgccgagtctgtcacaatctggacaaagggcagagaaagtcaaagaataggcaggctccatgctgtcccacagcccagtactcatgcccatgctgtttctgcttttaacacctgggggtccacccggtaatccaacccccacctctgcccctgccatgtttcccctcacactaaaactccctgcttctctggacattcttctcctggtgcggtatttgtctctgcagggtttaagggaaagcttcttcaccctctgaagtttcaatgaaaaataaactcacaaaaggcacattaaatggagaaaaggtatatacattaattcaaggtgtacaccccgggagaatcacggagtatgcccacccctcagcagtgctcagaagcttctatactatcctggcagaacaggtgatgggagaggagagaagacgaattctgtagaggggctagccgaatggatcagggaatagagattaacttgccgggtgtggtcacattctcagtcctacagggaggagaagaaacacaattgttccttttggtgggtctggatgttaggcagataaaggaacttcagtttcatcctgtgttttgggagagacggtgaggggagggaaggtcagagagaccttgaggctttttcagttgtgtatgtcaaagcgccatgctttgggacttctgaccccaatacctctggctatctcaccaggatttgagagggctgtggatgctgccactccccgcaccaccccaaccccctaagccagagaggtaccaggagactccaggtcttagagtctcagctcagattccacccaaattctggccatattcccagtcctcatgtgagcataagatgatcagaactggatagtcacttcctccttattattcttaagtcatttctgcttctccaactatcttgctgacaagacatgttgctctaaattctactgattcaatacttttctattcttaccaacaaagcgtaacaggctgtgagaaacatgcctgaccacacacgaaactggagaaggcagtgggtgcagatgacccgacctgactgttcttctgattttaattccaggcacttccctcttggccaggtgagatgctatgatccagaatctcacctgggagagcccacagggcattcttagggctcagtgaaaggatacccccgcaacaggacaggtcttcctttcccatgtgggctctttatccagaacccagagctgcggagagtctggcttctgggacccttgactggggagaaagcaggtgggggccacggagggaaggccccagagcagagaggcaccaggctggctgagcctgggcagctgccctttgccttagctcagtggttctcaaagcctggcccccaggccagcagcaccaacatcacttgaggccactcagccagaaactctgcagtggggcctcgcaatctgttttaacaaaccttccaggtgactctggtgcagaatggtggcaagaactcaaacctggactaggcctgctgggtaagtggagtcccagctctccagtggactcaatgtgggtggcctgggccaagccttcctgtgcctgggccatttctccgtttgtcaagctccaggactggggtaaaggatttgacaaggtctgttgggcagggatggaatcagatgaatatctaagtggaagatatacagacaattgtaactacccctctttctcacatggctctaaaggggaaaacagatgagtgcagttgctttgtctttgggtaaagtcaccaggagctgcctgcctgagtgaaccagacaatttaatgtgtgccatttagtgaggggccttgttttaccaccacatttgaggatggggggagggaagcctttctgttggaatttgtggcccttggacactcctcccacctccaccctttttggcggtaaaagcttttaggtgctgcctctttaagaactcagatccggccggatgcggtggctcatgcctgtaatcctagcactttggaaggccgagatcggtggatcacctgaggtcaggagttcgagaccagcctgaccaaaatggtgaaacccccgtctctgctaaaaaatacaaaaattagcagggcttgatggggcgcgcttgtaatcccagctactcgggaggctgaggcaggagaatcgcttgaacgggtttgaacccaggaggcgaaggttgcagtgagccgtgatcgcgtcattgcactccagcctgggccacaagcgctagacaacgtccagaaaaaaaaaaagagagacctcagttcccatcgaggtggagaaaaaataaccacatttgtttggcatatttgcatttttaatagtccctgaggagttcaggaggaaacagggttttacatccccttttagggacgcaagtaggattgccccaaaaagttccactccgttcacactcagcgagggcccggcaagagccccacctttcacattcattatttcccttactaaccgaggctccgagacgctaaacaagcagcccaaggtcacaccgcagagtgagggcagcagagcctctgcgcctgcctcctcccttcggaccctgccgcgttcccagaggctggactcagcaagctggaacaggaatcgaaccctcaggccctcgtcgccgtcccagccctcgaggaatctgcgccccaggcgaagctgtcctcggaggttcgggagcgtcggagtgacttcccgatcctttcccctgggacccgagggatccctccccccaagtgccgggtcctccccgcggctccccaggggctcctccggccgccctcgctgactcagcgtaatccgagccgcggagggcggcggggttggcggagcccgcccggggttaatcgccgagctttgaacgccccctcccgccccgcccgcctccagcagccgccccgcccctgcggagaagtcccgggctggcgccggcggccacagcggagcagctggagcgatcgaggctgcagcgcggccgccgggcgcagcatgactgccgtcggcgtgcaggtagccggcgcctggcggggcgctgacccggggtgctgccccgccgtgggaggttgggggtgggaggacggagggaggggcgtacccaccgcgagcgccggcgtcgggctgggggtgcgagcgccccccgtgcccgccccctgttgcaaacctgggtccggaggaggctgggcggggagcaacctcggggggcctgcctgcctcacatagctgctcccgaggcgcggactccggctgcttctgctcgcggccttgcaagcacccgaggctcccaaacttcatttggaaagatttttcttctctttggtgtcaccagtgacttactggtcagtttaccataagggtccccctttgtgagaaatgaggcgcgtctggggtggagggacagaatcgacttgcaaagtgaggcttatgtaacagaggatgcgtctcttgggaagttagacctttctgggggtggaggttaggaagaccgtctccctccccaaagctgcgtttggggtgctgggctgggggtggacttgctgagtcgcgcggacacctcagggaaaggctctggcgagggaagaagcccgtgtctccgaagatttggcttctccttagcgtagtgcacgatgtttatgttggctaagaacctacacattcctacccgctccctcgggcctgctgctccccaaagggaagtcagtgggtggcggtaccgctgcccagcgggcgaacttcctttccgcgcaactcgcccgctgcagagtctatccgctggactgtctccaggattagagaggcccgttgacttcgtgtacaaacgctcagccacaacactgacctagtagacaccgttctgcccattgtatagatgaggtaaccgagactcagaagtaaggtgccctccgtggctggccaaggaacagaatcaagattcaaacccagggctt

SEQ ID NO: 8781 - DNA, 6000 bp, Homo sapiens
ataatctcctactatacaaaagaattttctaattagaggaaaagggagggatagcatttttcttgggtagggagggagagggaagaatgcatctgagtgctggtgcaaatcacacaagctttggaattggccaagtcagacaccaaactatgcttccagcgctcacgagctatgtcctttcagacaaaggatgctacttctgagcctcagtttcctcacggcaatgtgagtagagtaacacctctcctacagggcagcatagaagcatttagggaatgtgtccatctctggatttctgcttcccatggtggccaagtgagcccgtctaatgtcactctcctgcagggaatatctagacaatgagcaaatataaaaagtgagtggagatgaaaagcatggattatgggaggggagtgtgatgtgtggaagaaacaaagggaaagagggcttttatggtttttagcttagggtgagtctgacgccatgccatgcggagttgccaaaacaccaacaggaaacccttggtctttccctcctgaagaaattgggaatatgcctgctaaaaattgagaaggaaggagagaatcagagatggagaaccccaaattctgtgtataacttccatccagaactccagttgacatccgaacgctgaatgtgtgaggcaaactccacgaaacacaagaaggataaaagaaccaaattaagaattcagctgctgttcaacaggcagtttgcagtctgtcaaaccaacttaatggtctcatcacacacacgcgtgcgcgtgcatgcacacacacacacacacacacacacacacacagctggaaaaaataacagagcccagactctccacgacatgatatttgcaatgcccaacaagtcatgctaaattatccacaattgcagaaccggggaagtgtggccaccgctctagcaaacagacacactcagaatcagaacaatccccttgctgtgctcagaggtggagcttcctgctgtatccctgctcagtgacgggaatcagggcctgcacccaccaccaggatgaatcctgccttgccgcgattttacagctgcagcgaaggacagttctgcaatcatgggaagtctaatgttcagtcctcatctaataaagagaagaaaaagaatgagagagaaaaaatgaagaaataatgctaaaaattaacaatataaattcacagaatcaagaaatttatcaaacacaagcaacatgaatacaaagaaaactaattctaggcacatcgtggtcaaactgctgaaaccaagataaacagaatattctgaaaacagaaaaatgacatgttatctatgggaaaatgaggattagaaacatcactgcttttctacaagaaactatggcagacagaaggctgtggaatatctctcatgtggtcaaagaaaagaaagaaaagcagtattcaacaattcacagaaaaaatatcctttaaaatgaagacaaaacaagagcatttttcagatgaagtcgattcatccccgacagatctgaactgcatgggatgcttatggcaattctttagtctgagaggaaatgataccacctgaaaatgctcagaaaggaatgagagctttggaaatggtaaattaagcattgctgtcaaatgctttattgtaaaccgcattgtacaaactgacagaggcatcagatttcacatcagggtcaaactggtgcagcccagagacacaaagggaggaaccaggaacccgcacagaagctgcccggggtcgtagacccagcccgtgaggttggtgtcctgcaggatgttgctgagcttggcaagttcaatggggataaatggagaacacagtggtggagataagggcacttctgtggcctgattcgcatccaagacatcgaaactgagggcgcccagagtccagctctcagggatctcagttattggccatgatgtcttcaggaatgaaacctctgggctcacaccattctttgggtgtgctacagtgtttaaacctttcctgagatgcaccctgccgtcccctagggtccgaccctcctgggctttctggcactgtctgagctgtcaccaggccaggggtctgcacctggcaccccggctggcatggggctatggaggccaggtccagggggtcctgcccatgtcagcctggctgtggctcttcctagacagacgcccctcccaaggctgcctctgggtcacagggcacagacctggtcttggtacctctcctttcctccataactcctcattgctcccacagcaacaggtaactctcccctgtggtctctccatctaaacaatcagctgcctgctgggacctgagcaatgcaaagaacaagaaagctatcaagtactggctttaatttgtagaaaacattacagctcacaaacttattttacccattaataaagctcttgaaaaccaattgtatgtggattaaatagctattttagaaataaacaaaattgggccaggcgtggtggctcacgcctgtaatcccagcactttgggaggccaaggcaggcggatcatctgatgtcaggagttcgagaccagcctggccaacatggtgaaaccccgtgtctactaaaaatacaaaattagcctggcatggtggcacacgccggtgatcccagctactcggaaggctgaggcagggagaatcgcttgaacccaggaggcagaggttgcagtgagccgagaccctgccactgcactccagcctaggcaacaagagcaaaacgcaaaaaaaaaaaaaaaaaaaaaaaaaaaaggaaagggaagagaagagaagggtggcgagggaaggggaagggaggggaggggcttcatccagtcttttctggaagcacaaaattccaggtaaatggaatagagtccatgtcagcattcacataccaacagagagagcaggccatgttctactggccacattaaaatagcaaagagaaagagattaattttattgatatattttatttggtccagtatgtccaaaatataatttcaacatgtaagcaaaataatacaattgttgataatgtattttacattttggtacaaagtctttgaaagatggtgtatgtttgaaattaaagcacatctcagactggcgacattgcacaagcttcacgtctaaatgtccggcagcctagcgttgttcagaacggcagggcgggaggaatgtggaagatgaatgtcctgggactgaaagtgaagctgctgagggccagagttttaacaattttggaaacttgggtgccagggcgcacaatatatgaaagatctgggagggcggctgaggggaagatgaagagaaaaaatcccagtgaccgtagataggctgtggttaatattaatagcaaaaagagtttgaccccaaattacagaagttacaagaaaacagacaccacaaaagaaaggcaggcaccagacaggactgacgatgaaactaacccatggaaattaataagagtgatgtttcacatagtaacgaaatatcatcagggagatacacagtaacaggctgaactgaagaggacagatctattccctgtaactgaaaggtcctgttgaaaatagctgaacaaacacaggggagtgagaatggacacagatgaaaaccatcacaccagctgggtgcggtggctcatgcctgtaatcccagcactttgggaggcccaggcgggtaaatcacttgaggtcaggagttcaaaactagcctggccaacatggtgaaaccccgtctctactaaaaatacaaaaaaaattagccaggtgaggtggcgaacacctgtaatcccagctactcgggaggctgaggcaggagaatagcttgaacccaggaggcggaggttgcagtgagccgaggtcccaccattgtgctccagcctgggcgacagagcgagacatcgtcttaaaaaaaaaaaaaaaaaaccaggaaagccaagcccgagatttcccaaactcagcaacaacagtcgtgatgttttgagaggaaggttgagaaacacaaaagagaggaagatgcactatctacctaacgggatgttcctggagttgaatacaggaagaatagagaaaaatatcaatgaaagaaatgttttcccataagaagaaaccatgaccttctacactgaaatgagagaatgcatgttaagtagcataagcagaaatgaccacactgtggaaagattttaagaaagatctgggaggggttaaagctattaaaaaaaaaaaaaagtccaccactagaactatttttagaaacattaaactagttcaagagctaacatatgcaattaaagtatatacacttaataattcatgatgttaaaataacagaatgtttaatttgaaaatgtcaaagttggggtatagatgttaaaataaagggaaaaaattcgctggaagaaaattaactttatatttttgtatctgtcgttgaacaacgaagtgaagcgtaagaacatctggtaaatctccaaagtgaagacagataaccctaagctgacccagactaagagtgcactgcccttagggtcgcgagagcagacaccttcccaagtcctgcagggtccgaggagtgggcaatgtccccggctcctgcagggtctcggggcggacaccgtcctcattgatgctctgacccttctagggagtcccaggtgggacagggctggcgtggcggtacagcgccctgagcctttgaaacaaacctcctaaattccacccgcctccgcctgctcctctgttaacgaactaaagacgccctcggcctcctggcggagcgagcacaagtcccacagcagcgtagtaagttttccgtattacagcgaccaccaggaaatatcgcgatatctggacctagcaatgccatgaaattaccgcgagaggaagcaagcgcaagtttcgtgagaagggcagatctcacgagagaggatttggcgccctcctctgtggattctggccaggccgggttcggcggttgctgtgagagcgggcttcccaacaccatgccgtccgccttctctgtcagctctttccccgtcagcatcccagccgtgctcacggtaactcgcggcccgcgtaaccaccagttcgggggaggacggcggagaggcgtagggtaggccccacagagcacccggcctgtggccaagaaggccccggccgtgggcggggccttgtggcggagcgcgcgcgctgggcagggtcctgagacctgtgggagtggctcggggccggcgtcgggggcgcgcgctgtgggcggggtcctgggccctgtgggagggggccggggccgggcgtcggggcgcgagcgctaggcggggtcctgggccgttgggcggggaggggcggggccgggcggggccttgtggaggagcgtgcgcagtgagctggctccggcgctctgtggcccgggcttgggctgggctggcgtcctgcaccgtgcgggcgtggctgagttgtgtgggcggagcgcgaggggtagggctttgttcgtgtgggaggtgcacgccggccagtccagcgtcttgcgggcggggcttgggccatgtgggcggattctggcagtgcggcggggcgtgcgtggtggagcctgatcgtgtggggtggcacggaggaacgctgcccagtgtgggcggggcgtgcgccgtgccgggttcgtctgacagatcccaggggagcccacgccccacgtggccgccaaggggtgacatgggcactcgatggggtctgggcagaaagccgtgctcccctcacctccgtgcctctggtcttctggtgggtgcattgatgggagtagatgcgcttgtgtccttatgtcatggcgcggctctggagaagccgctgcggtccccagcagagagtagtgacacaggagttctggagggctgtgccgggctgcagcttggagggcagggcggggctgcagcttggagggcagggcggggctgcagcttggagggcagg

SEQ ID NO: 8782 - DNA, 6000 bp, Homo sapiens
tgtggaataattagaaagcagtgctattcccaaactgatgagtaatagtttcatttgcatcttttagcctaatttaaacctagactgtggtctcacagagacagagaaagtcccaaaaattcttgggaatcatttaattttagaggaagaggtgacaattgaaatcatttatttaacaaatctcttaacatgttcccaatgaaattgaagatgagtgatttgtttgctggtacagtccacgtccgtggtggagccagaatacagtggagccaggacttctcctactgtgtttgctacctcttgttcagcctactttgtgatttcctaattgaactatgttaggtcttaaagggtgacattctcgttccattttctagtctcaggctaaggttagcttgcaagtgcttaaagatgcccctctagttaacttgggttgttattatgtgtatggttcaatgttcttcatccatcaaaattattccagggtataggaacatagaataggcaaaataattgcctgagagatggaatttcatggcacatactatttttacaaaacaaaagcagcttggcagattattcatttcttcccagtggtttcttcaatgttaaaaataagttgggaaggaaacatctcattttagcaatctttaatgatcacagcgattttaggaggcgagggcaatgaacccaggacaagagcactgccgcactgccatcttaccacacgtggatgctgcctggtgctcctgtgcctttgtctaagtaactcttgttaacaatgtggctgctatattgaaatccctttactactagttattatttctcagactaacagtactagtaactttaaaaataattgagtctatgattaagttcatgctcatagtcacaacactcctatgaggtaggatgaacagttaccattattcatatttaacaatgggaaacttaaggcacagagaagctaagccaatttctaaagttcatagctatctggtggaaaagttagggttaaaattcaggtcttttaacttcaagctaagcttctttcttacagacatattcctttgattttaacattaaaaaaagaaacttccttgatacttttcttgtaacatgtgaatttgtgaatacgactgttttcttcttttgattacaggcatcatttatcctttacgtcaccccacatagctccttgaacatagtaagtggtcaataaatgttttaacacaagaattgctctttataggatggatgttacccaaggtagggcagtgaggcattatatacaattagtttaattcttttctcttttgtctccactgaagagcttctggtataattagcagatactggtcaggctaattgtatggcctgcacacagtttatgctaccatcaatgagttatcagcttaaaatgccagcttcaattcttcattaaaaacatgaagaggtagtatatttaatacgaaacaaatggtttccattttcagaattatactaaatttcttggattaatattatgtgtcagcttgactgggctaaaaggtgcccagatagagctattgaaacattatttctcaatgtgtatttgagcatgtttcctgcagagatcagcattcgaattggtacattgagtaaagattttctcacccacgtaccccggcgtcatcacatctgctgagggcccaaatagaacaaaaaggtggaggaagggtgaattcactctgaacagggacatccatcatctcctgccctcggatatcattgctcctggttctcaggcttttggacataaactgaactacactgttggctcctgtgtttctcaggcctttgggcttggactggacctacactactggctttcctcggcctttagcttacagatggcagatgatcgtgggacttctcagccttcataatctcaacccaatctctcataataaacttctgtctatctatttccatatctatttattatctatctatctatctatctatctatctatctatctatctattctatctagagttctccagagaagcaaaaccatatctatctcctattggttgtgtttctctggagaactctaatataatctttcttaagttttatcatgcaccaagcactgttctgagctcttcatataagtacacctttataacctcataaactatggagttggtgccattattacgctcatttttacatgaggaaatggagacttagaaaggttaaataacttgcccaatatcttgctgctaataaatggaagagactaggtgtgtttgattccaaaatctaagctattattactactatactatattttacctatagttttgtaactctgacacagcaaaattttcccagatggctaaaatcttccctattctctctctctctctctctctctctatatatatatataatttatttctttatattttttgagacaaagtctcactctgtcacccaggctggagtgcagtggtgtgatcacggctcactgcaacctcctccttctgggttcaagcaattctccagcctcagcctcctgagtagctgggactacaggtgcctgccaccatgcccggctaattttttttgtatttttagtagagacggggtttcaccatgttggctggtctggaactcctgatctcaaatgatccaccaaacttggcctcccagaagtgctgggattacaggcgtgagccaccatgcctggcctatttatttttttgagacagggtctcactctgtcatccaggctggggtgcagtggtgcgatcacagctcactgctgggattacaggcatgagccacagcgctcaaccattctagatattaaataatttcatgtagttaccccaaatacagattatgttctgtcatgtctgactaaaataaaaatttagcttaaggaaactcctttctgcagacattatttgttctagctctgagattgtatctccatgctgcttactttaggttgcaatatgttcccaacacccacctttcaagtttttaaaatggcatttcaattttttcttcagtttgtatgctcagccacctgtgcgcttcctctacttttctaaagtgaagaaaaggaaaaaaaaatggtttctttctaatataatattaataggtctgggtttttggattaatatactgtaataagcagctctctaattgattacaaatcccactggaacactcccctgggggaatgaaggtcctgttctttttactcttccttttatcctctattccatttcagctgagaatccaccaaactaggattgagtcgaccagtgaaaggattctaggcaagacgggattgcactgatgagttccactgcctccttttcagagagacaaacgtaagcccacagactgattactaaggcaggtgtatttttatctgtgctgccttcttattcaagactctaagctagtcatcaacccaatggtataactgatagctgacgggagtttctggaatgggtgttaagtgtgagagagatgaaggcctagtgataaggtcggctctaaatgtagatttacttggattccaatctacttaccagctgtgtgcccctgggcaagttacctcttctgtgactcaacttccttgaaggagggtgtgtaaaagtgtctatttcacacggttattgtgaggattaaataccaaaagtattaaagctgtggttaaactctcagtaaacattagttatttctaccaaagttaaactgccaaatccttgagtcttgatttgtcctcataactgctgtggcatttctcctcttttaaagtcttctgaacagaagttgacgtttgcattttaaaggaactcaaatggcttacttttacgaagttggggggattatatatacacgtgacccgccagggtatgtaaacctggcggacttcaacagtctgggggtgcctgcgctcaaggggtgaagggatgcttagaaactttctcaggaagaaggtggggccttcaacgagggcggctggctacaaagaactaaactttcacacagcaaaggggagccggtctccctgcgcccgcgggcgtcgaacccaggcccagctctcaccacccaaaggcccgggtgcggctgcagggtgacgaaagcgtcagaccccggggctgctctcagctttgggctttcacccggcactctcccagacaaaggggcttctcagccaggtcgctgttttggtttgtcgtcctcccagcccccaccttcgtccccaacttcccctggcgctggctcggcggcgtccctcacatcgtccctccggccgccaccccgggcccctttgttgtctgccgtctctcccagagaggggtggggggccgcgacattccagggaggagaaaccgaggagtgaggggcaaagacgctcttccatgctctcacccgaggagcgcgccccacgacgctggccagccgttctccggcgacggcccgggccgcgcctcggcgccctcgcccgggtcctcggcacgggggaggggcgtggcgcggccggcgctctctgattggctgcgggcgtcagggcgtcgcgccgcgattgggtcgcgcagctgtctggagcgagagcgcgcgaggtggggagggggccgctggaagctgctggaagtcgggggcgggggatgcggctggggcgccggggcggggacgacgggggcgacggcaggacgggccgcgcctgtgcagggcggtcgggggcggcgggcgcgggaggaggtggcggcggagggggaggtgcgagccgggcaccgcccccggcccctccccggccttccccgcgcagagctccgaccgcgggcggcccaggggcgggcgcgccgctgcatccccatcctcgtcgtcgcccggcacagcgcgagcgggcgagcggcgcgggcggccggagcgccgaggcccggccatggccaccaccagcaccacgggctccaccctgctgcagcccctcagcaacgccgtgcagctgcccatcgaccaggtaccccgaggcgccctggcgccgggcgtcgcgccctcgccgcccctccccgccgcggtgccacccgaccgggggcccgggaggagggtgggggctggggccgggcgcccggtgcccccctacccgccgctccctggaagggagggggcaacaagccggttattgtcccagagccccctccctcctgggtgcgcccccagcccgccatccccgggccgagcgggaggtgggccgggcgttgttgccggcgacagcccccggggagggtggtcgtatgggcgtgcgggtgtgcatgcggtccctgcccttcgcggcagcggcgctcggatccggtggtcgggtcccggagcagcccccggtgcgcatggaccgggttgtggaaagggtgcggaaggctgcgctttggggagcctggcgtggtgctgcctgccccgcgcgcgcctctgagcgacccccggagaggctgatgcatgggtctgggtgtgctgggtgccttagagacggcgtcgatgggtgctaggggcccggagaggcttaagcgctactgcactttggggacagtttgcgttggattgtggcttaagagagacagaggcaacagtttgtgggaaggcagacaggttatgaagaaaagtcggagttaatcccaggattcttgctgacaaagtggcaaccttgtagattgatgcagccactttacctccttgcccagccctcagaaaagctcttgacagtgtctagggaagggtggtatttaaatgaggccaatcgagtttgatggtttaaagggcctaacgattactgagaaataaacagcattgtgatgggaaaagcagcgccatttttactgagaaaagaaagtttggaagtattttgttgtgacagtgagatttagggaagttgttaatgaggcgggggctggggggcgggggtgtatagttaggtgattgctctagccccaggctaa

SEQ ID NO: 8783 - DNA, 6000 bp, Homo sapiens
tcatgcctgtaatcctggcactttgggaggccaaagtgggaggatcatttgagcccaggagttggagaccagcctaggcaacatagggagaccttgtcactacaaaataaaaaaaagttagctgggtgcagtggtataccccggtagtcccagctattagagagactgaagtggatggatcacttgagcccaggagattgaggctacagtgagctatgactgcatcactacactccagcctgggcagcagagtgagaccctatctcaataaataaataactccccaaatcagtttcttgtcatataaggtaatacattattaccagacaacatggtcccttatcaaagggaagctaatcattgcatcagtctcaaaatgtttgtgaaaacaaataagcaaacaataaatgtaattaaaccccaagaaatacattaaacaactattgcagaaacagctattactctgaacatcaacactggtataagaactaagcagtttaaactttatgggactattcattaacctaaaatgattcccgtgattttaagtacagagattccgtacttctttttttttttcttgagacggagtctcactctgtcgcccaggctggagtacagtggcacgatctcagctcactgcaacctctgtctcccaggttcaagcaattctcctgcctcagcctcccgagtagctgggactgcaggggcccgccaccacacccagctaatttttgtatttttagtatacacggggtttcaccatattgggcaggttagtttcggactcctgaccttgtgatcagcccgccttggcctcccaaagtgttgggattacaggtgtgagccaccgtgcctggcccatacttctttctttagatcctaagtaagtagtaggtctagaagatgggaaacccaaatcatacaattcttcatttttcatgaatgtggatgcccacctgtataggcaatcacattagtgaaacactgaaggatctcctttagtatttctaatgtaattgcctataaatattgggagtatcaactaataagataacatttggaaagtttttttgagccccttggaccatttatgatacatcaataatggcaggactcattccaaaccacattttttttcctctcaaattatcttctctaatgtttttgcatcatcattgcctcttcctctcaatttatttttaacaagatttttttctaactagaaaatgtacgctcatataggaaatttgaataataaaattagaaggaaaaatacccataattctatcactttttttcctccaggattttgataacataattacaatctgaagaaggtatcttgcatcttttttcaatgccaggggaaaatatctttaaaataattcacttaggtttttgataagaattcacataggtttttggttaacataatggagtgctttaatgcttaactgcctccactgtctttattaggaaagcaacagaggtattacctagcaggtccagttgaatttacaaaattaaataccagcattatttgactccactctaggtgttgtttcttcataaacttcattttaattgatgtgtaaatggtagctatcatgtatagagagccttaatgatataatatcacatcaaccacaacagtaagatatcattatttttactttacaaaacgagtatctgaaatcagtcacacagctgttaagtggtacatcgagaattttagggtatttgaaccctgccctctcagcttccaaggacattctttctactgcagcccaacaccttgccataaatatcgtaatctgcttaatgaggccctgtggttgggcacttcaaatgcccattcccctcttttctaaacaattatcaataatgttggagaagcatttggtgtataaaactttgtttctatgattattttcctttaatagagcacgccttaagattttatcgtgttaaaggaggcaggaacgttttaaaggctatttctatacattgccgattacttgtctcaatgcggttggccaaattataattcaacagctgagcctgaggcctcctgcttcactgttccgtttataaaaaatctcggttcatttgataaatgaaaagtgattctctgttgctaaggttttttaaattgttatgattcactatgttttaatacaccaattcaccattttacaaagtgaaccttttaaagggctagctaagtccttgaactagaaggggaagacaagagagtggtcattaggctttttcttccttttactcactcaacagtcatccagctcctactcatggccaggtaccacactgtgctagtgttggggatataaagatgaaagtccattcttgacctctaagagcttgaggactagcaagagacacagacacataaacagacaattttagtatagagtgaccagcactgtgaccaaagaaacaagaggaagatgctttgggaaacacagaagagagcacctaagctatttcaggaaggtcctagaagcctttttggagattctcaggtctgaactccatcttgaaatgaagcagaagttaaccagcttttccctgacatcctcaacccgaattaattgcttctttaataattaaaagacgtggtcctttaatagagcacgtctaataacagtgtttgcacttacttgtttccatgtctctctttcactgagctgtgcttcttgatgaggagggaccatatccctaattagcctagcacgatatccaaataagcagtaggaatgcaataaacgtttgtgtaattattttaaaattctagtcatgaacttatttccacccatatcttcttcttgcatttatataaatgtgtaattttccttttgattgtaaaaataatacttttaccacacacccatcagaagggctaaaaggaaaggataagaaataacaagtgttggtgaagtatatggagtaatggaaatattcacacattgctggaggcagcagaaattggtttgatcactttggaaaactgtaggcagcctctactaaagctgggtctttcgtatcctatgacacggcaattccactctcgatatacactcaacaaaaatgcatgcatatgttcaccaagaggcatcttttccccaaagcagcactatacacaacagctccaaactagaaaatacagacactcatcaacagtagaatgagtaagcttattgtggtatgatcacaaagagcaaggcaaaagaatctacactcaatgacatgaaggaatttcatgaaagtaatgttgaagacaaagccagttttttaaaaaagtacttacagtatgattgcttttatataaatatgcaaaacagaagcaagatgacaaagggagtgtcatcatctagaaagtggtgcgataagatgcacagctagtgctgccctgtgactctaactccttcaaaagtccgcctgtggcaaacgcggctaccctcccaagccaagataaagtataattggagtgccgaggctaaaaaatataccagtgggactggtcgaatgaggcacttaaaaattgtgtacagcaggttaaggcatggattttttaaaggaatgccacctaaacccaagaggacagctgctgcagcatccagttcatcttaagaatttcaggccaggtacggtggctcacacctgtaatcccagcactttgggaggccaaggcgggtggatcacttgaggtcaggagttcgagaccagcctggccaacatggcgaaaccctgtctctactaaaaatacaataattagccgagtgtggtggcgggcacctgtaatcccagccactcggtaggctgaggcaggagaatcacttgaacccaggaggcggaggttgcagtgagccgagattgtgccattgcactccagcctgggtgacagagcaagattctgtctaaaaaaaaaaaaaaaaaaaaaaattttagattagtcacacaataaatgttctgatttaaaaaaaaaaaggcaaaactctcctttgctgttagaattcaggaaaggtcagttatgagtgaggagtgggtttagtgactgaaaggaaataggaagggggagtttctgggaatattgtaaagtttcttgaacagggtgctgattacacatacagatttcagtctatgtatatatattacacttatttcttaagtaatatatattacttacaaaaggtgtacaatttttctgtatgtgtattacacttagttttttttaagtaatatatcttgagagaaagctagaaaataagacgtttaaaaatttttgaatcacctacaatcccactatccagtgaaaacgactgttaacattttggacttttttccagttctttttttcaagccagtgtgcacacgctctctcctcccctccactcatacacataaattttgctaaattaggttcattctcatttagttttatttctgctgtatttttacataaagttaaactataccattcaatatcctttgcaagcattttataagcagctgaaacatactccattgaatgtatgtgctccagtacatttaatcagttgcccattgctgttttcttattaaaaaataatcagtcacatgatgtctctctctctcacacacacccctacacctctagacattctttaagctctgcattcgttctctatttctctccagaaaggttgtaccgatttacagttccactggcaaatgtgagggctccttgtatcgcagtccaaccccagctcatttcttagtataggtttgtttttaggatggtcgagctcaaagcagaactaagggatctgccgttttgtacacggccgaggcgcgcggctccctgggcctggaacgcgctctgagcgcgccggtcccttccaggttgcgcgggctccggacgagacccagcccagccgggcagccccgcgcgctcccgggtcccgccggcctcgcgccgcccggttgccgtgggaaccacggagcctcggagcgcccgcagactagcccgtgtctgagggggtgagggatactgaggcccaggcatggagctgccggatccggtgcgccagcggctgggaaacttcagccgggccgtgttcagtgattccaatcggaccggtccagagtccaatgagggtccgggtgagtgaccgaggcccggtgcagggggtgtggcctgccgagggcttggcgtggattttggagcgtccagaatttgcccgtacctaaaatggcgatgtcgccttcagccagttctccgcagtgcgggagagcgccttggaggaggggccgggccggacagggagctgaggcgctggcggcctcccgcccccggccgggcctggtctccgcgtggtgctccctggccagcttgttgcaagcgcggcagctgacgtggggccgatctctgtgccgcgcaaggcccatcattgtcccggagaaaccccaaaaataaaaagataaaagccgcccttgctgcacaggctggtcccccgcgcgccgcgagagcgaaggcccaagttgttttgcctctgcggcgcccgccccggcttttctgtccaggatgacgaggaatagcccaagcaatcccacctcccccgtccccacccccaccccagggaacaaatttgccttttcccttttcctagcagaacaagtatgttcctaagcaaggccattttctcgtagaagacattaaaaaaaaaagttaatgagtcctttcaaaccaccatccactcccactggcatgtgccatactagccgggcgttcaacaaaactcaccccttccctgccttctcctcctcccctatatgtaactcttatcataaggtaacaaaataccatgatgcttctgcgtcctttaacttgatgtcaagtgataacacagtttcctccagaacagtttcctcctcctacatcatgatggtagacaacacactgtcaaccaaacccatgtggttttcatcattcaactc

SEQ ID NO: 8784 - DNA, 6000 bp, Homo sapiens
ggccagggaccagaatgctccagacctacagagctggtcaaggttaagtgccttaaacttaccaatcctgggctcagttctcctttgaaaggagaaagtctttgtcctctacttaggcagctgggctagaagtgccttttgacttctaatgttaactaccctccaaagcctcctgggtcaagaaggctctcccaaactccacccctgttcttcctggtcagagaaccagtcagtcattctagtcttctagtccttaaactgatctgatgacttggaacataggatttcactgcaagtctggctttttagtctggaaatacatttgaggtctgttttcgcacagctggatcacctgtttcctggttttattacacaattcagaaggctagaagaggagtttgggggcttggcacctgaaaatttagaccgcattcttattaagtaaaggaagaggtagggaggccgaggcgggcggatcatgaaatcaggagatccagaccgtcctggctaacacagaaaccccgtctctactaaaaatacaaaaaattagctgggcatggtgacatgtgcctgtagtccatcccagctactcgggaggccgaggcaagagaatcacctaaacctggaaggcggaggttgcagtgagccgagatcacaccactgcacttcaggctgggcagcagagcgagactccatctcaaaaaaaaaaaaaaaaggaagaggtaaaaggcaaggcagcatttaataagtacctgttgtatccttttaagtgtttgttgtggtaatcctcacaaagaccgggactgatggaaactccttgctattaaactttttttcttgaggaattttgcttttcaagtgcatatacactattaatattttttacccaagagagcattctaagctaatttatgcagtgtgactgtattaagcattaagcttccttcagagctggcctatcggagatgctactgccctctctacagatgtgtctgaaatgcctgcccaaggatggcccttagccagttaacagctttatagcccatcctcattgcttactgccacccctcagctggggtccaaggcagtactattcagtttattcaccagacctgcctccagacatctacttctttcaaaaattagtgttttccatcaaggagcatgttccagagcatttcccagagatgtcccaaagaacactgtccggtgctgtggcgtacagtggcaacagcattagactaagtggaacatcccagcaggctgctttagaatccgctcatttgactagatacgatgtaattggctgtctttaaaaaacgcgcacacacacacaatctgataggcatatctcatgcccattcaatatggaatgttcttcgcttgctgaatttaagcctgtattttaaggttttgtggttcctcggccacaatgggtgatgtcactgatagaacgaagctgagtttccaagggtttggggctgtgcaagagtaaacactagagcttgagttgttatccagctggcaagcacggaagtctttgaagaatgtaatgtaaaaagggaaaagaatgtaaagctttttgtaccaaatgagagttggagcccagccaacaaatgcttttccctgtgtaaaagtctctctggaagggacattccatctccatggtgcactctgaggggcactgtcaactagagattggccccatccaggtgggaggaacccctttgggatggtgagtatccaatctgctgtgcatttgacaggatctctgaatggctaggtaatggatcccaagcaggctcacaaatttaaatgagggctttgtgtgcagaaagaggaataagtacagattattttcctaccactagatttttggggagagtcaccatggaatgttgacaattacttaaaatattttaagctcccttgctgaattcctgtcctgtccctgaggaatcagatggtcatacagccataggcacccacccgaaatttccctaggagttggagtaatgctagaattgaagaccttctgagtaaagggcttctctgccttctcagaggcaggagaatttgcactggttgtgttaaatgtataaaaagctatatgttcaccagtttactcatttccaatgtgtagatgaataaaatgtagtgtacaaattatttgaaaatcccagaaggaaggtacttttcaaatacagtattttttttaacaaataaacttacgatttttacagcactgtttttgccaagagttgtgaaataacttgtgtacttggggaagtggaggttaaatacctgccctaaagtcattccaccaccgagtcagcactggaaatctcatctcttgctttgccacactattttaagagctgtccctgttggaacataacaactagacagactcatgtagcattagagttggaaggtctttttaaagacatctggtcctacttcttacatgatacacaattccccctaccaactacctatgaagagcccttctgtcatacggagctccatcctgggataattctattttaggaactattagattgtcatactaagccaaaagctgcctcatgtcccggatctggactactatgccttgcccccacatcatgttagaacttgagtagtcctctcaggccttcatcttgattggatagggactcaaacccagctcaagaagatatagtgttaagaattgcaaagcttccaattagggttcacagccccattgggcagataaggtgcctacgcagtgggaatgcagttgggcaggaagatggttcctgtcaattagcaaggaagcacacccttgtcctgaggcacaaagcatagccagcggcaggtgagctggattttatcccccactggtttattcagccaggtgtgcttgtacagtgatcactacacagccatacttcttggccctgttttaactacttgtcctaatgtgtttaaggacagggctctcccgctgggcacggtggttcacatctgtaatcccagcactttgagaggccaaggcgagcggatcacctgaggtcaggagttcaagagcagcctgaccaacatggtgaaaccccgtctctactaaaaatataaaaaaattagctgggcatggtggcaggcacctgtaatcccagctactcgggaggctgaggcacaagaatcacttgaacacaggaggcagaggtaacagtgagccgagattgcaccattgcattccagcctgggcaacaagtgaaactctgtctcaaaagaaaaagggctctccaacaggttttctgcttccatttctgctttccactgggtccaagaaggtttctccctcttcaagtcattgtgcagtttattctgctctacttctctaaagcacaggaccctgttgtttcacatagcctttgcctcaccagtgttgccaaacttcagctccccacgctgggcaacctgcgcctgtgcaccattcaggtgatgatctgtcatctcacaagggctccaacagatgctgggaccgcctttgagacagaatgccaggcacacttctgatatgtgaaagtatttccacccttgcaataatttaagaaacatccgggccaggcgcagtggcccacgcctgtaatcccagcactttgggaggccgaggcgggcggatcacgaggtcaggagatcgagaccatcctggctaacatggtgaaaccccgtctctactaaaaatacaaaaaaattagccgggtgaggtggcgggcgcctgtagttcccagctactcgggaggctgaggcaggagaatggcgtgaacccgtgaggcggagcttacagtgagccgagatcgcgccactgcactccagcctgggcgacagagcgagactccgtctcaaaaaaaaaaaaaagaaaaagaaaaagtaaaaaaaaaagaaacatccaggaatgcactcatagcctgtaagtttttggtgaagctggtcagtaatttttcccacactatcctgtttccttttcccagattcctccgggtctctcaccttcccctctttgcttaccaacactggccatgttaatccttacctactctacactgacacctacatgtgtctatttagaatggatgtcctctggtctctgccgtcttatttcaaataagtgttgatcagtcgggaaacacgtcttggacactgatttctggctagtacattgtgtacttgtatgcaggaaagcaaaaagtatctaatgaaagcagccctcctccggagtttgctgagccacaggaaccataagccaaatcccaggcgcttggatttcttaagaaacagccaagtctttgtgtctgcttctctggacccaccgcagccctggccagaggcaggcatggggcgccacgttgagagagcttcctagaggactcaccgttggccggtgcaggctgcaaaatgtgcgcagtggcggagagacgctcctccagccatgtgcacggcgacaatcccaggtagagctggaatgcaggctgccccgagatccccacctgctgacgcttccccggcaggaatcggttaaacggaacctctagtcatctcggttttagagcggtcttcacgccacagccctccgcgcccaggtcctccgaagttgggacaccgcccacgtttcccccgtgacgcgggcgcgggggctcgggagttgtagtctcgggcagggcgcgggcaccgaggccggggctgcgcggactccacgtcccggcgggcggcgcggcgaggcctggggcctccaggggcggggccgctcggccctttaaacctttcagggctgctccgagggccgcagctagagtcggcgccacgagggggccgagcagggtgcggcggcggcggggcgctccggggaggtgcgtactgggctccttcccttcctccgggcttccaggaatcacctggggactctcgcgtcccgggtcctggggggtcgccggccgcagggtccggccccagccggggtccccgcgcccaggcgagcgggggccgggccgggctgggctttccgcgtgaacccgcccctcgcccagggcgccgatggtcaggtggttgcctgcgcgccgccgactcgccaccgctccactgggccggcacccagcctctccttggcgtggcctcttcggttgtccagcccttctcccagccctggtccctcagaaggagggtaactcccttccagatgttacggtccgcctgcgtctctcagcacgccggtggcatttgggttgaccgcggaggcccccagtgccagagggtgttcacgttctgccgtgggctcagcccaaactttggacgctcagagacccaacgggagcgctggataaggtgttgacccccttcccctcccccttcccggccagttacccactcctggactttgatctctctccaccaggccaggacagctgatggttgtggcagaaacatctcaaggtagctggtccgcccccacttccccatctacctcttgtcctccccccaacaccaccaccaccctggctcccctccctcatgaccgcctggatcctcctgcctgtcagcctgtcagcgttctccatcactggcatatggactgtgtgagtaaaggggggtgcccggggggcaacaggagcttgatgacgcacacaaagtctcttgtcctgtcatagccacggtggtacccagggtcactctgggtgtctcaaaagcctgacttggtgcctgggcacacagccccttgggacaagctggcaccactgctgtccagcagggtggccctgacaaatatacttctagccagggcaatttccagagggcctgtagctgggggcatgctgcaggtgctggtgtggcatcaagccttagggacctcaacttgagtccccagcaacaataatgaggctgaatggggccagaaatcaaggttgaagagaagggtcatggggtgggttgagtggggctcgggaaggctgccagggtgac

SEQ ID NO: 8785 - DNA, 6000 bp, Homo sapiens
cataatttacttaagttcacttttgttgaataggtgattcccaaatgtttgctaatataaagcaagcttaagtgctcagtttttttcactgttttggatttcctagggatcaattctcagggccagaactaccctctaacctactctcctatatgaatggtgcagcttttccagcttccacaaggccagagtcagtgttacctataaaaaccccagccactgccaggtgcggtggctcatgcctgtaatcccagcactttgggaggccaaggtgggcggatcatgaggtcaggagatcgagaccatcctggctaacgcggtgaaaccccgtctctactaaaaataaaaaattagccaggcatggtggcgggcgcctgtaatcccagctacttgggaggctgaggcaggagaatggtgtgaacccgggagacggagcttgcagtgagatgagatcacgccaccgcactccagcctgggctgcagagtgagactctgtctcaaaaaacaaaaaaacaaaaaaaaaccctcagccacgaatgcagattcaataataacttctggacagcacgagctgtgcgaacctctagcgctggtgctaccctcacagcctgggactgttctctgctcctgtgaatgccagcccagccagctgtaaaccagcatggtagagtcaggcctgataaggaatgggggtggctgccctcaattcccaagcactcccccagggttgcagaggactgcatagggtatgccttctctaaaatccctgatttatggggatgggatggggtggggggatggagtcttaccaagcaatgtcataaatggtccttgagtggaagccggacaaagtacagatacatttccaactggggtcagagccgctgcatgccacccctgcaagacagacttctcttgcccttaaacgttcctatgtcctgggcacctcaaaggagaacctaacttaccttccctcaccctcatcttcaactgattatgagtctgtgtctccgttcgtgtccccatccctgcttatctgccttacacactatagccagactggcgtttctcaagcagaattccgaggaaacatccctgttctgttgcagactgtatgtaactactttgcgtgcctgtgaaggccacccaccagccgacccaacccactttattcctctccaaaccccagacgtcctatgccccatttaaatgcattaccacccctcagtctaagcattcccgccattgttatctttactcacactgttgagttttcacttgaattctcacgtgaaattctcatgttaaaatcctacatacccttttaaattcagatgaaacaacccattctacaaaactttcctgattcttccagcactctatccagagccctcttgtagcacatcttaccttttacccccatttgctctgactcatgtacgtgtcttagcagactgtgaaccccttgagagatgggtcttctttagctctactaatggacctcaccttgttcattgcctggtagatactgacgccagatacgcacagtacggtcatcactacaagacgccaggcgctggccactcgggtcaaaggccaagctccacacagtggattcatggccctcaagggtggcacagcatacccagtcatcctcttcctcccggtacagcttcactgtgtcatcatagctggcagaagctaagagctgggggaagagtgaaaggaaacccaacatgtgtctgtgtggcccaggaagcaaaggacaggtcagttccaggtatctgcttttattttattttattatttatttgagatgaagtttgctgttgttgcccaggctggagtgcaatagcacgatctcggctcaccgtaacccccgtctcctgggttcaagtgattctcctgcctcagcctcccgaatagctgggattacaggcatgtgccaccatgcccgctaattttgtatttttagtagagacggagtttcaccatgttggccaggctggtctcgaactcctgacctcagatgatccacccaccatggcctcccaaagtgctgagattataggtgtgagccaccacacccagccggatctgtttttataaagggactaatgttttttgttcacagatggaactctccgtaaaagctagattaaggctgaaaagcagaggaaggctgggcacaagcctgcacaccagagcccttcccacaagagtccctgcttgactcttacctcctgacttgggtgccaaaccacatgcttgacatcctgtgtgtgggagttgagaacactgacacattcatactcatcctcttcatcaactgtgggagagaaaaaggggacccaagagccgaccctgtcagggacacagagggggctgtcaggtggttcccaatccacctggagggacctggcctcaccttcccagacccaaacgctcttatctcggctgcaagtggccaggaggttgccagatggggcccaagccactgacttgacctcattttcatggccctcgagagtggttacacactgtgaaaggggaaagaaaatgagaattaacagcagctaacacccctaagccccttcccatgggtacagcccaactggcgcaggttggctcaggttcctgaaccagccctggggaggaaacaggcaataattctggtcccaaccagcctgggtacctcaaagtcatcctggttcttcttccaaatgcaagtggtagcatcaaagctggcagaggccaggtaattaccgcagggggaccaggctaccttccgcacggtgcgctggtggccttcagaaaggacagacttgcagatccagctgtcacctaaaggcggagcgcaggccaggctctggagctgggtgcagcaccatgaagccattcaatatcaggggctagcactggaatcaagctagtgggggaaagctcagggagtgtatttcacagcttttacaaagatgcaaatgaatctacttcgtctggaagcttttttttttttttttttttttttttgagacggagtttttgctctgatgcccaggctggggtgcaatggcacaatctcggctcactgcaatcttcgcctcctgggttcaagggattctcctgcctcagcctcccgagtagctgggattacaggtgcccgccacaacgcccagctaattttgtagttttagtagagacggggtttcaccatgttggccaggctggtcttgacctcttgacctcaggtgatctacccgcctctgcttcccaaactgctaggattacaggcgtgagccaccgcgcccaacctctggaggcatctttctaaaacaaatctgatctaaaattgctattggttccccaatgccctcgggataaaatgtgaccatccagtcgcaagttactctgaaggccactttcctaacacctctcttttcccattttcctgcctctgcagctaacacaattcccttgacatttcagcttgtctgctgacgtttttcctcccaacagtcgcagacttctttgcctgtaaagcccttctcggcgtggctaacatcccactctccctccgccaggaacaggttcagcctcccctgcaggctgagcgcctgcactacgcgcaggctgagccctcagcgctgagggccgcgcaaccaggctgggccttaccctccgtgccccagatgcggattctccggtcgccgccgcacgaggccagcagggtccccgcggggttccaggccaggaaccagcagcgggagtccgggtgcgccgggacacggcccagcagcaccagcgagtccttcatgtcggcccgacgcagggggaggtgggggcgggcagagtccgctgagcagacagcgggtctcaccgcgcgcgtctgcgtaccgcccactccaggcttccgcggccgacagaggctcccgcttccgccggaggacctgggtcgccccggaaactcaactgcccactgctgcggccgccataccctctgggagttgtagtcgctcccctcacctcggcagggaaagcatcgcgggaccgcctcgaactaccagtcccgtgaggccctgcgcagagccggcggcgcgcccaggctgtgacgcgcgcgggggacggggcggggagccggaggaggcggaggcagaggaggaggaagccggaagtgcatcggccccgggtctgtccgggcgttgcgggattggggcctgggaacgctcggcccccggcagccgagaagcccgtgactgggctgagcagcaccatcccagccctggggcctgctgactggtgaggaacagtgggcggcgtggggagggtcttttctgcgcacaggtcgcaccccaaaccgccggtcccagatcacgggtccccgatccccgcggcccagcccggtcctccgcccctcggcatcctctggctgagaccctgactccgggtctttgctctagcagtagccgatccccgatccctccgccccccactcgagtctgcccagaccccatctggcccctggccctcttcggttgtcgtcccgcagtcccattccggagtctcctgtctccgccccccgaattcccgcagccctccccgtctccgtcagccccgggtcccacccccctatcctctggtgtcaaccctgacagcccagtcccggcttcacctgcagcgaacccggagcgttgctatcctccaccggactgtcaggctctgcgcgccccgcggaggtcggcggcgaccagcagcgactgcggagcgacggcgggcggccccgggcatgtacgcccccggaggcgcagggctgcccggcgggcgccggcggaggagcccgggaggcagcgctctgcccaagcagccggagcgtagcctggcctcggccctgcctggcgccctgtctatcacggcgctgtgcactgccctcgccgagcccgcctggttgcacatccacggaggcacctgttcgcgccaggagctgggggtctccgacgtgttgggctatgtgcacccggacctgctgaaaggtgagggtgctgcgcgctggcccttaaagcctcggtgggggacagaatgtgttctggctgaagcagagatagccagggaccagacacttggttgaaggaaacggccccataactgcctggtgttcatgcccaccaggtggctctgtttggggtccggcccctcattaattctgatgttattcagctaagcacctactcctcacagccatgttaatccggactgctgctattttaggattctgctggaggaaggacgctgtgtatcgagaaaagataagggtgctaggtatcacagttagctggcctcttctaaggatcctgtgaaatacggaaaagcttctttggggcagactgattaatggagaaaaaggaacttttaatatgactaggttttaaaagatatcttagagttctatggtaatcggatgcgtattagagaagaagggaatctgtggcattttaggtaatcggaagaccgttccattgccacccgcagtacaacagtcggaatgtggctcttggaaccattataggtgtgcctgacagaggcaaggttgctttgttcatcatcatgctttccggccagatagacagcagacgatgggagggtcctatgggccccatagtttatcctgcccattcttgtctccagtaaaaattgtgaagtgtgaggacaggactggactgtatcacctgctttttaccctaacaatgatcaatgtaccccaaacagtccttagtaacagcatagttcatcaaccccaaggtcttttgagccatcttgaaggtcttatatcctctctgtgctatcctgtctgtgctattccctggctgtgatgcattccagatgtttactgcaccgcctatcagaagcacttcctgttagatatctgcgtgttacctcctgaagaattcaggcactgggatttggtgaaaaggtccaagttccccgctgtgcatcggaccatactct

SEQ ID NO: 8786 - DNA, 6000 bp, Homo sapiens
ctggagagattgttagaagtcatttgtttcctgccttgatttttcttggaatttggaagaatcactctaaagtttattgaaaaaacagcagatagaaagtgcaaaaacacttgtgaaaaatgagaaagaatagacctactcttccagttagtaaaatttataaaattacaataatgaagataaaatagtatgtgactgtcacaggaatacacaattacctaaatagaaaggatagctcccatataaacacatcataataaaaacttcacatgaaagtggaaacaccaaaccaaaatggaaaagaggaattatttaacaaatggtaaaacaaagtattggatagcttattagcagttttggagggagggtagaatagcaaattatatagatgctttggggtttaaatatagagaaaggaagagagaaggaaagacaggtaaattaaaataagaaaaataattagaattcaatgtcaggtttctggcctaggttaactatttaaacttttcaactaaaataccattaatgcttcttttttttgagacagagtctcactctgtcgcccaggctggagtgcagtggtgcaatctcgactcactgcaacctccacttcccaggttcaagtgattctgctgcctcagcctcccaagtagttgggattacaagtgcctgccaccacacctggctaatttttgtatttttattagagatggggtttcaccaggttggccaggctggtcacgaactcctgacctcagatgatccacccgccttggcctcccaaaacgctgggattacaggcgtgagccactgcacctggcctaccattaacacttctattaaataaactgaaaagggggagaaactggggaaaatattggccacagatgacttagattattagtgtttatgttatttgaagagtatctctaaacagatcaccaaagaagaaactgaactagtaagtttacatgtagaaaaatactcaacctcactgaaaatcgtagtactgcagatttaaataaggtaccattttgtgctgttaaattatcaagaatattttaaaattactgatggggttatagtgaagtcattattattcccacattgctgataatggggtaagtagccattacccttttggaaagcaattgttactaacatagatatcaacaacatcaaaaaatgtggagtttgactcaatggttctactcctggggatttatcctaagaaactaaagaatggaaaatgttacatgttatctggatgtgttattcattggggtatgagtaattcccatacctggaaactcataattcagggtgcttcttaaaaatgcattcttggaagttatgactccccaggtctgcaatgatgcttaatctgtatatttattaatcatactaggtgattctaattagagttgtaccttttaatgattggtatactctaaatgtccaatcagtaatggcaaattgtggtgtctctgcatgtgaagaatattagctagcttgtaaaaaaactttgttttagaataagacgggaaatgaaaaaattttgtctatactaattacaagtaggcaaaagacagccactagataggggaactagaagggaacagggaaaagtgaaatcaattaaatctgttgggccatcagctgaatttgttcataagggattttgtttctttagtcccatatgcattgctctctttatgtaatttctttaaaagtgaatttgaaattattttgaacttttcttccaggcatgttactaccagattcagcgtgagaagcttaactaggctgcataacagcttgaaaactggattatctactacagagtgttataacaccatctggagtcttcctgtagtggcaaaaaagaacagtgttgaaattggaaaggactttgtgttatttaggttgttagaatgagccttaccaataataagagccctgagcccagaaaaaaggactgtatagtttaaagggaggattgaaagggaggtaaaaaatcagattagaccagttcttggcctatgataagttccaaaaataccatttatctactatttgaaaaaagaagaggatatcccttcctacagtaaagggtatgtcagctacatgaagttgtaagaaaagcttccagtagagcttcttatattaaagaagttgatggatatttttgaatttctggtttgcctgaatccacctgcagttaccccgatccgtttgcaagaaccagatcgtacttgaaactatagtggccacactctgccttcctgagtcccttccagtcatgtgtgcatcatgtctctttgccaagggaggggagaaaggaacttttaaactgcagttttaactttttctaagctgtttcttgatgggagaggttctgtgcaaaactaccacattctgtccccaaaatgtggaatgcatccaaataggagtcttctgcctcttaacttaaaagaacataggaattttgtttttggtttctttatcatgctacagagagtgaatacactggaattcagacaccgactctgagctgctaggaacctcatttgtccatgtgcaaacgctgtattccaaggcctgtgaatggcagcctgaggaagttttgcatgcaggctgtgttttcgagcaggactaacaactgggaaataagcaaaaaactgcatcgatccccagcctggtgttgttcttccctatacttcacactgaactcaggatgggaagaaaaaggaaacaagctttggctttttccatctcaaaagtattgtggcacctcaacatttcagtgttttgctttttaaaaaatgccctattgtaagttgttggtttatactgtataagtaacactagtagctgttttgaataacataggtgctcttcctcatctcatctcctacaccgtggtgagcatacagagtgtcctgatttgtgttaagtgactgagaagatgttaattacttttgaaaaaggatcatggtttttgctctactttataatcaagacaagtgtttattaaaatactgttttggaatgttggctgtaatgtaacagcaattttcataataaaaggcattcatctttatgtggttgttttatgattgtagaagaaatgaacagggcagcctaaaagatgaaaggaaacccagacttagtatttctttagcccacattgtaatccatgcctctaagtattggcctcaaaagtccctctggggttttagaaatctctgtctttaaaataaacgtaaaccaatagttatagcaccctttctagcaaagagcaaattaactttctgaccccaataacccaaggacacgggtctccaaagaaatctattatttctttgaataaaaagcatattttgatagttactcgttattttttttcctcctaaacagatcgagggaagggaaggtgaggctttaaaattctgcttagaaacgttagatattaattatctcccagttgtaatgttttctcaagaggcctttccatcttgttgctgcctctaccagaatgtgcctgtcctctgttggaaggggaccaacccttaaaaatccgtttatgttaaatactttgcatttacattggagattgttttgagtttctgaacaaacacataaataaccacatttgcctggtaaagccaaatttacagaatttctgactctgggcgggggtggataatatgtggaaatggacaaacaaaaactttgagacaaattgacccattgagaagatttccaatgatgataggctgtctctgttctaagaaaagccatgttacaattcgtccttttactggagtcttgaatgaaactgttcagttactttggattcttcctactatatgcttttcagatagcatattaaagttataaattttgaagtgtattggaagaaaaaccctaaatctccaggccaatgtttgtaaatagaagtccttggcactcctgcagcagtttacaatggtcattcacatgcgtaatgaatgcttacagcagcccaaggatgcaggtgttatccccatttccccccatttttcagacaagcagtgaccaagatttgctcactgccagagctgggactccagcctagaacttccctactccctacttccctagaagtccagtgctttttgctactacagctgccagagatgtcatttcatagctggttatgtattgaaagttcttaaaagtgagttaaaaatgaaaatcttattgaaatcaagtgcttttcacaaaatatgctgtactcaaaacacaaatgtatcacattcccaacttgtgttttcatctatgatggagagataaggaaagccatgtgattaatatgggtagaagggctgaggaccctctgataattgccatttggtctctaccttttgccttgctgtcagcaataccttcctctcctttctgcaatatccccttccaaatgctctccccactgagcactccctgcagtattaagttttcagataaagaagtagctcctatctgagacagaaagcactatttgttaggttcagaacagtggcttgggaggggattgaccagaaggtactgtttttgatgggtttctattattagctgaacagtcttcagttgttttctcaccataacatgagagatttaataaggttagtaggttattggcttatttccggtcctgccacatttttttctttcattaaaaatgctatcttctgttgtggaatgtctgtcatcttgaactaatcaacaaaaatactatgtttttctgccgttaactatgtgttggcaatttgagagaaaatactagaatgtaggtttgaaaatgatacaaattagacttcaaggaatacttaagaagatttgtggcaggaaaggcttgtgagtaatttagttgttaggctgggttaggcatctgtggattacatcaaagaggatgtgcagagattttatcgggagcagtgaggtgactttggcagctaacaggccactagtatcctactaaagcttttgtctggataggagcaacatgcatgtttacagtcttgcaggtaagagaccttggcaaataatcctcagttaccagaagatgtatccataactgcctagcttgcctgtcagtttttaatagctaaagatataaatctgggtaatctaactcaaatggcttagtttcattttaactcaaatgatatggggaattttatgatcttgaaagagcaggttttgcttcgagaagccatttcttcagtatggaataatgagttgtcaggaagattgagtacaatgggcatttgccctggtcctaatcaacagcatttggacccagaggaagccagctatttttgtaagggccatttctcatcattaagtttccaagtgcttttttagggtttgtctagtaaaaagcactattttgaaaaacaagcatagtaagggtagggggttgtggcatttaatagtacgttttaaaaagctaatggaaatacttttaaaacaagatttaggacaaattccttaggcatcagtcacactaatgcatcttctgagtcaagaactggctatcctttctgtgtactcagtccggaattgcatgtggtgggtgcttacttatttgcagtctcaatcaagaattctcactctcaagatagcagaaatagataagcttcaactgacaaatttggtacagaagtcatggaaaggaaggtaagtcttttgccaggcatcatgccaggcatcagcatctttcaggactaaggaaacaaaagaggaaaactcgattttactacatgttaactctactgaatacctccttgaatgtcagattccttatctgtaaaacaaaggttttgcatttgattatctctaagatccgcttctgcccccagttttaaagtttgatagggaaagaggtttaagtcaggataccaggccagggaggaaaggaagggagggcacaggcctctggagttcagctgcctc

SEQ ID NO: 8787 - DNA, 6000 bp, Homo sapiens
tcatgacgattcttcaaagacacttaaaactcccatgtacttagtatttatattttttacactgcctttttgggttgattgattgttttgtaggaaatactggaagtggaggaaaggtactatgggaaggtggataaagcataaactggtgatttggaggcttggagcctcattctggttctgcagctactcagcctcgacagctattagcttcctcagtgcatcctcttcctcctcagaaaagatctttggagagtcccttccgattttcacatcttacaccgtcacaaatcaggagtagtagttaccttgcagagaggcaagtgagcaaactaactaaaactctcaagtgcctccccacaataaaccaaaacccagcaagcaccgtgcatcataccatatattattgatacatacagacatatgatacatatgtcacatatgtgatgcacatcacacatacatacatgatgtacatcacacacaatacatacatcatccatatttatatgatatatacatcacacatatgtacatatattctatatgtatatctatatttgtccctatagctcatgtgcaatatccactaagtatcagactttacattgaaggatacatagtatctacttagtgtcagactctgcactgtaggagattgatatatcagatacagagtagagattcaaacaaagcgtggctcctaagccagactcctccttatgtttgagtcttggccatgcctcttgcaaactgagtgactttagacattttacttcagctcatttcacctcaattttgtcctttaattgggcaccagtcatacttcctacctcatcatgctggcattaggattaaatgagataatatgtaaagaatactcatattagtgtctggtacactgtaaatactctacatcaccactatcatcacctagagctctataaaattggggtttctgtctcctctccatgttatatgacatctgaaggtcaaaaagaataacttgcccagtgttgtcatgggtcctgatagaactgttctggccaaagtaggctggtgctgttcttcatggtagaaagctgtcactaggcaatgtgtcccttctctctatacgtggccaactttttctttcaagctgactccagcttcaatccagcatccagtcccaccctctgcagggaggagggatgttttcttgtatccttaaaggttaactggatgtgggaaggggtagcaggaatgacgtcactgtctacaggcaaatgaaggtgcagagggaaatagagagaccatctgctgatggctgcagaaaacttagattcctttggaaagaaggtgggtgctaaatcccaggtaagttggaggggatttatcatcttatgataaataatttagtttgggtcttagttcaaatcctgggagatcaagcttggtaacctttgcaatttcttctaaatataagtttctaagtctgtgaatgatgacacggtgcacccaggctagcattctcacaggatgccgtggtggacagagtatgaaaacctcatcaggagtggtgttctcattgaggccagtggttcccaattggctacctgtgaacctgctggcctggaaagttgattttctccatttgtgacaaaatgcaaaaaataaagacaattatatttgcattagtttgtaacatttttataataacctatgggtataatgcaattgaggtgtaactctaaactagatctgtgaagagaaatgagtcctgtaaattgttttgaaattcttcctttccaccaaatccagaagccttagaatttctaatgggatccagccttctacctggcagaaatagtacatgtgagatcactagtcgtgctgcctggctcattgggaacaatcagtcctgctctgccatttactagtgtgtggcctcgagttatcttacatcgttgagactcagtggtttaaaactatagtggtttatttcttatgtcatatgcccattgcaggttcccattgcttcacattgtcctctctcagagacacaagctggaggagcccccattgcacctcttggaatcttgccagttgtcacgctaaggagaggagaacacagtgggacatgggcaggattttaaaagtttccatctggaagtggggcatactattccctgcacattttatggccatggccaataatatgaccacatctaactttaaggagggcaggaagagaaagtcttacgaagaagtagcagtaagatcgaatgtactatcattcacctcatattccatttcatttattttagctcagcatttttactgattaagataaatttacatgttgattctggtatgaattttatcagctgccaaaaatttcaactccatggttatttccctaaaaacttcttgtagcttgatagtgaccccccgattggtatgttgttaaacagttttgagtccacttagctgaattttctccataaggtgatcatgagaaatgttatcactttttttttttttgctaaaatcaagatacattattggtatatttggcctttgacttgtcaatataaggactctatcaaaaaaggaaatgaggtgggtcaggatgaagatttgatattctgtaagttgggaataatataaaataaaagcctggatttttagctttcatttaaacatagaggcaatattattttaatcacttttgctaatgtgacagggtaatacattggttggactttttagttgagtatttgggggatcttgcagatggttgaaaagctgtcagtaaagtaccagatcagctttcggaatctacagaaaagacccatttctctgagcgtggtaacagtaataatagttaacactttcatggcacttagtacatggatgttttgggaccaggacatgcaaatcaatatgctttttccccagcattaatcatgttgctctgcctataagctaaggtgctggaagattatagttttcctttttagcctggaaaaaatgaaaggatcttgtattgtctctgccataatatgcattttaaagattaaagactaagagaatacttttagcaaggaaaattatctgaaacatgcagtaaccagcatccagaaaataaaaccacttttaattatcctatatttcaaaataatatgaaatacacaaacaaaggggttgctcaggcaaaagtacaataaactgaaatgtgattttaattaactcacaacctttttacacttcatcttgcttcatttgtgtgtgtgtcttgatggaaggcaatgaagagcactatccactagtccaggatttaaggtaagagaagttagtttcaggaaagaacgcaactccaggggcacagaaaccacctgaatgacgacactagtaccagcagagggtgctggcgtggcacaaaattaagaattttcaagaggaagaggtcttagattgaaagacagcaggtgtgaggaaaaatgtaataactctatccacttggaggtctgaattctccgcttgcagatctgtctggggttcagtgatttcctgcaatggccacatgaattttaggtatctcctgaagcagaaaagtgtgacatttgcttctgcgtttgaacaggacagggagaagccgtgcagtttgccttctgtttccactggaggacttttagcaatccctggcgtctgtgacacctacagcagaagttcacatggagtccttactttaatttttttaaaaaacaaaacaagctatttttgtgtttactaaaaaaaaaattggcccagactgtcaatccaggggaatcacattttcttttttcatttggccaccttaaaaagaaggtaacaggtacctgggaacccacaggtaatagagattgtgaaaggtcaggtggaggagacaaggctggatgcgctttattcagcggagtgcagcctccttggcggtcgcagcaccagccagcccagccaggacgtgtagaagagcccgccccccccatcccctccgaagtaggtcacagcgaatgctccttttatgcagagtcccctgttgcgattcctgccgctagcagcgcctctgccaacctgggcttttgaactgttctttcgggcgttctgggctgggagtcaattgacccactggattcgaatccagactttctgggcctcagtttccccctaggttcaacgacaggggtggacagccttacaccaaggcctcttcccggcctcacacggcgcggccagacgttccttagtggtgcggcaaggccccgcgctctggaaagggccggcgagaatgagacagctgggtcagcaccaaggacaagggccccgggtccgcctggcggaggcgaggtcacttccaggcgaacccggctgctgagcaagcgtcgggcgcagggttccgtggccgggcgggagggcttggggtgccgggagaagcgctgtgggaaggggagcagtcccgggggatgaggcaaggccgggccccgcggcggtctcgcagattctgcgccaagaggccaaaggtggctgctgcgagcgcgccgcccctcccttgaggcgccctgccgcctcccgcgccctgccctgcccgggccttggggcgcactcggtgctcccggctctggaagcccctcaaagccccgcttccctcactcgtggacctctccagcccctttcctgccccagcgtcgcctggctccctgtaccagggctgcttctggacacacccgtgacttcgacccactcctgggggatggggtcccgcatcgtcttcctgcaacccccatcccaactccctgcggggaaagaggccccactccccgatgctccagagccggggccgccaggcgccccgccccccgctcgccccgccccgccccgccccgcaggccccgcccgccgttgcccggggaaccgcggatcccgcagctgcaggaggcgcccggcccggcggagcagccctagccgccaccgtcgctctcgcagctctcgtcgccactgccaccgccgccgccgtcactgcgtcctggctccggctcccgcgccctcccggccggccatgcagccccgccgcgcccaggcgcccggtgcgcagctgctgcccgcgctggccctgctgctgctgctgctcggagcggggccccgaggcagctccctggccaacccggtgcccgccgcgcccctgtctgcgcccgggccgtgcgccgcgcagccctgccggaatgggggtgtgtgcacctcgcgccctgagccggacccgcagcacccggcccccgccggcgagcctggctacagctgcacctgccccgccgggatctccggcgccaactgccaggtgagtggaagcggcgggcgcggtgcggggcgctggtccgggaccagcagcctcttcccgccggccctgctgctgctgcccgacaatgggcacgcctgacacaggctttcccactttgggaagaagatggatccagtctcttggcccgcgtggacgcggacccccgggccgaccctgattcccttacccgccctggttcccgggcggggccagccgggctctcggggtgtgccgctccggggctcggcacttctcgcgcggggctctagacgctccggttggccactgagtggcgcgcccctccaggccgggccgagccaagaaccacttgagcggtgcccgccttggcagcgcggaggagccggctccgagcgtccccggcgaggtgttcaatgtccaggtggtccacgctccacgtccggctggaccctgtgtgtgtaaagggtgtgcggtgtgggaggcaggtgatggtgggccccgtgccaggtggtggggcactttctccttctcttcctacgcccttgagggctgtgacaaagcagccagaggacgaggagggcagctgcctcccctcggcctgcgaccagccctctctaagcttaggagcagtgttggaacagtcggaggcattcgagggggcattgtacgtg

SEQ ID NO: 8788 - DNA, 6000 bp, Homo sapiens
cccagagaggattcagggcactaggaaggaggccctccctgtgcctggagcaggagggagcacttcaaaaaggaaatggctttgaaggaggagaaagtcagaaggaagatgtctcaggaaagcaggaacatttgaggagaaggagagcaccaggtgccccaggggtgactagggatgaagctggagaggctcatgccaggtttagccccttgaatgtgaatgctaaaaacctgttggattttacagcatctgggagctctatcatttgcttttccaagtctcccaccaatccaaatgatcccccaggggtaactaccttctaatgtctccgctaaccaccccacagtactctcggctatcctgggtagtgtgtgtgtgtatgtctaggaaatgcagacctcaatgacattggagtccgagaagccagggaggcgctggtctttgcagatgaccccagcatcctcatcgtgcgtacagtcactgttcccccagccccgggaggcacattcagtcacactctgctcggtcccactgcagctcaagttgtccagccagatgcggcctgtggaaggggagatgaagggacagagaagcttggggagggaggatgggggagtaatggggatgtagggaagagtgagtgctgaggcctcccacttggccatgatgatcccatctttctggtatgataaggggtggagacgggacaggggaccctggcagggaataggaagggggcataagattgagggaaaattggtgtgatctggggatactcaagaacctgatacggtgaataaaaaaccaagaatcaaccctgaagttctgatcagtctctacccattcattgatagctacaattaatcaggtacctactgtgtgccaggtgctctgccatggtgtgcacatatgtgatcattcttagaacagagctgccagaacactgttttatataaagaaactggggtttagagaagctgagcaacttgcttaagaccataaagccaatacgtgggggcttaggagtttgatctatctgtgaggcttggatgtctaagatcctttcttcacatccttgcattctctcttgtgcccgccctgtctgtgctgccatatagccccttgttcttctctctgtctgaaacctgttttttttttttttttgaaacgaagtcttgccctgttgcctaggctgaaatgcagtggcatgatctcagctcactgcaacctctgtctcccaggttcaagcaattctcctgccttagcctcccaagtagctggggctacaagcatgtgccaccatacctggctaatttttgtatttgtagtagagacagggtttcaaccatgttggccaggctggtctcgaactcctgacctcaggtgatccacccacctcagcctcccaaagtgctgggattataggcgtgagccactgagcccggcctgaaccctgtggagtatcactggcttcctctcagaattgggcgcagcctcaaaggtcatctgtcctagccaatgttcaaggacatctcattcacatcccaacaggacttacccagttgttgcggagacacctagctcctgccccaccagactgtgtaaccatcaaagtccttgtgactcttcatgactttcccctaccacatctgattcattcctttggtgccaaccagaaaaatccttcagccacacgactgtccttcccatatttaaaaacaaccattacgccattgctatgcaaggtttttactttccatatcaatcccctgattcttcagcaattcctccttgaaacttggcttctgaatctttcacatctaggcagctctcctctgaaagtatttccattttctactgtccctcttaaaacacagcatctacaaatgacacttaattccacaggtggtctagccagtgggaactggggaatcagctgcaggttgcacctgcttctgtccatcattcccactgtgggttcataccatgggcacagtcctaggcctcacctagggaactgctcttaagcctccaccacccacactcatacttgtcctagattttatacttgtccttagacagtaccaccttgttagttttagctctggcccataacctgattttgttagctgcagtgtctgtgaccccttgtgactttgggacatccagatatcatttacctgctcttagcgtcccatgagactaactgtactttatttgtacagggctcacctgtatctgggctgttttgtggatggctttgtaggatcatacttttgcagcagaaaagaacttagacatcatctagtcattttgcatacagggcatctgaggctcagagaaagcactgactagcctaaggtcacacagctctgggaagtaactatgttgcttggtttgtcatccatggatttactcaatgctggctgttcttggtgtcgtgtgtccctatggctgtgccatcctcgtgttccctttccctgcactttggccacacataggaaatatctaggatatgcctggatcattgctcacctgttccagggccatatttggcactgtgggtccagcctgtggcctctgtgaagcccagctcccggcagaggatgtgggcagcctgcagcgtgaagtcatcatcgcagatggtgccccattcaccagctcgctgtatctccacgcggccctcgtagggcttcctggggaagccagccagccggaaccgaagcccctggctcccggccttcttctcagggcccgtggaaggggacggagaccccaagcacgaactgcacagcaggcacagcagcagcccccaggggctccactgccagacactgacaggtcgcatggcagggaaggcctgggtgccccagagacaaagtgtgcgtgagagaaacagattgagtggggcccagagtcagaaagagagggagaagtcacgaaagaaaaacagacactgagtaagacagagacagcgagagacaacaggagagaaagagccccagggaccaagagacagggagagaaacacattaaataagggctgaggcacaggtcatagaggcacagcctgagagacccagagataagagacaactatgagagatcgagagtcagagaagggtcaataaaaagagatagagactgagcaagagacacgtagagagagaggaagacccagacagacaggatgtgagaggaagggagactgtgggaatgagagagagaaaaccagaaagacacagaggagagagacaacggatagaaagtgataggcaaagaactaagcactcagtataggggaaccaagcacaccgcgggtgagaaggagagggattgacaagagccaaggggcggacgtgggagggatccagatgaccccatttactcagagggaggacagacagctgtactgattgtgcagagaggcacgtaaggggccctaggcggccctgggatcacagatcccctgaatgggagcccagagtcctaacccagcagattcccaggcagggaaggctggcaccaaagctcgcctggagaacctgctgcacgccctccccaacacgcaggctctcagatgccctgcagggtcaagaggcccaggagggccaggcctcaaggctgggcgggggatggggtagggttgtcccagcctcctgccaacaccaccatccctgtcaccgggcaacgggaggccaggcgctatggctcctcagccaaggccttctctgcctagggctgagaacagcccctctacagcaagcccccgtcaacatgcttcccccaacccaaacaatcaatccaacaaggcagctttgttctgggttggggacccaggggcagcgcctcccggaggagccccctcccttagggcgctcctggcggccctgttcgaacacccgtagcccccgcctccggtatgtgcctcctccgtgtactctgtctcacttgccctttgacaagaatcaaactctcagttgggtggcttcccctcgactccatcccacaccacccgttttccctggtccctccacatcctctccatcccctactcattccctctgcggttagcgtgactccccctaccttggccgagcaggaccctaagggctgggagaagagtgctggtcctggagatcagtcctaggacttccaaaaaaaaaaaaaaatgctcggccaggggagactggacccccctctctcccccttctccgttcgtccctcccacatccccctgagccctcccacattccgccttctccttccattcctcccggccagttccctcctctcctcctctgggtcctccctccccgtggagctggccactgccgcgccccctccccctccctggccctcccggctcgttcaatgaagctttctcttcccgcggcatggaggccaggcctctgcggtcagggagctgacatgcaagcggcggccgggcggcggggcggccccggtggtggcgggaagcggttcaaccccagccctccctccgagtcccgggccagcggagtctaaacagcccggctcgggcggggctgggggcgggcccggccagggtaaataaagccccggaggcccgtgtgggtctctccggtgcccggggcgctttcggggtgatgtcatggctttcactctgacgtcaccttgggcatatgacgtcacgcgcagccaccacgcccagaggccagggccctcgcgccaaaaccgaggactttcggtggagccactggcgcgcccccacgacggcgggtaggggcctggggtgctgcagctcccggctaatccgggggtctccaccattccttctcgctcctctccctcaccccaccgcgacccccccagcggctgccggcgggggccggggaggggcggaaactcctccagggaacccggccccgcctcccgccccgcctcccgccgcagggccaggaagcgcggaaggaaccgccgggggccatggacggagcagtgatggaagggccgctttttttgcagagtcagcgctttgggaccaaggtagtctggcgcatggatgccgaaccttatccgggctagtagtgggtgagagagcccagaaacagggagaggtgggcagcgggctggagagcggcgccgggagttggagagcctgtgactttcccgtgaagttgctttgcacactcccgggaagcgtctgtagtctaggggttctggtcctggggagacggagtggcatcgtccttgggaaacttcgcccccaaccccgtttggaagccccagatcccaaatcgacttgcgccgcaacctccttccccgtcgggacccgggccgcctgcgcacgccactccctctcgagcactctctctctctccctagaggtggaggaagacctgggccgtgctctacccggccagtccccacggcgtagcgcggctcgagttctttgaccataaggggtcgagctctgggggtggccgagggagctcgcgccgcctggactgcaaagtgatccgtctggctgagtgtgtgagtgtggcccccgtcaccgtggagaccccccctgagcccggcgccactgccttccgcctggacactgctcagcgctcgcacctgctggcggccgacgcgccgtccagtgcagcctgggtgcagacgctgtgccgaaacgcctttccggtgaggagctgcggcgatgcggggtgggggcagttacagaggcagagaaatggggctgcctcagaccgacccccgctccccgctgaggaaattacgggtttctcgatgctctctactacagaaaggcagctggactctggcgcctaccgataacccacctaagctttctgccctggagatgctggagaactccttgtacagccctacctgggaaggtagacgcctcagaagcccgggcagggatggagtgaagaggaggagggccgagggcctttgggaagtgggtggatacccaggggcccatggggaagtaagaagtaggaaggccctgag

SEQ ID NO: 8789 - DNA, 6000 bp, Homo sapiens
tacccaccgcgagcgccggcgtcgggctgggggtgcgagcgccccccgtgcccgccccctgttgcaaacctgggtccggaggaggctgggcggggagcaacctcggggggcctgcctgcctcacatagctgctcccgaggcgcggactccggctgcttctgctcgcggccttgcaagcacccgaggctcccaaacttcatttggaaagatttttcttctctttggtgtcaccagtgacttactggtcagtttaccataagggtccccctttgtgagaaatgaggcgcgtctggggtggagggacagaatcgacttgcaaagtgaggcttatgtaacagaggatgcgtctcttgggaagttagacctttctgggggtggaggttaggaagaccgtctccctccccaaagctgcgtttggggtgctgggctgggggtggacttgctgagtcgcgcggacacctcagggaaaggctctggcgagggaagaagcccgtgtctccgaagatttggcttctccttagcgtagtgcacgatgtttatgttggctaagaacctacacattcctacccgctccctcgggcctgctgctccccaaagggaagtcagtgggtggcggtaccgctgcccagcgggcgaacttcctttccgcgcaactcgcccgctgcagagtctatccgctggactgtctccaggattagagaggcccgttgacttcgtgtacaaacgctcagccacaacactgacctagtagacaccgttctgcccattgtatagatgaggtaaccgagactcagaagtaaggtgccctccgtggctggccaaggaacagaatcaagattcaaacccagggctttctggctccaaatcccactggctcctcctgcctttacctaacgggagaaaccccacccacaggacacccccaaaaccgcttctatagccaggacctaggcacctgggcgaagccgggcatggggcgcagggaattcctcccctttgttctgggggatgtctggaatcccggccaggcagcatggtgggacagaccaggtgcggtccctcccctctaggagcttacagcccatgtagggagagagacttggaaacagggcatgggggagcgaatgctaaattaagaggtgcaaaagttgccagacggggaagaggaggaagcctggtagcaaggtgggagctcagctggggaggccacaggctccaggtgaagggcgggtgctccggccgcttcgggatgataactcttcatccccacaaccatgacttgccagggggcaaacacaggtaggaagcaagttctgggtcatgcaggcagcggtgggccaggctgcagctgagaggagcagaggcaggccggctcatcaggaggctgtgaacttccaggatgttgacgatggtgatggcctcacctgggtaggggcagagtgggtgatgagggggagcaaatatgggagacatgttggggatgtgcggaatgagttgggaggagcttaatttgtctacctgggggtgctttggttaaggggaacacatgaggccctgggttataggaggaagaccatgacattggactcagtagcccagtagtgtcaagtgaccctattctataggtcactagaaatcatgcaaggttacagatgaaaaaggaaaatgcttacatttttagcagagcagttaagctccagagagatttaagtgattgcctaaaggtaccctgcaggggtcctctaggtcaggggcaggacttgacctccccgctcccttcttttccactgcacacttgtccagctgccctccagtagccgtttcaggccctgcatcactgaaagctggtggagatgccgggtggttaggaatgaagactctatatgtgttattattgttattaatattaatagctaccatgagttgggagcggcccgtgtaccatgcatctttatatacaggatctcatttgattcctgggagtttcagtggtggccagagagtttaaatgaagccctactttggggcaggagcgggaggaaactagatgaggtcagctgtctccactttctgatcctgacgtgacatctaagggcctggagattaaagtccagtctgcctaggacaggtagggctggagaagggacaggacgtgcctgttttccagccagcatgctgtctcgggttaaaaggtttctgggtcctgtgatttgttctctgcctgtggtgctcctcctttttaggaccatttatcattctctagggaccttgtaaccttgccaggtgccttcatggctacgactttcctgcaagtgtcattaacttcattttctagatgaggaaacaagggctcaggaagttaagaaactgcccaaggacaaacacctctaatggtttgtggagtagacacaggttttcaaagtttcctttggtttctttcttaccggtagattttttttttttttgtaataaaatgcaatacagactcctggacccccaatgtcccaagcaggtacagggctcagttgaagtgaggaaggggatgcagagccagcctgctcagcttccctgcccacccggcttcagcactggaagccccaccaggagcatggggacacagtttgagaaccacagcccatactcttagctccatgtttttgaccgcacccaggctgccttcatctcagctaggacccaggctggtcctagctctggcatggcccttgaggcatccctctgcacgcaccttttcctcaccaagagggcatggggcacagggaattcctcccctttgttctgggacatgtctggaatcctggccaggcagcgtgctgggacagaccaagtgcggtccctcccatccaggagcttacagcccatgtagggagggctgtaagggctcagtactgagcccctagcacaaaggccctgtccttagaaggccctagtcagtatttattcgctgaacggattccacctcctgcatatcatacaattgtctgggcagccataaagagcttcattgtgctttaggtgagtgatctcaggcaagtcacctgccctctgcatagtttccttctctgtacacccaccatggagcttcctactttatcaacctcataggtttaagaataaaataggatcctacttaaggcagaggtgctgaaagcaaactgcatccttattcctgtatccctggggttgaaattagcggtagctcctgtgtctggggcatgtgagcagatactcttgctgggctctttgaccacaggagtctcccagaagcagggctttattttatgtctcacacagagaggagtggcccagacctgcctcaggaagcctccatttgcccatggcataggacacaccccatgttcctcactgctccattctcctgggtcctagcagtgaccgtcatgcgtgcctgttttgcatacctcccaaaccgaggtgtaacctgggcagcttctagacacactgcaaagcaggtcatttaatgtatgactgtgcaggagactcagtttaaaggagcttcagacggaagtgacagtggttgccaatgacctttgacttatctcacagctctcccttgagcacccactgaatgcccaggtattggggacacagcagtgcctaaacacagaatgtggtggtgtgggggtagggggcggccttcccagagcacacagtgttggaatgagacagaaataatatgtaactacaaactgtcctcagaatggtgaagaatttgaacaggtgcctgacacagaataccaggaggggcctgactctgggttgagtgggcaggaaagcactctctgtggaggagactttaagctgagacatgaagaatggagaagaggtgttgtcctggaggggtggcaggagctgcagaagagccactacaggcttaagggccagtcatctgaggaaagaaagttctagacatggggagaggggagtgtgctgggagctgaggttgggtggggaggcggagcggattgtgagaggcttgtgggctgtgtaaagagttcctgaagtctttcttttgctttctgggtcagggcttgggtgcagtgcccgggtggtgtccttgaactgtgagatgagacacctcactggacacctagcctggcttgccaggagaccggggtgggggcgcctccttccagggctgaaccggaagtggaggagagctgcaatggccttcccatgcccagaagctgcaggagcagacaatggggttggcaagctctgggtagggtacaggccgcacaggtctgagggcaagatgcaaatgtcactttcagtaccaagaaaaacgaggcaataatctagagtcctgggctgaacgtggacagctcccgaatcatcaggtgggtggggattaggacaaaatcgtgtatcctggggagatggagggaaacagaactgtgtattggtgtgctaatgtctcagtgcttggtacaaccctggcaactctgccaggccgtattcttgttttatgtacaaagaaaccgaggcaggctgcatgctcaaggtcatgggatgcaggcacgacaggttttctgaactcagaactgactcagatttgccagtcggtttggacttctcacccactctgaagatcacaaaagaaagaaaggtcaggaagctcttagtgcctggtgaatactggatggtaaatgctcacaggtctggaagggaggaagggttccccccaaacggtgggtctggtctgttccgggcttcacaggagaccaagcagagaataagacagtgcggagcaggatggagggctcaggggtcttccctgcagaggttcctgggggcgtggcagggctgtggctgacagggtgcttcctacggttttttccaggcccagaggcctttgggccaaaggcagccccgccggtccttctttgaatccttcatccggaccctcatcatcacgtgtgtggccctggctgtggtcctgtcctcggtctccatttgtgatgggcactggctcctggctgaggaccgcctcttcgggctctggcacttctgcaccaccaccaaccagacgatctgcttcagagacctgggccaggcccatgtgcccgggctggccgtgggcatgggcctggtacgcagcgtgggcgccttggccgtggtggccgccatttttggcctggagttcctcatggtgtcccagttgtgcgaggacaaacactcacagtgcaagtgggtcatgggttccatcctcctcctggtgtctttcgtcctctcctccggcgggctcctgggttttgtgatcctcctcaggaaccaagtcacactcatcggcttcaccctaatgttttggtgcgaattcactgcctccttcctcctcttcctgaacgccatcagcggccttcacatcaacagcatcacccatccctgggaatgaccgtggaaattttaggccccctccagggacatcagattccacaagaaaatatggtcaaaatgggacttttccagcatgtggcctctggtggggctgggttggacaagggccttgaaacggctgcctgtttgccgataacttgtgggtggtcagccagaaatggcccgggggcctctgcacctggtctgcagggccagaggccaggagggtgcctcagtgccaccaactgcacaggcttagccagatgttgattttagaggaagaaaaaaacattttaaaactccttcttgaattttcttccctggactggaatacagttggaagcacaggggtaactggtacctgagctagctgcacagccaaggatagttcatgcctgtttcattgacacgtgctgggataggggctgcagaatccctggggctcccagggttgttaagaatggatcattcttccagctaagggtccaatcagtgcctaggactttcttccaccagctcaaagggccttcgtatgtatgtccctggcttcagctttggtcatgccaaagaggcagagttcaggat

SEQ ID NO: 8790 - DNA, 6000 bp, Homo sapiens
tttttttttttttttgagatggagtctcgttctgttgcccaggctggagtgcagtggcgcaatcgctgctcactccgcctccggggttcaagcgattctcctgcctccgcctcccaagtagctgggactacaggcgcccgccaccatgcctggctaattttttgtatttttagtagagatgaggtttcaccatgttagccaggatggtctcgatctcctgacctcgtgatccacccacctcggcttcccaaagtactaggattacaggcatgagccaccacgcctggcctagttagtgtattttaactagctaccttattaaattttctcataagtccttacagtttttcataagagtttctaaaactttgtagctgattatgctatatgccagttagcatttctgatgggcccctccctcctttctccttgccaccctgcattgcctaggacttcagaacaccctggtcagcagcagcagtgagggtgccccctcattataggaatccttccagaggtgtttacactcacccaagcatggatgcacactcatttctctctggtgttataattgatgggcagacagcaatgcacacggatccatgcatccctttggttgtcctgggaactgcactcagccatgacacatgggctgtgcaatcagggcccacagacacggccctcatctgtgcaggaccctggccggcatttgctgacaataacatggccagttggtcttttctaaataaagcaccgcatacagaggaagtatgctgaagctgggctagcatcaggtgtagaaactgcaggctgaggaggcagcagcctgacccggcctgtcagtcatggaagtcccagagtgctgccagcgttgctgttagagcacttgtctgcccgagtttatttcctccaggggcacatcgggggcctgctctgggccatgcagatgcccaggctctgccctggagtagtgggggaaaagttggtatgagcattttaaagatggggaagagggctttcccctctattcctagtggtttcccctcctttctgaagcagaattgcaggacagctcccgagggcagcaggtcagcctccacaaagagctgggggttgtggggtttggtggtagcgctgagaaggggtagggtggctttctctttggcctctttctctttggctttctctttccaccgcgctgagctgctgaccctttcccatggagcgatcaggaggagtctttgattcagaacactgaaacctggcacgcctgaggagagttagaggagacaggaacaaaagctctcccagaggacttagagctctcaggcatcggacgggagggggacacagccacatgcttcctcttgcactgaagagggttgcctttttcctgtttgctaaatgccagacttgtggatggaccaacaggacaacttgcccagcttgaaggtttttaacagaatgaagcaatgggaaaatgttttcaaatttatgcccccccttccacttttgttttaacttagaggagggagtaaggaggtgggcgtggcaatatcagaaagggaaactagcagtgtaataataatattaatagtaccaagtgtatactgcaagccaagtgctgttctatctaaatgctttatatacaatgatttccttaaattctcacaataaagcaacaagaagagacacagtcctacagaggaggaaattgagacatagaaattaaatgacttgcccaaggtcatactgagaaagtcatggtgccagaattctaactcaaacattttggttccagtcttctgccctttttttatttttatttattgattttttttttttgaggcggagtcttgctctgtcgcccaggctggagtgcagtggcacaatctcggctcactgcaagctccgcctcccgggttcaagccattctcctgcctcagcctcccgagcagctgggactacaggtgcccgccaccacgcccggctaattttttgtacttttaatagagaacggggtttcactgtgttagccaggatggtctctgcccttttttaactaagcaaaaaaggaagctggagaagaactgtaccctggagatgccagcagtctccaaggagctccccgcaagcatcccagaggaaggggtgtctgccaggggtctccactgtagtttctcttttcccctttgcaggctcagagcaggctgaactcacagccttgtgcacctgtccctgtgcatcttcctctaccttgtcctcttggctctgttgagcggcccatgtagccacactgactggtgggcaggtgacagactggcacatggcacgtgggctttggtacacttggggtctctgtagcagtgccagcagctcccactgtgcaagactgctgctggcagcgtgaacaggagggccaccagcagcagtgagtctcattgcaagaacacagctggcagtcctccgggagagaaaagccggggtgggccagggcctctggaagatgtggggtcttcccatcccccacacctagcctgagctgaacagagggcaagctaagagtttggatgtttggagagacatgaggaacggtcaggtgtcaggaggacaggtgggttaaacaacaaggtggggcttggagtgagggtgaacacgaggacagaaagacactcaaggcagctggaagtacaaatggcagactacagcctcagccacttaatgttcacaggccacaaggcagcatctggctagtcactcagatcctctaatagacaaaccaccaaacacacacacacacacacacacacacacacaccctggctggacagacttccagatggacagaatcccagggaaacacccagctggacaaacagacagattactgacagatgggtagaccctcagccagacatccaaataggcctgtggccagagagacacctgggccccccagccaggcaaaggtcagaatccctcaaggacaggtgccctccccaaaatggacagagacattaccccagaggagagaacaccccacccacctagtcaaccagaccttcagctggacgacatgccctccaccagtcagacagacctcagcctatgaggacaggccctcaacaggatccctgctgctggacagagatcctctagcccataaagactgccctgaataaccatgtgtgctcaggggctcacattttcccagaaaatgtctttattttctgaaagcttactgatgcttctgtattctacctccctggatctccatggccatccacaaaccctcaatgattatactgagagtcactatcatgcactgagcagagctctcaatgacttcccagactcttcggacccttcaattactaacactccaaatcccaatggccccacaattactttcacttcttgtcccaagtatccactggcctcccaatgactgtcattaatatctactgacacccccccccccatgaacatccaagggaccccgactggcttccaatgaattccctatcaccaccatcctaaacaattacctccctgagaatgctcaaagatgaaactgataaatgatgaacatgaatctcacagtgacccctgcggaccccacgataaatcaaacagccctagctgctgatccccacagagccactttgatcgctccatcacttcagccaaggtcagcaaacgacagcctgtaggccacacacacacactagaataattcatgacacatgaacattacatgaaattctgatttctttgtccataaatggtttctttgggacacagccacactatattgtctgctttcatgctgccacagctgagttaagcagctggggcagcgatagcaaagccaaaaccacttcctaccgggacctttaagaaagtgtgcccttaaatactctgatagcccctagtgaattaaattgaccacctgacatcatgcccctgttgacccttcagagactcaggcacacatccaggccccaatgctacctttcaacccctcaacgacctcaaactggtgtccactgacgccccttccagtgacacccctcttaattcttccgacctcggcgagaagggggctaacctaggcctgtccttgaagagacccaggtgccagtccattctctccagcctcccctcggtgatcccggaagctggaacggcggctctcctctgacctctgcacactttctgaagatgggagtgtcagggcaggcaaaaaagagaagctcttcgttccccagaacccacttccagtgcctcagttctgtttcccagcaggcttgtgcaggtcgagatgctcacacaggactgaccctggtgccccagcgcatccgggaaaaaggaaccacaaattcctcgggaaatacacagagaagatcccgctgccacttggcctttcccacggcgtggctgcccctccccggcctcccttgggcccggctggagcgcacagcgcgggacgcccccgacccggggtcctctggcacgaggggcagcctgatctcggcgaccgtctccacccaaggctgctgcccgccccagctcggactccgcgcggcctggctcccaggggacgggcgggagggcccggcgagaccgctcggccgtccacccagagccggcacccggaggtcggcccctgggcgcggatcccgatctgagggcgggtcccaagcggcagggagcgaacctgggaccgtgccacccccccaccagtgggcgcggcagccgaaaaaaaggggaagcgccggcgctggactctgctcagggcagcccgcgaggacctagggctccggccacagcggcccgagcgcccggggtggggctacgcgggctcagaacacggtggctggggcgccctgcccgccgctgcgcgcttccattggctgccgaggcaagggcggggactcagtcaccggcctccgcctcccgcggcgtccacactcgccgcgcgcgcggcggccgggctggaccttgctggcccgcggcgccatgagccgcagcctggactcggcgcggagcttcctggagcggctggaagcgcggggcggccgggagggggcagtcctcgccggcgagttcagcgtgagtggcacacggggtccgcgagcggcgcgccccggccctggccctgcgtacgcctgtcctccgcgcacggcgggctctgcctttctgtctcggtgtccccggtgtctccccgcctcggggggtctctccgtgtttctctccccagcacttctctgtcgctcttgctgtctccgtcttcactctctgccccccggccccggagcgcgacgtccacggccaggccgggacggaccgtgcacaccctcgttcccggtgtcctcgtcgcgctcccggaacaacctggctgcgggcgggacaggtggggcgggcgccgcaggggagggcgggcggccctgctgcgctggacagccccggccccgccgcttctggcgacctgactgtcccctgtgaccacaggaaggaaggggctgcagcagggcgaagaggaacacggaggctgtggcgtggtgagggtgtgaacgccgggctcgaatccgcgtccgggcccgaatccgcttcccgtcccgaatccgcgtcccggccatccgcgtgtggtccaggcggtctacctggcccctctgacctcggcttctcccttggtgaaatggggacatgaatgaccaaactggtctaaggattaaatgatgtgggtgaaaagcacttagtacatattgggcgcacacttcgtaggggcgttcgtcactgcctataaagattctaaacgtgggccaggtgcggtggctcacacctgtaatcccagcactttgggaggccgaggtgggaggatcgcttgagctcaggagttcgagaccagcctgggcaacacagcgaaaccccgtctctactaaaaatacaaaaatcaactgggcatgggcgcatgcctgtaatcccagctactaggga

SEQ ID NO: 8791 - DNA, 6000 bp, Homo sapiens
tggtggctcacacctgtaatcccagcactttgggaggctgaggcgggtggatcacaaggtcaggagttcaagaccggcctgaataacatgataaaactccatctctactaaaaattacaaaaattagccaggcattgtggtgcatgcctgtaatcccagctactcaggaggctgaggaaggagaatcgcttgaacctgggaggcggaggttgcagttagcggagatcacactattgcactccagcctgggcgacagagcaagactccatctcaaaaaaaagaaaaaattagccgggagtggtggcaggcacctgtaatccgagctactcgggaggctgaggcagaagaatcacttgaacctgggaggtggaggttgcagtgagccgagactgagccactgcattccagcctgggagacaagagtgagactctgtctccaaaataaataaataaaaaaaataaaatatagctgttaactggatgtggtagctgatgcctgtaattccagtactttgggaggccggggagggaggatcacttgaggcttggagtttgggaccagcctgggcagcaaaaaatttaaaaacaactagccccacactgtggtggcacacctgtagtcacagccacacaggaggctgaggcaggaggacagctttagcctagaagcttgaggctccagtgagctatgatggtaccgccgggtactccagcctgggagatggaatgaggcctcatgtacttaaaaacatgaataaaatgtatctgcttttcttaagcattctatatatttcaggcagtgtgcaaggtttgaattccaagtgttccacaaattggggattattcctggtgaggccagatattctagagcaactaaaagcaggaatgatctttctagaagcagtgagatctagcctgtaagcttagatgtaagagaggtttctcagacagggtttcaagatggtattctctttacgtgttttaataaccttttatttatttatttatttatttatttatttatttctttatttatttattttgagatagggtctgtcacccaggcctgaatgcagtggcatgatccccgctcactgcaagcctcaacctcctgggctcaagcaatcctcctgcctcagcctcccaagtagctgggattataggcatgcaccaatgcacagggctaatttttaaaatttttttgtatagatggggccttgctttgttgcccacgctggtctcaagcatcctcctgactcagcctctcaaagtcctgggattataggcttgagcaactacatctggcctctatatccttttaaatactggcttggggaattgaaagtttttgatgctaatccagtagaagtcaaccaacagaattttttggatgttcatttactaaatatggcaactttaaataaaacttgatgtggggaaaataaaaatttataaaggcactaaatcgagagtttattatttttgttatgaaaggaatcccttacatcaaagacttagaacaatggacctttaagtaatatatcccttagaagtaggagtcctcatgacattttgggctggataaaaaaagaaaaaaaaaaagaagcagggatccttggccaggcgcggtggctaacgcctgtaatcccagcacactgggaggccgaggcaggcagatcacctgaaaaaattgttctcaatcaggtagacagtagaatgatagttatcagaggctgggaagagtatgtgtgtggtgggggtggggacaaaaagaggatggttaatgggtacaaatataaagttggataaaaggagtaagttctaatgtttgataatagagtagaatgactatagttaacatcatattgcattatttcaaaatagctagaagggaagacttgaaatactacccacacagaagtcataaatgttctagatgatggttatcctaaataccttgacttgatcattacacattctatgtatgtaacaaaatatcccatgtatcccataaatatatacaaatattatgtatcaataaaaaattatatgatttgcaaaaagcaaatgtaaccacatcttttcaatgtcccaccatttatgcaaagtaaaggatatctctacaactacccttgccaaagagaagctttttagaagattaggttgtgggatgaataaaagaggggaaaacaagaactttgaaattcaatatctgaaagagcattctaagctatcaggtggaagaaatgctcaaaacataagagtaaagggttgaatgaccatgggtaaataacagacaagtttataaaataaaagggggaaaattggttaatagtcaataagatgctaacttagagaagaagccaagtttaaaaatgaaaactaaggtgagtggtgagggcaagtggtgaacaaagatatttagatacagaaaggtatgtcagagtcactcataaaggataaaaagtagcaagggaaggtcaagtgggggaactctgtggataaaaggcaagcacggtgtctagattgtctggaacagttttgacttcaaacacttgcctgtcaaatcactttgtgacgatttttagttaagaaactatggtcattttccatgaccatgttttacctattcacatccataattcctagcaaaatgtcttttttttttttttgagatggagtttcactctgttgcccaggctggagtgcagtggcatgatcttggctcactgcaacttctgcctcctgggttcaagtgattcttctgcctcagcctcccaagtagcagggactacaggcgcctgccaccacgcccggctaattttttgtacttttagtagagacagggtttcactgtgttagccaggatggtctcgatctcctgacctcgtgatccacccaccttggcctcccaaagtgctgggattacaggcatgagccacggcgcccggctgcaaaatgtctgcagcatagcaaaatctcaataattatttatcactcatgataattacctgaatactaaaatcagagagagtacattaaaaagaaacacaacgaaccattcttaaataataaaaacatattcatcagtggtctttatttactagcaccaataaaaaactagaagctctgtttagcataggaaattggtgtcatactcactttataatatcatcagtgctgggtggggacaaagccataatctgccaaaatctgcaccatccttgccaggtttgggagttctgtagagtagttaccactgccaggtctgactgccatagctcaggaaaagggtgcagtcatttctcttagcataatcttgagaagatgtctaagagacctatgtaatattaagtcacagaaagaaacaatattattggtggtttagacatggaatgtaatagctaacaattacggaatgcttacttgtttcaggaactgacgtgttatctcatctaaacaatgctacagagcatgggtactgttattaaccccgttttacaggaaacctaggtttagcaaggttaaggaattgcttgagataacaaaggtagtaagaggcaggggtggaatttgaagccatatagtctggttcttcagggtgtatacatccgtgtatctataaccacaatgctgcaggggcactcgaacaggctggaaaagaattatttttctttaaagggcaaattaatttcctcaaaagtaatctctgttcactttatcccataccagatgcttattttcatttcatatcctaaaagttagattggcacttacatgccaacttaaaatacctttaagtctttaaaatttatagtattttagaatttatcatagtgaaacatgtacagtctgttagtccccaagacaataaaataaggatgatagtgactgatactccattcccttccgatgtaatgacaaacacgtagaaacactgtgtttcatttattggaattatttggatccaaaggattgcttttaataccttaacaaaataggtcattaaaaaaaatcaagtgcctttcagtattcttccaagtttcaataactgatcttttccattaaaaaacttttgattcattattccaaatcaacatatcatctaaatatttacacatagttagatgtagcttttccctaacctactcccttttatttattagtactcatttacatcttagtttgccacatttacagttctttgaaagtttcatctaatattcaccagaccattcacctcacaattttcctccctctttctaaataggtgaatttgtttactgcaaaatcgatggctacgctattaaaggttactatcacgattttaaaagacatgatcaccatcatttaccaagattcttaccacaaggaaatgatcacaaggttggacaaacaggctccaactcttaagggaaagggcttgcagttagatcacacagggcgggcagggaagcaagcggggaggggtaggtcggaaaaggcagtgcttgattcaattcaacattcactgcgccacttaccaagagccagaaaaagaaaaaaaaaaaaaaaaaaagccaaccagctgggcgttatttcgagcacggggccctgcaggtgggcctgtgggcggggacccggcgcccgggagggaaggggctggctcagagactatagacgggcggggaccgccccggcccgggcctccagcgcccggcgcccgcacactcgccagcccagctgccggcacgccggccagccagccgctgccgcttaccagtggcgcctcgctgactccccgggggcagctcttcaacggttcccgcagtcagagcaccaccccgcggtggggtacctccagcccgcccgcagctctcggtccccgccgcgccgccactctcgcgagaagccaggaagtccgcgaagtggggggaggaggagcagggaggggcacttaacggtggtggctggttctgcgccggatccgggagaggggcgggcgccattgtgcttcgctgccgactgcatttcctcagtcacgggcctagaactccaaggagaaaggcggcggtgcgtgttgctgcgagtgggacgcgcactggtcggtgccggctcaggagccggggtaatgagctgcggagctagttcttctccgtcttgggcgctagttcgggaccaggccgcgagtgggggaggggaggaaacgaagaggcctggggacgcggaggccgcttcctctcaggatgaggtggagaagcttggtccggggccaccggggccaaggggccacagcgcaggcctcccttgccaggggcctttggtcgggtggtggagtttgtggcgggtgcaggggacagattgtgtgtcttcctcagggacgtgtggcgggtgacgggaagaagcctgagccctcctttggcgcggggcggcctcctcttgggccgtggggcggggggtcttcggagccctgcgggccgcgggtgtcgcgcgtgagctcgccggtgagcgcggggcaaaggcgggcagggctccggctcggccagcccggcctcgagtcgaagtgacttcggtagccccttagattcggccaagattgtcttattggtaacgtcagtttttgaatatcgtgacgccctgagagttatttttgtgttgtggtgaattgtgggttctgcaactcgaagtaggtgattgtattaaaaatggacctgttggcctaagaagtaaaaatatagaaggcgccgggagtaggaaactccctcattttggtgaaactgcgtattgaagatgtgtgtccaccccctcaccccaaaatgctgcacttaatactttttctcaagtaccaaagtaaatatattgggaaagtctatctgggtaataaattcgtcacgactaatgttgtttgttactattagttaaatgtgtgaaaactgaaatttggcgaggttttctcccccattttgtaggattgattagctatttttctgattacatgttattttaaatctccacctttct

SEQ ID NO: 8792 - DNA, 6000 bp, Homo sapiens
ggttgtatattttcccgttggagacacatctggaatttgctgcaataaaataataataagaaagcattggcagctttggtaaactgcagattcaaaaatcgagggagaaatgagcacacgctgtacttggctgtacatataattgctgactgtgggttgcagaaatttctctcaagcatcatcaccacttttgctcagttatcagtagtaataacagcaatcaaaactgaaactgctccagatgcctgtctaggaagtatggttttccatccttcctactgctttcttcacaagagaatcctccacctcagtggccctgaagtggcctgaagggcccgctctgcggtcctgccaccagtgccctctgaggtccatggtcccacggcaccacggccgcccagtgcactcgcctccacactgagttttcatttttcccagttaagccccatcttccggaaatgcagctccagagggtctctgtcccctcttgctggtggggcaagggtctgcgcatcagaccacatggacccctgcaccaccatctgctccgtcctctccctctggtcagctcagcttattaaacaagccttggtcaggaaaatctaaaccacttaaggaactgggcagaaagaaactgaatgcagggagaagaaggctggggagccaaggacaggagaggagacataggggagtcacagggacctgccacccagatccccactgcctgatgtcctggctgtggagggcacctggagctgccagcagagcctcctgcccaccagctgctgaagccacagtacatctccttcctcccacctcccagacctctcactggtctcatctgggcaccgaacatgggaagcccctcctgtgacaggcaggggagaaggaggctgtgctgacagacggcctggtgagggaacccgggaggcctccagcatctgcacccctctcctactttgatctctgtttcaccaacattgcaccccaacttaaggtcacatagctactgtcaagccaacaaggtgctgcctctcccgccgtgtgagggtggaaccccataagccaccactggaggcatccaagcatgttgattccttctctagttcagacaccacctctcctggacatcctgtggcctaaagactatcctagaatcaacactccttaaataggagtggggaaagaaaaggaaaatgtgtgtaatacatgtgaatcacagataacgtagtcattggttaatatatacaactacgcgtatttacattctgtatgcgtcaatgagtaaaatactgtggttggtgcttatctgccttttccaatactcgttccatgttctaccctcagccagtgcctaagctgcttatggccttcacctggtggcatgactcgatccttcatttttaaggccccaggccctgcatggctgcccacacaggtgctgtggcctccgttacctgtactgcaccaccagagagaagtaggaggcaccactcttcctggcccccaagcctcacaaagcctcatgcccacctgccagagccagccctgtgttgtctcatgcttccgtggctgggccgtgtctgagccaccctcccagtgagacccgattgtgttcctaagcaaaagcatcccacctggggaccgaacatctctgatgcggcagagcccaaagctggggggatgggaagcacgggttttgtcagccaagcgtgggggtggtagtgagaagggccttctccctccccacgccttgtgtacctgggcctcaagcataggccacaccttgttggtcgctgcccctctatgccgtgtcaccagccggcaccacccatcgctgtggaccgcggcccccatcacaagctggtgcccagggcagtccccatctctgtggagggcttgcctgccgctggcctctctagataagctcctcatgactcatgcaaccttttcatcaacccggaaggaagcagccgccggtcgccactagtgggtgaggaacagtggcttggagaggagggaggacctgggtctgcggtttcccccgcggctcagccctgctcacaacaccctgatgaaaacctcggctgcccttgcctcagggcagggcacaccctttacctgctgacctggccctggtgacaaggggacaagggcagcagggccccggccaggttgaaggacacctgtgggtcacatcagacctttttagcccaccagctccatctgagaactggtagctccctggtcctctgtcggggttgggcgcggccctgtctgaacactgcttcttcctggaagctttgctgccctccccagcctgctaaaacgctccatgcccacacccacctcctagtgggtgaagccaggaacccctccctcgggtgcatcaggggaaggctggggtgcagatgccgcgcagccacttcactgcgctgatcaccaaaaagctggagtatgaaaactcctgtgggagaaagccagggctgacagtcgcgacgtccaggctcctctgccagggttagagaagtcagaggtgtctgcccaggcctgcatgcggcgtagcctcccgccgccagggggcgtcaggccggcgggggcggggcctcctcgggcggggcggggcggggcggggccggcgcgagaggctcccgcggctcagttgcagaccccgccccctcggctcagccgcgcctcccgctccatggggtgcagtagggcagctcctcacatacgtgcgcggtgggaggcgctcccttgggcccccggggaggaggtgccacagcaactctggactcctgtgtgcagaactggccgcggagaggtgcccagggcgagaccccaacctctgctccctgagcccaatgcggggctctgggtggcaagaccccaagctccctgtggtgacttgccccccggacggccaggcccagctagtgtggcaccgcgtgtgcagaactgaggttcttccagccaggaacatggcccggtgggctctggagagccccgtagaactgggggtgccatcgaaaacagtctgcccttggcactgcagggccccaccgggcagggcgctgggggcagtgaggagggtcccatctcagctgtcttccctgtcagccttggatgcgaggctgatccacacctctgagtgactgtgtaagcctaggggttcctggtgagtttgggatgggtgccccaagatcgtggccgtgtccctaaagagggcacgtggggacctgaggtcctacgggaaaactgaaatgatgcctcagtgctctgtcccgcaaacgtgaacgcacactctccctctcagccttccttcccgccccacggaaggagggtagacacagagggttacacaacgaggagactgagtccagacacaggaaacactactcagggctgacgctgagtcgagtgcggtacccgagtccagccctgcacggccacacctcaatggagcagaagagagaggtgtcctgggttcctggatagttccccagccccagaagccccttgtccctaggaatttgaattcttacttgatgacaacagcgacatcatggtggcccctgttattccacagcctcaaaatttaaccgctgtgagctcactagcagcttctgccaggcgagcaccccttccctcggggctcaggctcctggacaggctcagccttgggcagccttcgccaggtccacagagaatggcgttgggaagggtggacctggcggatggggtggggacaggcgggccagaccctccttcgtaccccagcacagggctcccaaatgagaggtccccagcactgcccagaggaacttctgcgattgtggaaatgattcctgcctgctttgtccattagccactcctcccaggaagacacacacactcactcactccacctgccacgaaggaactgaacttctaactgtatttaattcgcatctaaatggccacacgtggttggtggctgctgtagttgacagcgctgcgtgaaggctccggcgcttctcgcaccgcagggcccacagcacagaccacacctgtagacttggaggagtggcaggggtgccaggagaatcctgccctgcccgtagccccggatgaaaggatgacattgagttcgcgacgctgcgctcctcgggaacacgaaccacacctggaagcagcctgcccctgtggccccaaggttcccgggtcccttcagcggctgccccaggggcctggccggcagtgtctgggagggagcagcgatcccgcctcctgggatctcccgggcgccgcccggggaggaagcgaggggctgggggtgctgctcacccgctccgcgcgcctcggctcccaacacagcgccccggccccgcgccgcgctcgattccccggctccccgcgcccctggctcctggccctccccgcccggcgccccggccccgcgccccggccccgcgcacagcgcccccggcggcggccgagcggagcccgagcggggcggcgcacggcgcggggccgggccgggcggctcccggcgcgacttcctgttgtgcccgcgccccgccgccgccgccgcccggcgcccctcgcccgcggcccggcgcggccgccgcccatggatttcacctagtgccggcggccatggccgcgcagtgctgctgccgccaggcgcccggcgccgaggccgcgcccgtccgcccgccgcccgagccgccgcccgccctggacgtggcctcggcctccagcgcgcagctcttccgcctccgccacctgcagctgggcctggagctgcggcccgaggcgcgcgagttggccggctgcctggtgctcgagctgtgcgcgctgcggcccgcgccccgcgcgctcgtgctcgacgcgcacccggctctgcgcctgcactcagccgccttccgtcgcgcccccgccgccgccgccgagacgccctgcgccttcgccttctccgcccccgggccggggcccgcgccgccgcccccgctgcccgccttccccgaggcgcccggctccgagcccgcctgctgtccgctggccttcagggtggacccgttcaccgactacggctcctcgctcaccgtcacgctgccgcccgagctgcaggcgcaccagcccttccaggtcatcctgcggtacacctcgaccgacgcccccgccgtgagtccggggcgggcgccggggctgcgggccggtccgcagggcgctgctagcggcctctcgccgcacggccaggctgagggacgcgaatctgcgccctacaggtgcccccctccccccaccccggtgattcccagctgttgcctgtgagcccttaggaccctcggatagaagccggagtcctgcggggacacgggacagcatgtcactccgggaagcctcccgttcaggtgtctggtccctgcctggggacatgagcagcttctgtcacccaccgaggtgtacatctgcaggatcctggcaccaagggttgggctggagtgtcagctgcggaagggcctccatgtgaccagtgcgtgcagatgagtccaagccagaggcagaggaaagggccatggagattgtgatgctcggtttggggcttccttggccagcactggtggagtgttgagaccagtgggccccgcgaccccaacatagacacacataggctctgcagggcttgcacactgggtacccaccactccagagactctgcaagaaaggccaggtggctgaggctggcgctgtggctgcagcaccccctccacctccaccagtggggatgtgtacaggatggagcagggcctttcctgcctacagcatgggggttcatactgcatccctaggtggtatggacggcacacatgtgacacccgacatatgcaagacacacacagctgtggaggcgctgggaagtccagctgtcactggtcacggcacataaatggacagggtggtggagaggtggtcgagaggcttcaggccacaaagagccaaggtgacatctgggca

SEQ ID NO: 8793 - DNA, 6000 bp, Homo sapiens
tcaacaggcagtttgcagtctgtcaaaccaacttaatggtctcatcacacacacgcgtgcgcgtgcatgcacacacacacacacacacacacacacacacagctggaaaaaataacagagcccagactctccacgacatgatatttgcaatgcccaacaagtcatgctaaattatccacaattgcagaaccggggaagtgtggccaccgctctagcaaacagacacactcagaatcagaacaatccccttgctgtgctcagaggtggagcttcctgctgtatccctgctcagtgacgggaatcagggcctgcacccaccaccaggatgaatcctgccttgccgcgattttacagctgcagcgaaggacagttctgcaatcatgggaagtctaatgttcagtcctcatctaataaagagaagaaaaagaatgagagagaaaaaatgaagaaataatgctaaaaattaacaatataaattcacagaatcaagaaatttatcaaacacaagcaacatgaatacaaagaaaactaattctaggcacatcgtggtcaaactgctgaaaccaagataaacagaatattctgaaaacagaaaaatgacatgttatctatgggaaaatgaggattagaaacatcactgcttttctacaagaaactatggcagacagaaggctgtggaatatctctcatgtggtcaaagaaaagaaagaaaagcagtattcaacaattcacagaaaaaatatcctttaaaatgaagacaaaacaagagcatttttcagatgaagtcgattcatccccgacagatctgaactgcatgggatgcttatggcaattctttagtctgagaggaaatgataccacctgaaaatgctcagaaaggaatgagagctttggaaatggtaaattaagcattgctgtcaaatgctttattgtaaaccgcattgtacaaactgacagaggcatcagatttcacatcagggtcaaactggtgcagcccagagacacaaagggaggaaccaggaacccgcacagaagctgcccggggtcgtagacccagcccgtgaggttggtgtcctgcaggatgttgctgagcttggcaagttcaatggggataaatggagaacacagtggtggagataagggcacttctgtggcctgattcgcatccaagacatcgaaactgagggcgcccagagtccagctctcagggatctcagttattggccatgatgtcttcaggaatgaaacctctgggctcacaccattctttgggtgtgctacagtgtttaaacctttcctgagatgcaccctgccgtcccctagggtccgaccctcctgggctttctggcactgtctgagctgtcaccaggccaggggtctgcacctggcaccccggctggcatggggctatggaggccaggtccagggggtcctgcccatgtcagcctggctgtggctcttcctagacagacgcccctcccaaggctgcctctgggtcacagggcacagacctggtcttggtacctctcctttcctccataactcctcattgctcccacagcaacaggtaactctcccctgtggtctctccatctaaacaatcagctgcctgctgggacctgagcaatgcaaagaacaagaaagctatcaagtactggctttaatttgtagaaaacattacagctcacaaacttattttacccattaataaagctcttgaaaaccaattgtatgtggattaaatagctattttagaaataaacaaaattgggccaggcgtggtggctcacgcctgtaatcccagcactttgggaggccaaggcaggcggatcatctgatgtcaggagttcgagaccagcctggccaacatggtgaaaccccgtgtctactaaaaatacaaaattagcctggcatggtggcacacgccggtgatcccagctactcggaaggctgaggcagggagaatcgcttgaacccaggaggcagaggttgcagtgagccgagaccctgccactgcactccagcctaggcaacaagagcaaaacgcaaaaaaaaaaaaaaaaaaaaaaaaaaaaggaaagggaagagaagagaagggtggcgagggaaggggaagggaggggaggggcttcatccagtcttttctggaagcacaaaattccaggtaaatggaatagagtccatgtcagcattcacataccaacagagagagcaggccatgttctactggccacattaaaatagcaaagagaaagagattaattttattgatatattttatttggtccagtatgtccaaaatataatttcaacatgtaagcaaaataatacaattgttgataatgtattttacattttggtacaaagtctttgaaagatggtgtatgtttgaaattaaagcacatctcagactggcgacattgcacaagcttcacgtctaaatgtccggcagcctagcgttgttcagaacggcagggcgggaggaatgtggaagatgaatgtcctgggactgaaagtgaagctgctgagggccagagttttaacaattttggaaacttgggtgccagggcgcacaatatatgaaagatctgggagggcggctgaggggaagatgaagagaaaaaatcccagtgaccgtagataggctgtggttaatattaatagcaaaaagagtttgaccccaaattacagaagttacaagaaaacagacaccacaaaagaaaggcaggcaccagacaggactgacgatgaaactaacccatggaaattaataagagtgatgtttcacatagtaacgaaatatcatcagggagatacacagtaacaggctgaactgaagaggacagatctattccctgtaactgaaaggtcctgttgaaaatagctgaacaaacacaggggagtgagaatggacacagatgaaaaccatcacaccagctgggtgcggtggctcatgcctgtaatcccagcactttgggaggcccaggcgggtaaatcacttgaggtcaggagttcaaaactagcctggccaacatggtgaaaccccgtctctactaaaaatacaaaaaaaattagccaggtgaggtggcgaacacctgtaatcccagctactcgggaggctgaggcaggagaatagcttgaacccaggaggcggaggttgcagtgagccgaggtcccaccattgtgctccagcctgggcgacagagcgagacatcgtcttaaaaaaaaaaaaaaaaaaccaggaaagccaagcccgagatttcccaaactcagcaacaacagtcgtgatgttttgagaggaaggttgagaaacacaaaagagaggaagatgcactatctacctaacgggatgttcctggagttgaatacaggaagaatagagaaaaatatcaatgaaagaaatgttttcccataagaagaaaccatgaccttctacactgaaatgagagaatgcatgttaagtagcataagcagaaatgaccacactgtggaaagattttaagaaagatctgggaggggttaaagctattaaaaaaaaaaaaaagtccaccactagaactatttttagaaacattaaactagttcaagagctaacatatgcaattaaagtatatacacttaataattcatgatgttaaaataacagaatgtttaatttgaaaatgtcaaagttggggtatagatgttaaaataaagggaaaaaattcgctggaagaaaattaactttatatttttgtatctgtcgttgaacaacgaagtgaagcgtaagaacatctggtaaatctccaaagtgaagacagataaccctaagctgacccagactaagagtgcactgcccttagggtcgcgagagcagacaccttcccaagtcctgcagggtccgaggagtgggcaatgtccccggctcctgcagggtctcggggcggacaccgtcctcattgatgctctgacccttctagggagtcccaggtgggacagggctggcgtggcggtacagcgccctgagcctttgaaacaaacctcctaaattccacccgcctccgcctgctcctctgttaacgaactaaagacgccctcggcctcctggcggagcgagcacaagtcccacagcagcgtagtaagttttccgtattacagcgaccaccaggaaatatcgcgatatctggacctagcaatgccatgaaattaccgcgagaggaagcaagcgcaagtttcgtgagaagggcagatctcacgagagaggatttggcgccctcctctgtggattctggccaggccgggttcggcggttgctgtgagagcgggcttcccaacaccatgccgtccgccttctctgtcagctctttccccgtcagcatcccagccgtgctcacggtaactcgcggcccgcgtaaccaccagttcgggggaggacggcggagaggcgtagggtaggccccacagagcacccggcctgtggccaagaaggccccggccgtgggcggggccttgtggcggagcgcgcgcgctgggcagggtcctgagacctgtgggagtggctcggggccggcgtcgggggcgcgcgctgtgggcggggtcctgggccctgtgggagggggccggggccgggcgtcggggcgcgagcgctaggcggggtcctgggccgttgggcggggaggggcggggccgggcggggccttgtggaggagcgtgcgcagtgagctggctccggcgctctgtggcccgggcttgggctgggctggcgtcctgcaccgtgcgggcgtggctgagttgtgtgggcggagcgcgaggggtagggctttgttcgtgtgggaggtgcacgccggccagtccagcgtcttgcgggcggggcttgggccatgtgggcggattctggcagtgcggcggggcgtgcgtggtggagcctgatcgtgtggggtggcacggaggaacgctgcccagtgtgggcggggcgtgcgccgtgccgggttcgtctgacagatcccaggggagcccacgccccacgtggccgccaaggggtgacatgggcactcgatggggtctgggcagaaagccgtgctcccctcacctccgtgcctctggtcttctggtgggtgcattgatgggagtagatgcgcttgtgtccttatgtcatggcgcggctctggagaagccgctgcggtccccagcagagagtagtgacacaggagttctggagggctgtgccgggctgcagcttggagggcagggcggggctgcagcttggagggcagggcggggctgcagcttggagggcagggcttgtcttctgcaggagggcgctcaaggaggggatggggagggttgaggactgctgggattggcatctgagcatcaggtggggactgagcagcagtggatctgagcctggctacttcaggtccctgagccagacactgtccccaggtacagcagggtcccggggagtccaggaggcggcggagtgcggcactgtctggagagttcagtgtattgcagagaggttggagaaaatcaagtcttgcacgtggcgatggctcaagattccctgaggtcttcagtgctgactaaggagtctgaaatgatgattcatgttttacctttggggctgagccaagtgcatctctttgagcaatcgtcttaatttccttgtcgtcaccaattatcataaccaattatcatcgtaaaggatggtaattcctttaattatacccaccttaaaaacatgattctgttccacaaacgaaaggagcacatcagagatgccttcagttctgtgtgcttgaactttgaattccatgaattatagttgcactgaggggagaatcctgtttccatcctcctggttccttctccctttcctgtccccatgtttctctgaggcctggcaatgctctctggatacttggtgagtagcccaggaggactcaggagtgagaggcccctgcctcctgcgctgggagaaggctgtgggtgggccgtgaacccggccttgagtggcag

SEQ ID NO: 8794 - DNA, 6000 bp, Homo sapiens
gctgcaagactgtgtgagtgctggctatgttatgagttctcaggggagatgtttttttctccctccatttaaagtcaagtctcaaggcaggcaattttccttacaatactctggggcttggggaaaggcagtaagttaatttgtaacccatccttacacaaacagtgtaatcttttgtggacccagctctaagcagaggtggaagggactacagttagactcactctgtgtacacgttgaccactgtattcacttattcactcatgtgaatttggcagatactctcaaggcaaaaacctctccaggtttctgcttatactcaggagtaaggaatactcagaggtcaagtattagatgcaagtggaaacccaagaaacctctccaagtggaaacttctcctgtggaaacctctcctatggaaacctctcctatggaaacctctcctgtggaaaactctcctgggtttccacttgcatataatacttgacctctgagtattccttacttctgccagcataaacatgcacttcaaaagattaaaaaatactttgttaattatttgtagttgttttcagtgagctatcattcaaggtatgtagtctgtcatactgccagacatggaagtccctctgctgctgcctgaggcttaaaagtcaatttcaagggtttcttccttggtcctcccctcttctcattctacaggccctctccctctagacagttttactcattcccactactttggtgctccttaccaattagtccctgacctatacctctgtgtgttttctatagctgctgaaacaactttatcacaaatctggtggttaaaaaataccatgtactatcttatagttctaaaggccagaagtctgaagtcagttccaacaggctaaagtcaatgtatcagcagggctggtttctcctggaggctctagaagagaatcccttctctgcctcttccagcttctgggagattattgctttccttggattgtgattccttctcacatcattccttcctcttgcttccactgttacatctattactccctctgctgtagtcaaatctccctctgtctctcttttatgaggacactcgagactatatttagggtctacctggatctccaggatcatctccctatctcaagatgccttacttggctgggtgtggtagctcatccctgtaatgccagcaccttgggaggcctaggtgggagaattgcttgagctcaggagtttgagaccagcctggacaacataatgagaccctgtctctacaaaaaataaaaaattagccaggcgtggtggtgcacgcctgtagtccaagctactcaggaggctgaggcaggaggattgcttgagctcaggaagttgaggctgcattgagctgtgtttgcaccactgcactcccatctcaaaaaaaaaaaaaattccctaacttaatcacatgtgtaaagtttcttttgccatgtaaggtaacatccacaggtcccagggattagaatctgggtatgtttgggggccattattcagcctactacaacctccaatcctcagctgcagactcaaactttcagtttctttctcaacttttctcattacccaggcgctttaaactcacttttatctaaaactgaactatattcaccagctgttagtgacatcaccatcttcccaagcatccaaatgcaaagtcagtatatactgcttcttttttcaccctttgtctccaaacagtcactgagtccttatctaatctacctctaaaaggtctcaaatccagtcctcttccttattcccactgctactgctttccagatcttgttatctactataattgtgacctaactgaatttcttacctctgtttttctatggccattaacctgttgccttgagttatcctttttttttttttttttttttttttttttttttgagacagggtctcactttgtcacccaggctggagtgcagtggtgcaatctcaggtcactgcagcctcgacttcctgggctcaagccatcctcccacctcagcccactgagtagctgggactacaggcatgcaccaccacacccagctaaagtttttttttcttattttttgcagtgacaaggtttttccatattgcccaggctggtcttgaactcctgagctcaagtgatcttgcctgccttggcctcccaaagtgctcagattacaggtatgagccaccacacccagctatctttctacaacccaaatgactaagtactgtcttcttaaaacttcctcaatggttctaccgctgtctactccataaaatccaagatcattcaaggccctttgcaatctggccataaagtgagagaccagtctcatctttgccatgctctactgagtactgtgtgttctaggcgaccaaactttatcgtatcctgaacaatccagcctcagcgcttttacatctcttcaagacgcagctgaatgcttaagttttctgagacgtgttgggagaccccgccacacagttagaattaatgctctattaacactcgagatattgattcaatcatttactgagggtcagctatgtctaggactctacggtaagcattgggcatgaaatggtgaacaggatgcagacagatcttttcctcacagggttcatagtctagagagggctccagacaagtgaacaggctgttataatatcatgcaagtgttctgacaggaaagcgtaagatggtataggaagagacagaggggcacctaatctagatatggacgatcatcaagaagttgcagctaatctgaaaacaggtggcaaataagaattaagggaaaagagggctggagagagaatgttccaggatgagggacaacgtgtgtaaaaacctagatatgagagaaagcacaatgtacccacagaactgaatgatcagcaaggctggaatggagacagtggggtggggaatgttgagagatgaggatggtgaggtaagcgggggtagaagtgatacagtattttttgctgcttagttcagctaaaaccaggttcttgtaacacgaccaggaaatattaggaacgcagataaactgaaaggtgaggagagggaaatttattaaaagaaagctctcagtgaaaaaagaagggagtatgctaactgtctcccacctcactgattgaataccaggccaccacacatgagctgaagcggccaggctcctccccgctgcacaaggtgcgaaattcctgtggctccaccccagtctctcagtgtgcaggtgggtcaccagtctgttgcgggcatgcacagacaaaactctggacaggttcccttatctgcacaaaagcatctgatgtaaacacttgtggggtgggtcagagattgtccggggacaaccttcccccgctaactgaccaatccctacccttatctgcctcctgcaactatcagaaggccatagtcagaagctggccattctaagtacaaaggagggccactgaagggttttgaggggacgtgccagcccttgagatagagtgacaaaaagagaaccagatgctggggagctggttctgttttggaatgttgtatagcaatgcactttgtgccctgctttctaccctgttggctcacctctgatgccagtgcagctgtggggaacatgtccctgcactctgacaccatcacttttgcttttctcctcacagctttctccagaattgggaaatccctcaacctggcaaaagtatagctcaaatgtgcctcagctaccatttcctggtggcagtcctcaaccaatgggtgccgggaattggtgaacaacgccccagccccccagcctccagagaaacaattctaagtgacatggatgatgataaccagtctatgcccacagtgattatcagctcagcaatgtaccctttactggcttttctccttccatatgtcactattcctgctccctcactcctgcttcctggaattaccttcccagaaaaacttcattcaggtaagccatagtcctaggctctacttgagggtaggggaatccaaactaaagtaagtgtctgtaggacttcaaagtaaagatccaagttagactttcaggagaagagatttggggtagaactataaacttacgttttcttcctaatgggagctgacaacacagaagtagatgaaattttccagtaatagaagaaaggggtctatgaggaaccatgaggaacaacaacatttctggcacaggcagaagaagagtcaaggagacagaaacgacaagagaggtagaagaacaaagaaagtttgcaacatggaaagccagggaggaggaagtttcaagaaagagtaggtgaatctatcccagcagcagccagggtgggcctctgtcctcgagcagcactggagccagactcagttcccggatcttgcagccgaggagcctctcaagcatccacagcccccaccagtgtggggacggtggatcctgtggtggacatccccggggatgtgactgcctgatggtggcagcaacagcagcaacatctgagaccacggagtgggggtctttggcagagaccccagggcagctgaggcagctgggcttcctcccagctccatcagcctttgggtccatgagaatcccttatcctttacagccctgccctggctctgggaaactggggatggcctctgtgacccccctttgagaggtgaagccagctggacttctgggtcgggtggggacttggagaacttttctgtcttacaagaggattataaaatgcaccaatcagcactctgtagctaggattgtaaaatgcaccagtcagtgttctgtggctagctagaggtttgtaaaatggaccaatcagtgctctgtaaaatggaccaatcagcactctgtaaaatggaccaatctgcactctgtaaaatggaccaatcagcaggatgtgggcggggacaaataaaagaataaaacctggccaccccagccagcagcagcaacccacttgggttcccttccatggtgtggaagctttgttctttagctcttcacaataaatcttgctggtgctaactctctgggtccgtgacatcttcaagagctgtaacactcatcacaaaagtccgcagctccattcttgaagtcagcgagaccaagaacccaccagaaggaaccaactccagacacaccctgacgtgggataccccatttcctgaggcatggagaggcatcaccccagtaagttgcccatgccctgtgctggcagcctcccttttacccccaaccatcctttgctctagcttctggccccaaatttgtccaaggagccccccattcaaatcctttccctgctgccacgtggccttccctgtcccacagcttgctctgcaagcctccaatgtctgaagatcttccagtgtcactcatggcccctttagtctcagcccagccataaacttcaatgcaaaggataagtctagattgatttcacagttcttttaacaagtggacttaaaagctagtggcaatacattccttctcctcagagttgaaggcaagttctccctgaagcctgggtgacacatgtccttttcctaagactggggaagagaattgggagtggcagccagttcggcaggaaatttgttagcaggggaagaaactcagatgggagtgaggaacttcacaggaaaagtctggaggagcatccaaggatgatcaacatttattttatgtgtgggaagcaatgcgactttactgttattgaccctttacaatatcccctgtaaatgtatgtttagggttttcttctgaaaaagaaagaaattgttactcagccagtaaatgatacttaaagagagaaagagggggaaaaaaggaaggaagggagagagaaagtgggagtagatgaaagtgagggcgagagaaagaaaaagaaaggaattgttattcagccagtaaaagatacttaaaaagagagaaagaaggggggaaa

SEQ ID NO: 8795 - DNA, 6000 bp, Homo sapiens
tagacagttacccaggctggatgcttgggcccaaaacagatggtcagcagacaagagatcatgacagatagttctgagggctgcttcgtgggtgacccaaagccagacagaggtgtatgagccttgtctgggcccagccagcctctgctgggcgaactctgagcctgaggcagggtatgcgtgctcaatcctagaggctcagggcttctctctacccagaacctgtgatgctggcatctgttgggctgagtcagctttgctgggtttaggtcccctccccaggttcctggactttcccccatcagtccaccttcctctgaggtctggaaccagtgtttcttgaagtgtggggcttggatcacctgcatggggattacctgggctgcttgttaaaatccagattcctaggccctgctccagacctagaactcggactctctggggacctgggaacacgctttcagccagtgccacagtgatttgggtatgccctagagattgatgatcacaccccacaccctctcagcctgagatcaagttcaggaaaggacgctatatagcctgagtcttgccagccctttccaaattttcctaaatcacttggtgacccatggcctaaataaaagaagaacttgccagtggctgtaacagaagaaggagaggaagttaaggcccatttcctacttttttttttgaggcggagtcactctgtcaccaaggctggagtgcagtgatgtgatcttggctcactgtaacctccacctcccaggttcaagcagttctcctgtctcagcctcctgagtagctgggactacaggtgcacgccaccatacctggctgattttttaaatttttagtagagacagggtttcaccatattggtcaggctggtctcaaactgctgacctcaggcgatccacccacctcggcctcccaaagtgctgggattacaggcgtgagccaccatgcccgaccccatttctactttttatgaaagcttaaaatacttaatcatggcctggtttctttttggttcagcctttattctaccctatgcttctgggagcttttgcagtttgcatagttatcaaaggagacagacagtatcatctagttttttgtttttttgttttgttttttgtttttgagatggagtctcgctctgtcgccaggctggagtgcagtgacacgatgtcggctcactgcaacctccgtctccagggttcaagcgattctcctgcctcagccccccgagtagctgggactacaggcgcgcgccaccacggccggctaatttttgtatttttagtagagacggggtttcaccatgttggccacgctgatgtcgaactcctgacctcaggtgatccacccgcctcggcctcccaaagtgccaggattataggcgtgagccactgtgcctggtagtgtcgtctagttgaaatgtttttttaaagaatggctaaagtactggagggaaatacaagttgctgtgtgtctgctgcgtggttgttgtcatgggctctccctgcaccatgacccccaggaaccccttgagtgctgtgtcttttctttcagcctcttccttttccttcatttatgcccttgacgtgtgcacgttggcactgtccaaggcttctggggcttttgtggtataaatgtggtggcttcctagcttttcctgttgatggcttgtccccagctctgccgagtctgctgagtcccttttaggtaggtctatttccctttactttccagtttttggaaccttgttttatacctccctttctttttgtgtgggttgccttttaaaagaattcttttgttctcgtagagttcagggagggagctaaactaaatgtgatatagtctaccaactttcctaatctatgtaatactttcttgtagctgcacatttctctaaactgccgcaacttccttcttcctcttttctttattttacttttttttaaaattgtggtaaaatatacataacataaaacttagcattttaactttttttttttttttttttgagacagagtttctctcttgttgcccatgctggagtgtgaaggcgcaatctcggctcaccgcaacctccatctcccaggttcaagcaattctcctgcctcagcctcccaagtagctgggatcacaggcatgcaccaccacgcccggctaattttgtatttttagtagagacagggtttccccatgttggtcaggcttgtctcaaactcctgacctcaggtgttttgcccgccttggcctcccaaagtgtgggattacaggtgtgagccaccgtgccctgccaacatttttttttttttttttgagacagagtctcactctgtcaccaggctggagtgcaggggtgcaatctcggctcactgcaacctccaccttccgggttcaagcaattcttctgcctcagcctccagagtagctgggactacaggcgcatgcgatcacacccagctaatttttgtatttttggtagagacggggtttcaccatgttggccaagatggtctcgatcttctgacctcgtgatctgcccgcctcggcctcccaaagagctgggattacaggcgtgagctaccatgcctggccaatattttgtttttttaagagacagggtctctctcggtcatccaggctggagtgcagtggtgtgattatagcttacagtaactcctgggcgcaagcagtcctcttgcctcagcctcctaaggagctaagactataggcatgcgccaccatgcccagctaattttttttttttcctcaaagagacggggtctcactatgttgcccaggctgatctcagactcttggcctcgagcaatcctcctgcctcagccacccaaagtattaataaccattttaagtgttgagttcattgatattaagcacatgcatcatgactatctgtttccaaaactatcatcatttcaaactgaacctttgtgcacattaaatgataacttcctgttctcccctctccctacctgctggcaaccaccattatattttctgtctctataaactgattattctaggtatctcatatgagtggaattataaaatatttgtcctacatttggttgatttcacttagcatagtatcttcaagttcaacttctttttggaacaaaaagggaatgaatgagtgagtaaatggagaatcagcattaattgacctgtatggtcttagcctctctggctgtctcagctccaaagtcaggcttttcctgccagctcaaaatatcctttagcagaatgcattaacatgtcaggttaactgtcagtgtctttaaaaatggttagaagggcatggcatacacagtgaagtagaatcctgcacttaggctagtcctgttggaaagagaaggacttgaggtacaggagagcagtggcctctgctaatgtggaatttgctccagctaccctgcagaccacccaggagcaggggctaagacagcgtcctccagaactgccctggctcccaggactgtggtggaggggaatcaaactccttctaggtggggacttcctgcaccaagtgttacttggggccgtgaaaatttggttctccctctacagatttctgcatgaatccccagacagtgctgctcctgcgggtcatcgccgccttctgtttcctgggcatcctgtgtagtctctccgctttccttctggatgtctttgggccgaagcatcctgctctgaagatcactcgtcgctatgccttcgcccatatcctaacgggtaagccgtgagcctgctcacagtgggagaggaactgctacagggtgggggcatcctgtctgagttgccggtgggggctctggtttctctgagcaggcacccttccaggagctcatgtgccaagctccagtctttcccagagtgtcagggtgtcagcagcctgctccagtctagctgctaacttgccaggatcacaaacccactcagcccagctgtagaggggaaatgttgctagaaattccacaaggaagctcacagctctctaaaatggcatttgaagctcagacctgacatgagtgaagaaggaaccaggcagtctcccgtgtctcccctggagctcctggtcagattctctcctctccaccttcctgcttccctacagacccgccttttcttgtatgtagctgctgtcctccctcgtgcctgcactgctgtgctggtttgaattgtggtgtgcctactccagctcccaagctgcatgaccctatttgctccttaagacagatggaatctgactggcctagatcaggtcagactgctgtccccaacctcaggccaggaatcccatggtcaagagagctcctccttgcagagtctggggccaggcaggttctctgagaatggggtttgggtagagaggctgtgattgggtcctcaagcatcctagctgtggagtgctcactaattccccttctgtgctgtccctctgtctcctagttctgcagtgtgccaccgtcattggcttttcttattgggcttctgaactcatcttggcccagcagcagcagcataagaagtaccatggatcccaggtctatgtcaccttcgccgttagcttctacctggtggcaggagctggtggagcctcaatcctggccacggcagccaacctcctgcgccactaccccacagaggaagaggagcaggcgctggagctgctctcagagatggaagagaacgagccctacccggcggaatatgaggtcatcaaccagttccagccaccccctgcttacacaccctaatgccagccctgggctctcttcctcggcagcccctccctcaactctgcagctcctctcgcacccagaggagctcctttccccagcaggcctcactggtaggatcctgaccatcttctccaaaccttccccaggagagactctgcctttagggtcatccaagtatccctgctctcagaaccggaggtccactggttttctataatgtactctttccctcctgccacatcctgcccccttcacattcacgagtcattaccagccagggaaggtcatccaagtttcctccagcatgggcgatatctttgggaccgagactttccttggagagctgctgagagcggacagtcccaaaaacaagtgtcaaagggcccaagggaaaggggactgtgccctggaggctcacttcacagggatcagtgtttgctccacagctgtagctctgggctgacgccccccagaccccttccttctcggagtgacccgcccccaggccacctgctccggggagttctgtgcactttactctttggacttctcctcacgtgtgccctggttttatggggagagggaatcgctgttgggaaggcagagcagttgcaaccctctctgcccttgcttcatgtggctggagcccaggcaaggagagcaggagccagcgtgagactgaggccccctggtgcctatcaaggaccagagtgaaggggactacatctcccagcccttcaccttttaaatatgagtggttttaaaaggaaaaaaatgaaaccaggcaacagcaacaatattctgtttttaaaatagggacaagactgttgtcactttttagacatgtatcccattccttttggctctgcaatatttggggctgtagctccttccaagcccatggtagtccctccccgagtctctcccagtagaatgcagcctcccttccctggccccttccctctcagtgacggtgactccctggggccttctcgtggaacccagaggggctgaggactgtggcctggctggcgggccagcgtggtgctcctcaggactgcagcactgagatggaacctggcctcagtttaggaacaggggccacaacagggcaggaacccaccaccctccacataggaatacaaccagtggggccacatcatgtgaggcatcagacccacactgtcagcccagcaggccgggctgtgtccttcag

SEQ ID NO: 8796 - DNA, 6000 bp, Homo sapiens
gattacaagtgcctgccaccacacctggctaatttttgtatttttattagagatggggtttcaccaggttggccaggctggtcacgaactcctgacctcagatgatccacccgccttggcctcccaaaacgctgggattacaggcgtgagccactgcacctggcctaccattaacacttctattaaataaactgaaaagggggagaaactggggaaaatattggccacagatgacttagattattagtgtttatgttatttgaagagtatctctaaacagatcaccaaagaagaaactgaactagtaagtttacatgtagaaaaatactcaacctcactgaaaatcgtagtactgcagatttaaataaggtaccattttgtgctgttaaattatcaagaatattttaaaattactgatggggttatagtgaagtcattattattcccacattgctgataatggggtaagtagccattacccttttggaaagcaattgttactaacatagatatcaacaacatcaaaaaatgtggagtttgactcaatggttctactcctggggatttatcctaagaaactaaagaatggaaaatgttacatgttatctggatgtgttattcattggggtatgagtaattcccatacctggaaactcataattcagggtgcttcttaaaaatgcattcttggaagttatgactccccaggtctgcaatgatgcttaatctgtatatttattaatcatactaggtgattctaattagagttgtaccttttaatgattggtatactctaaatgtccaatcagtaatggcaaattgtggtgtctctgcatgtgaagaatattagctagcttgtaaaaaaactttgttttagaataagacgggaaatgaaaaaattttgtctatactaattacaagtaggcaaaagacagccactagataggggaactagaagggaacagggaaaagtgaaatcaattaaatctgttgggccatcagctgaatttgttcataagggattttgtttctttagtcccatatgcattgctctctttatgtaatttctttaaaagtgaatttgaaattattttgaacttttcttccaggcatgttactaccagattcagcgtgagaagcttaactaggctgcataacagcttgaaaactggattatctactacagagtgttataacaccatctggagtcttcctgtagtggcaaaaaagaacagtgttgaaattggaaaggactttgtgttatttaggttgttagaatgagccttaccaataataagagccctgagcccagaaaaaaggactgtatagtttaaagggaggattgaaagggaggtaaaaaatcagattagaccagttcttggcctatgataagttccaaaaataccatttatctactatttgaaaaaagaagaggatatcccttcctacagtaaagggtatgtcagctacatgaagttgtaagaaaagcttccagtagagcttcttatattaaagaagttgatggatatttttgaatttctggtttgcctgaatccacctgcagttaccccgatccgtttgcaagaaccagatcgtacttgaaactatagtggccacactctgccttcctgagtcccttccagtcatgtgtgcatcatgtctctttgccaagggaggggagaaaggaacttttaaactgcagttttaactttttctaagctgtttcttgatgggagaggttctgtgcaaaactaccacattctgtccccaaaatgtggaatgcatccaaataggagtcttctgcctcttaacttaaaagaacataggaattttgtttttggtttctttatcatgctacagagagtgaatacactggaattcagacaccgactctgagctgctaggaacctcatttgtccatgtgcaaacgctgtattccaaggcctgtgaatggcagcctgaggaagttttgcatgcaggctgtgttttcgagcaggactaacaactgggaaataagcaaaaaactgcatcgatccccagcctggtgttgttcttccctatacttcacactgaactcaggatgggaagaaaaaggaaacaagctttggctttttccatctcaaaagtattgtggcacctcaacatttcagtgttttgctttttaaaaaatgccctattgtaagttgttggtttatactgtataagtaacactagtagctgttttgaataacataggtgctcttcctcatctcatctcctacaccgtggtgagcatacagagtgtcctgatttgtgttaagtgactgagaagatgttaattacttttgaaaaaggatcatggtttttgctctactttataatcaagacaagtgtttattaaaatactgttttggaatgttggctgtaatgtaacagcaattttcataataaaaggcattcatctttatgtggttgttttatgattgtagaagaaatgaacagggcagcctaaaagatgaaaggaaacccagacttagtatttctttagcccacattgtaatccatgcctctaagtattggcctcaaaagtccctctggggttttagaaatctctgtctttaaaataaacgtaaaccaatagttatagcaccctttctagcaaagagcaaattaactttctgaccccaataacccaaggacacgggtctccaaagaaatctattatttctttgaataaaaagcatattttgatagttactcgttattttttttcctcctaaacagatcgagggaagggaaggtgaggctttaaaattctgcttagaaacgttagatattaattatctcccagttgtaatgttttctcaagaggcctttccatcttgttgctgcctctaccagaatgtgcctgtcctctgttggaaggggaccaacccttaaaaatccgtttatgttaaatactttgcatttacattggagattgttttgagtttctgaacaaacacataaataaccacatttgcctggtaaagccaaatttacagaatttctgactctgggcgggggtggataatatgtggaaatggacaaacaaaaactttgagacaaattgacccattgagaagatttccaatgatgataggctgtctctgttctaagaaaagccatgttacaattcgtccttttactggagtcttgaatgaaactgttcagttactttggattcttcctactatatgcttttcagatagcatattaaagttataaattttgaagtgtattggaagaaaaaccctaaatctccaggccaatgtttgtaaatagaagtccttggcactcctgcagcagtttacaatggtcattcacatgcgtaatgaatgcttacagcagcccaaggatgcaggtgttatccccatttccccccatttttcagacaagcagtgaccaagatttgctcactgccagagctgggactccagcctagaacttccctactccctacttccctagaagtccagtgctttttgctactacagctgccagagatgtcatttcatagctggttatgtattgaaagttcttaaaagtgagttaaaaatgaaaatcttattgaaatcaagtgcttttcacaaaatatgctgtactcaaaacacaaatgtatcacattcccaacttgtgttttcatctatgatggagagataaggaaagccatgtgattaatatgggtagaagggctgaggaccctctgataattgccatttggtctctaccttttgccttgctgtcagcaataccttcctctcctttctgcaatatccccttccaaatgctctccccactgagcactccctgcagtattaagttttcagataaagaagtagctcctatctgagacagaaagcactatttgttaggttcagaacagtggcttgggaggggattgaccagaaggtactgtttttgatgggtttctattattagctgaacagtcttcagttgttttctcaccataacatgagagatttaataaggttagtaggttattggcttatttccggtcctgccacatttttttctttcattaaaaatgctatcttctgttgtggaatgtctgtcatcttgaactaatcaacaaaaatactatgtttttctgccgttaactatgtgttggcaatttgagagaaaatactagaatgtaggtttgaaaatgatacaaattagacttcaaggaatacttaagaagatttgtggcaggaaaggcttgtgagtaatttagttgttaggctgggttaggcatctgtggattacatcaaagaggatgtgcagagattttatcgggagcagtgaggtgactttggcagctaacaggccactagtatcctactaaagcttttgtctggataggagcaacatgcatgtttacagtcttgcaggtaagagaccttggcaaataatcctcagttaccagaagatgtatccataactgcctagcttgcctgtcagtttttaatagctaaagatataaatctgggtaatctaactcaaatggcttagtttcattttaactcaaatgatatggggaattttatgatcttgaaagagcaggttttgcttcgagaagccatttcttcagtatggaataatgagttgtcaggaagattgagtacaatgggcatttgccctggtcctaatcaacagcatttggacccagaggaagccagctatttttgtaagggccatttctcatcattaagtttccaagtgcttttttagggtttgtctagtaaaaagcactattttgaaaaacaagcatagtaagggtagggggttgtggcatttaatagtacgttttaaaaagctaatggaaatacttttaaaacaagatttaggacaaattccttaggcatcagtcacactaatgcatcttctgagtcaagaactggctatcctttctgtgtactcagtccggaattgcatgtggtgggtgcttacttatttgcagtctcaatcaagaattctcactctcaagatagcagaaatagataagcttcaactgacaaatttggtacagaagtcatggaaaggaaggtaagtcttttgccaggcatcatgccaggcatcagcatctttcaggactaaggaaacaaaagaggaaaactcgattttactacatgttaactctactgaatacctccttgaatgtcagattccttatctgtaaaacaaaggttttgcatttgattatctctaagatccgcttctgcccccagttttaaagtttgatagggaaagaggtttaagtcaggataccaggccagggaggaaaggaagggagggcacaggcctctggagttcagctgcctcccccattaggattgaagtcccagctgctggctactgccttgagggaggtatcagccttttacttctggatcttggcctctccttgttctaccccttcccaacaacaactgaacataccaagtgcttgctatggcccaagcactgttgcaggtgaagctgcagcatgaacaagataagcaacatctctgctccccaggccctctgcagacatgacacctgcgggagacagacactgagcaagccagtggatacaagaactgggaaaatgagaagtgctatgagggcaagaagttgcaactgttttcttagctacctggagggagggaaaatcattttctggaagtttttttctatgagttttgtcttagctttggctgtcataacaaagtaccatagacagtggcttaaacaacagaaatgtattttctcatacagttctggaggctggaagttgaagattgggatgccagcatggttgggttcttgcgagggttctcttcctggctttcagatggccgcgttttcactgtgccatcatctggcagggagagagagaacacatgaactctgatggctcttacccagacgctaatgacatcttgaggcctctacctcatgaccttaacccagttacctcccaaaggccccatcttcaaa

SEQ ID NO: 8797 - DNA, 6000 bp, Homo sapiens
tattccacacacgtctatattacatgttcataaaatgcacacacactacatatatttgtatatacatacttattattttatttatttatttatttatttattttttgagatggagtctcactctgtcacccagctggagtgcagtggtgcaatctccgttcactgcaacctccgcctcccgggttcaagttattctcctgcctcagcctcccgagtagctgggattacaggcacccaccaccatgcccggtaattttttgtacttttagtagagatggggtttcactatgttggccaggctagtcttgaactcctgacctcgtgatctgcccacctctgcctcccaaagtgctgggattacaggcatgagccactgcgcccttccttatttatgtttttttttaaacggggtttcactcttgttgcccaggctggagtgcagtggcacgattttggctcactgcaacctctgcctcctgcgttcaagtgattctcctgcatcagcctcccacgtagctgggattacaggtgctcaccatcacgcctggctaatttttaaatttttagtagggatggggtttcactgtgttggccaggctggtcttgaaatcctgacctcaggtgatccacctgcctctgcctcccaaagtgctgagattacaggcgtgagccactgtgcctggcctatatatacttacttaatgtgggcacttcctattaaatttttagaggctcaatctgttttcagaagggttattagtcatcgtagatatttgtgatatcatttttatatctttccccaaagataataaacaaacagaaaagacaaacagaaatagctgagaggccatgagagaagtcttacatttatgaaaacttttaaaagaagtatgaaaaatgaaacaatgtaggaagtctgtcctgactttttaagccaaatttctcaaaatatccttctctttaaaagtatgaaaagtgaacctgtgtcaagcaatactttgagtaaacctgtgaaaacaggctttaggagtgtgcaacaccttagtgtgcaaggacttcaacattgagaacattgaaaatatttgggaagttttgctaatttgttgtcaatagaagcagcatgttctcaagtgaccatcagttaatgaggtgatgctaggtaccatgcaggcaaggtgaaccaacgtgggctctgtttctatccagttaattattactttttaatgcaatatacttatttatttatttatttatttattttttgagacagagtctcgctctgtcgccagactggagcgcagtggtgcaatctcggctcactgcaacctccgcctcccggttcaagcgattcccctgcctcagcctcccgagtagctgggactacagtcacacaccaccatgcctggctaatttttttgtatttcattagagacagggtttctccatgttgaccaggatggtctcgatctcccgacctcatgatccacctgccttggcctccaaaagtgctgagattacaggcatgagccactgcgcccggccaacttaacgtacttataagaacaaattgtgaggaaacgtctagagaaggtgaccacaaagtcattttgggactgtgtattctagatttctggatactaatattttcctaacctgttaaagcctgtttgaagttgtgatgcctgaactatgataatcgaaataaaaaacttggttacacaatatttaaaatatgcataaaattggctgggcatggtggctcctgcctgtaatcccagcactttgggaggccgaggcgggaggatcacttgaggccaggagttcgagaacagcctggccaacatggtgaaatcccgtctctactaaaaccacaaaaattagctgggtgtggtggcgcgtatatgtaatcccaggtacttgggaggctggggcacaaggattgcttgaacctgggaggcagaggttgcagtgaaccaagattatgccgctgcagtccagtctgggccacagagtgagactttgtctcaaaagaaaaaaaagcatagaactatggaaatgagtataagatttcattgtacacaagatttaatgttttgcaaaatttgctctattattattattattttgagacagagtctcactctgtcacccaggctggagtgcagtggcacgatcttggctcactgcaacctctgcctcccgggttcaagcgattcttctgcctcagcctctcgagtacctgggattacaggcgcatgccaacatgcctggctaatttttgtatttttagtagagatgggggtttcaccatattggccaggctggtcttgaactcctgacctcatgatccacgcgcttctgcctcccaaaatcctggggttacaggcatgagccaccatgcccggcctatgttattaagaaagaaataaaatattataggctggatgtggtggctcatgcttgtagtcccagcactttgggaggccaagacggggagatcacttgaggtcaggagtttaagaccagtctggccaacatggtgacaccccgcctcaatacagaaattatccaggtgtgatggcaggtgcctgtaatctcagctacttggcaggctgaggcaagaggatcatgtgaaccctggagtcggaggttgcagtgagctgagattgaaccactgcactccagcctgggcaacagagtgagactccgtctaaaaataaaataaaagtatggaaatgaatataatttttttgtacacaagatcgaataagtgttttgtggtatttgctctatgtattattaatacataaataaaatattatataggtggtcagaagctccatctccctggctacccctatttccccggatccttttcctgaatttggtgtgtttctttccatgcatcttggtatacttttactgtatgtatacatatgcgtaacagcgtttcttaatgcttcatagatttcaatatttatataagtataaataacgttgagaaaaaagcagtttgccaaaaaaattctccatatattctggcagctaagcatttgctggttttatgcattataaatttcattttcaagcctgtgtcttgtctactgtctttttttatggtagctatgtacatataatttaaaatcgggtaaagttaaattgattgttctttatggttattattttgcccttgtttaataaatcccctatctttagatcaatgaaatagccccctatattttccacttgaagttttaaaggtttttttgtttgtttgttttttatatattttttattatactttaagttgtgggttacatgtgcagaacgtgcagtttggttacataggtatacacatgccctggtggtttgctgcacccatcaacccaccacctacattaggtatttctcctaatgctgtccctcccctactcacccccgcccctgacaggccccagtgtgtgatgttcccctccctgtgtccatgtgtcctcattgttcaactctcacctataagtgagaacatgtggtgtttggttttctgatcttgtgatagtttgctgagaatgatggtttccagcttcatccatgtccctgcaaaggacatgaactcatccttttttatggctgcatggtattccacggtgtatatgtgtcacattttcttaatccagtctatcattgatggacatttggtttggttccaagtctttgctattgtgaatagtgccactttaaaggttttaattcgtatttagctctttaagccatctagatttacttttgtatagtgtgaggtgtgagggatccaaacctactctttttcctgataatggaactcatttcagttgccctagaatcaattcttttctctctcttttccccactgactcctagtagtccccttggtcttacaaatcttttgttgtaaaactatctatgaatgtggctttgtaatgatgaggctttttaacttttactcttgacagagctgaggaaactttttaaaatcatattcattaatttcgatattttgttttaaaattaaaaattagatacaaatgaatgttcatattagaaaaaaatgctcacttagtgaaaataatttaatccttgatgcaaaaatacttataatatttatttctcctttccagttagaggctatatttattcatcaatttattccatatttattgctacctactatgtatgaatagctgctctaggacataaagatcattcaatgacaaatacggtgtgtcaatgatactgcaatccatattcaactatgattagtcccattttattagatggctaaaactgtatggcttaacttgatactgtggagtcagattggtgatcaagtaagatgcatatcttatcaatgatcaataaacccaacagagaatttgtacccatgctgcatgcctactccaaggggaccgagactagggcaggtgataactgggtggggcctttgaggatttccagcatttgtgactccaaagtagccaggaggaggaggacttgggtaatgcaggtaagctgctccctggtagaagactggggttccaaagcagaaactgaattctaagacgccagcacagggatgggattgagagacaaagcagcccccagagggcaagggcgggagcaaagcgaaaggatctgaggtggttgctcaagtgcctggtgctgattttgcttggccttaggtgtttcttatgaggcttgggaggaccagcctgccctaaagtcctgaggtctcagtggatggtggccatgtgctttattcccttgcctcactgcattttgttttgtcagacttgagtgctgcctacactaaattcatagtcttgtagaaaggctgttggtaaagctttcaacacactgcctttaaagaggagacacttgacaatttccttttgcctcattttcttttaggttttgtgaatgattctgtgactaagtctattgtggctttgcgcttaactctggtggtgaaggtcagcacctgtgtgccgggggagagtcacgcaaatgacttggagtgttcaggaaaaggaaaatgcaccacgaagccgtcagaggtaaggggatgcctggtagcttgtaaatacacatatttacatgaatatttacctgaataaatacataagtatgtgtgtgttcttacccctttcatccttgctctatctatctatctgtctgtctgtctgtctgtctgtctgtctatctatctatctatctgtctatctgtctgtctcaagccaagttgatatatacattctttttgtttttgagatggggtctcgctctgttgcccaggctggagtgcagtggtgtgatctcggcttaccgcaacctctggctcctgggttcaagtgattctcctgtttcagcctcctgagtagctgggaccacaggcacacaccaccatgccctgctaatttttgtatttttagtagagatggggttttgccatgttggccaggctggtctggaactcctggcctccagccatccccccgccttggcctcccacagtgctgagattacaggcatgagccactgtgcccagcctgatagataaaatttaactattagaagattctctctattttctaattccttgttgccccgtttcagcccaattaaattccttgctcataaacttaacggagtagttttaaaactgaatggtggttggacataggacatgagtatttagagacatcaggactgaagatttcagtttgggactcatctgaatatgaatggaattaaaaccactgggatggggaaagtgcactgtatacattagcaagagtggaagggaagaaaacaggtgcatttgctaaagaggtcctcagaatgtacagcttcaattatatgccagtatgcaacatatagatatttaaatctccatatgattttcaaagtaattgtaatgcatttgtgtagtgatagatcctcttgctttggtataaagtagagatt

SEQ ID NO: 8798 - DNA, 6000 bp, Homo sapiens
accagcctggcgagcatggtgaaacctcgtctctactaaaaatacaaaaattagctgggcgtggtgggcacctgtagacctagccactcaggaggctgaagcagaagaatcacttgaacccagggaggtggaggttgcagtgagcagagattgtgccactgcactccagcctgggcaacaagccagactccctctcaaaaaaacaaacaaacaaaacaaacaaacaaacaatccaaacatcaaaggcttcccaatccttttatcataaggacctgaatccttatgatggcctataaggtcttctatgatctgcagcctaataacctctcttgtcatttattcacctttgtattctcagcaccttgcacagtacttggcaaataggagttcaataaacatctgtcaagctgaaatgaactagaagagtgacttcttaaatagcactgaagctcttagagcctcaatttcattacctgtaaaagagtagtaaatagttcaattatctgtacattcttttcttattctaaagttctacaacttttacatgttctagggtagaactaccaaaacaaattgaaaaatgattaatacatcaggttttgattttctcattccctaaatcttactgacttcctctaaaagccagcagatccattttttttccctaaggaggggagagttgtttacaactgtcttgcctatctttcataattgtaataattgtatcacctgtgagaatgctccctctgctgggcctgacctgtgaaggatctagatcatagccccatcacagaatctcccagggctcccgcaatctctttccccacgaagaatggcctctgtgctttagtgtatctctttctccagcctttatatcccagacttagtatgagattccgatatgtccaacaaatattcctgatccctaaaacttatttcagctttgcatacctggggacaattcctgtgtctcaaactttccaaggacagcccatctctaaagctagttcatattaacctgaagcccagagatggctgctggtaccatccttctctcaggcagcatcggaatcattttaggtgtctgttctctcattctctatgttctatcagtcatcctacatctattcattttcctccatctttgtttttaccctcctgataagcttcaattttagaacaaactcctgactggtcttactgcatcaagaccctcctctcctcatccactactatcaggcaaactttcaaaaacactggctttattcttgtcccatataaatacctttatttgtaatttttctataaggcaaaggccaaactctccaatttggcacctaaagcattccattttctggcctccctttatccagatcttccactatttctcagtataaacctactcttgctaacttactgtcttccaaatataaaccattcattatcatctctgttggggccaacagtgactttactgttgctaaatccagcatttgtttctcagtcctcatgtttttaggtctgggcagcactgacttagctggtcactctctcctcttcgaagcactttacttggctcccaggccaccacactcccctggttttcttcctacctcacctcactgtttgcattcatcttatcttctgacttttaaatatttagtctccccaaggttcagtctctgggcctctctctgtcttttaaatttacattcacttccttggtatgttgtccagtttcaggactttatatgttttactcaactgaactccagagtcctatattaaattacctaacttagcctcgccacttcaatgtcttaaagaatcttaaatttaacaggtctaaaaccaagttcctaccctccacccccaagcccatctcccaacaaaacatgctccattcactgttttccttgtcaggtgaggccaatttcttacttagctgaggccaaaaacctggagagagccttaactcctctctctcacatcacactgaatccatcagcaagtcctatagctctgccttcaactgtctgtaaatcttgatcatttttcaccactttcactggtcaccatcacctttcactttctttacgtggctttcagaagacaataaccccataaccagccacctgacttcttgcttctactgcatcccttacaatctattcctaataaagcagtgaaagtagtactgaaaaaaaaatggaagcccgatgtcacacctctgctccaagccctccagtggttccttatctcccacagaacaaaagccatcctctcccagatggcccgcaggatctggcttcccattcttttccgaagaccacctacactgcatctcctaccattttcttctttttcactcagctccagccacagtggcctccaggagaaggagaggccttatcccatcacccactacatacacacacaggcacacacacaccccagaatattttcatttttgatccctcttcctagaaatgtttatctagaggtctgcatagcttgtgccctcacctcctttaaatcttttctcaaatgatgccttctccaagaggccttccttcaccacttatttatttacttacttacttaatttatttttattttatttttatttgagacggagtttcgctcttgttgcccaggctggagtgcaatggcgcgatctcagctcaccgcaacctccgcctcccgggttcaagccattctcccgcctcagcctcccgagtagctgggattacagtcatgcgccaccacacccggctagttttgtatttttagtagagatggggtttctccatgttggtcaggctggtctcgaactcctgacctcaggtgatccgcgcctcgacctcccaaagtgctgggattacaggtgtgagccaccgtgcccggccttagttaatttattttttgagacagggtcttgctctgccacccaggcagtgtagtggcatgatcacagctcactgcagccttgacttcctgggctcaagcaatcttcccacctcagcctcccaagtagctgggactacaggcacgcaccaccatgttcagctaattttatttttaaaaaattatctgtagagacagggtctcattatgttgcccaggctggtctcgaattcttgggctcaaataatgcttccaccgtggcctcccaaagtcctgggattataggcatgagccacgggtagtgtctacaacagtacctggcacatagtaagatctcagtaaataaatattgggtgagtggatctctacacctttgttcacgctatcttcttcactggaaatgtctaaattctacgcatctttcagaacatggggtttaaattagggaaggtaagcagcacagagaaggaaatgcagccccaagatggatgaaagtaaagaggcacagcacgtttgttttaaagtggtttgagtgtccaggccagataaagtaccgaaagtcctcagtactgaaagacatttcagatgagcctcagagccaaggcaaagaaagtgtgagcaggtatagaaaagactggagactggataatatcctgactttcaaaagaaaaaaaaaaaaggagaaaaaggattcctcaattcctcaatctacacataagtaatattctagaataaattattaaatagaagtttgtaagcatttaggaaaaaataaggtgattcttagagacctaaaaggatttcagtaaaaatagactcaaactactatgattttcttttttgacaggattactaaattggaaggctggagaatggctgtgaacatagcatatctggattttatcaaaaactaacagaatctcccatgatttcattacagataagaaatatatagatagataaggtgaaatgttggttacatcattgaagtgttctgtttcttcccagttggtggaaggaacatattttacagctgatgattagaagcttgatgaaaatctacaggaacattttgcaagaagagttagactttggttttaaacatttccacaacaacttttagccatttggatgaagccagaaggcaaagctgccatgtctgttcagcagaggaggctgaggggaaatgacagatggaaagtcacatcaggactcaagataatctcatgggatcatcatggcttttttatggcttctaaattatgtatcaaaacaaatgtaataggtaaacgtcacctatacctgggttggaaaaggctgctctatcagtaggaagcatagggaagacctgaactggttttaagtgatgacaagttcagtataagcagtgggaagctgccgcagtaggaagacagtgtaatccgagcacgcttcagtcggggttgaggatttctacagtagctggcggcatcagaccccatctgaagtagtgtgcccgcggaaacctatccggacatcaagaggcctttcagcaatactgatctagggaaccactgaagaaagggaggatttttggctcgcaaaatagattacagtgagagggtgtaaagatttccaaataaatgcctggctgtcaatggcagtttctcaaaaagatcaaagtagatgttccagggaagggagacgttaagcacaggcagtttccagggtgatgcgtttccctggaagccggactggaccccagggctccagcgcaggtggagaggttgggcctcgccaaaagagatcctgggaaacttccaggacttccaggagccccgagggctcgagcgttcacatacgcgccccgccccggggcggcccgggcagagagactggcgcggtctctcctggcgcccttcggccatcgcgcgccgccgtccccgggcccccggaccctgggcgcccagcctgcgcgggacacacccaggcgccgcctcccaggggcggccgcgtccttactgaactcggaaatcgctggccggcagcgccagcgctggaatcgcccccgcgcctgggagtggcctcgcgaggccggcgcgcgccccggggccgaggaatccgcctgcccgcccaggcgtcggccacgagagagcgggagcctcgctggtccccatttcaggtactcccttggggcacctttcgtggtcccacaagatttcccaactctccagctttgcaacggcctccatattttcccgcgcgtcccgacccccgggtcctcccgtgccccggacctgctcagatgtctcccaaggctattcatcagggagcaccccaatcccggcctgctccgcccggcgcccgcggcccctcacctgtagaaggccgcgttgaccctcttttcgctggggaagcccagcatcccgcagaccacgtggctgttgtgggcgctccagcctttgtcgcacacttgcgaccagccgtcaggaagcctgacttccaccagcccctccgtcacgggcaggggtcgtctgccccacccaacggcgggtcgaattcgcacctcctccacttgcaggtgatgctctacctgggggcggggccacaagcagggaaagaatcccagtggcacctttcatgtgtcccgccgcccttaaggaaccctgcttggtgtgcctgctgtaaacccagtggcgggatgggcccgaggcggcgctgagagagcggccacgatggccgcagtccgcggtgtggactctcttgcagccagcagcgcgtgggatgtgctgtgctcccagagaggattcagggcactaggaaggaggccctccctgtgcctggagcaggagggagcacttcaaaaaggaaatggctttgaaggaggagaaagtcagaaggaagatgtctcaggaaagcaggaacatttgaggagaaggagagcaccaggtgccccaggggtgactagggatgaagctggagaggctcatgccaggtttagccccttgaatgtgaatgctaaaaacctgttggattttacagcatctgggagctctatcatttgcttttccaagtctcccaccaatccaaatgatcccccaggggtaactacct

SEQ ID NO: 8799 - DNA, 6000 bp, Homo sapiens
taggtttaggtttattctccctctggttcattgactttcttggatttgtgggttcatagtttcatcgaatttgggaaaattttcacctattatttctttacataaagtttctgttatccccctttctcctttccttctggactccacgtgcacatacactagactggtatatttctacagagaactgattctttttcatttttttcatttcattttgaattatttatattgctatgttttcatgtctattgatcctttcttctagtgtctaccctgctattagtggatttttcatttcatatattttatttttcctctttataaattccattcaggttattttttgtatctttcattccactctgcatcatgttcatgttttccttttcatctttgagtgtatttgtaatagccattttaagatttttgcttctttcctgaactgttatttctgggccctttcctattgactaatttttctcctggttatgggtcacactttcctgcttctttgtatgtccagcaaaattttattggatgcttgatattttgaattttgcacaggtaagtgttggattgttttctttagagtgttttgccttttcaggaacttttggatggttgatcaagtagcctttgttctagaattaatttagccgtacttctaatgtgtggtcattctaggttccctactaaatgccccttatagttgataatgcctctacactctagctagagggaatgtgaattctttctcatcatgagctcaaggaaatgttcatcctacagatccctactattctttcatggtaagttattcttgcctggcctcatggggtttcatgttgtatatattcagattattcaaccaaagaatcaaggaggggacttctatgcaagttattgttttgtttttatttgcatacctctgttccttccaggactctgccctgcaaattctagctgcttttgcctccttgagccatggtctctggctcaactcagtgggatcattagactcatgtcttacagcctggtgacacttccatgcaataagccggagtggtctgttcagtgaccacagtactgcaacacctgccaaccagtgtctgaaaatagtggctcatgtattttgtccagtttctagttgcttacagtgggagggtatcctggactgtatttcccctgcatggtcagcagcgcacctccattgagtctgcatgtgtttaatctgatggctctgttggctggcgtctgttataggttataagtatagctgcctgtgcttccaccacgagcacctggggtgtcttgtggcatgattgagctagctctgaagctgactccctcttctcactccctgccttttctcccttaccttttgcagaaaaggtgtgagcggtactgggcccaggagcaggagccactgcagactgggcttttctgcatcactctggtgagctgtgggagttttcaaggaagattcccagggtggaaaggctttgggttgggcctaaaaggttgaatgatttaacccacagtccactcatactgcaggaaaccctctggtgttagcctgcaaatagttagaacttactatagggatagcctttgcatttttattttggctacaatcagttaatctctgtcatgtaaatgtgcctggttaggttgttgaaattcttacttctcttaccatttcaaaagagcttggggaactctctcaagtcatacatacagttagtacttaataaatgcaataaaagtttcattttagaacaaaagacatctcttttcattgcaaaagggcttgtgtttttataatagttcctcttttgctcctgtgtcaaatgtttccttaatgaaagctttggggaaagtttgggctatatgaatttttaaaatgttttctgtatttgattttttaatcaggaatgctttgctttctataaatgtcttctggtacctatgatctttgttctcctccctcttcttacttgccccaccccccttactcagataaaggagaagtggctgaatgaggacatcatgctcaggaccctcaaggtcacattccagaaggtactgtgacaggggaggaggaggtaaaggggctcctgaaaggggagaggtttcctctcctgtaaaaatgggcatcatactagtacccacttcctcagttattgtctggtagacataaatggaagatgcctagaagtgggcctggtgtatagtagatggccaattaatgcttttttcttttttttcctaagtcttttgctcatctttttctgtgtttcaggagtcccgttctgtgtaccagctacagtatatgtcctggccagaccgtggggtccccagcagtcctgaccacatgctcgccatggtggaggaagcccgtcgcctccagggatctggccctgaacccctctgtgtccactgcaggttttggaaatgggcttcaggagggtctggtgaggcagaggggacagagcatggaggggagtacagggcatggggctagtcttgtagtctgagtgcctattttgagaacccttgctcaccctccatggactgtaattgtgagcacttgttcagcacagactcagctggggaataagcacacagctcttgctcaacaaaatgtaagtgattaaaaaggttttccttgttcagatataatctgaagattctgggaatcaagaggctctgcaggggatccatcaggaccctcacccccatccccaaatgccccatctaaaaggggttgtggtcaggacctgaccaggcacactctgattctcttgtcagtgcgggttgtgggcgaacaggcgtcctgtgcaccgtggattatgtgaggcagctgctcctgacccaggtacgatacaggcatcctgtgtgtgcagtgtgctgcccatgaccacgtgtcctgctcaagtgccttgtctgtctgccccagatgatcccacctgacttcagtctctttgatgtggtccttaagatgaggaagcagcggcctgcggccgtgcagacagaggtgaaccctgggtctcctaatcttcagggacagtggcccactgctgtcatttgcccctgccttcccttcttgatggtccctcaccccaacaggagcagtacaggttcctgtaccacacggtggctcagatgttctgctccacactccagaatgccagcccccactaccagaacatcaaagaggtacagaggctcctttcccactctcctgtccaccatcagcaccctcagagaccaggaccccgagcagggtccagcccccgggactactgggagcaggcactgactatgacatccacctgtgccctcctccaggcatccttatcaggctctcccatcttaagctttctcccagagccccttgagaggcctggccagcttcctccctcaggagcctcccctcctgtttttcttcagaattgtgccccactctacgacgatgccctcttcctccggactccccaggcacttctcgccataccccgcccaccaggaggggtcctcaggtacccggctccatccccggattcttccctgcccaatttctcaggctaaccccttcttcatccttggaacaccagtccgttccttgttcacttcgccaagtgttcgctggccctttcttcgaattgagctctgggaacccaccccaagatgattcaattatcccaagatgattcatttaccccttgcctctgcctctaaggcttgccctgccttctgagttaggcctttcctggatcctctaatcaaaccttaattcaggtggctcacccctgtaatcccagcacttcgggaggccaaggagggcggatcacttgagcccagctggagaccagcctggttaacatggtgaaaccctgtctctactaaaaatacaaaaattagccaggcgtgctggtgagagcctgtaatcccagctactccggaggctgaggcaggagagtcgcttgagcccgggaggtggaggttgcagtaagccgagatcgcaccacggcagtccagcctgggcgacagagcgagatcctgtctcaaaaaaacaacaaaaaaaattcagcaaataattctagacgccgccttcttgtcaggccgcacgttgggtgctgcggacatgggattgagccgccttcgcagcggagacttaaggcccttgtccttgcggccatcccttcctgtcttctatgccacttccgcattcttttgttcagtagacgttgacacagaaatgaccacccctcaaaccaacactctgccccaaattaccctccaggctgaccccgttcctccttcatccccctaacttgcagggcgctagggacacagaagcgaggcctccaacccaaggagccctccctcccatctagcgcaccgcctcggcgggaaggaagcccgtggtttgcgcgctgagcagcctccccactcccgccctgcccagcgccgccgtttcacttcctcccggccctccctgcctgcaggagcatctctgtgcccgggtccccgggccacgccatggctgacacctacgcggtggtgcagaagcgcggggctccagcgggcgccgggagtgggacgcagacggggacggggacggggacgggggcgcgcagcgcggaggaggcgccgctctacagcaaggtgacgccgcgcgcccagcgacccggggcgcacgcggaggacgcgagggggacgctgcctggccgcggtgagtcgaggcttgctccttctcagggcatcatcctgctgtgatccgcagggcggaaccatcctgcagtggtccgtcaggccctggcggccgcggggaccccagccgctagcctggccacgccccgacgctgatgtccaggcgtccctggccacgccccggaagcgccccctggcggtcgcagtcgcggtccaggggcagggttcctggcaatacttgtcttggccgcgcccaaaggctggaggccacgtccggggtgtgtgccttctcccgcccggcgccctcggctctccccttcgggcctccggggaagcgtccccgctaggggtggggtcttgggactccctggggcttccggagctgacccgtggggggtctgctgccctcagttcctgctgaccaaagtcctgccggatctggcgcctacgaggacgtggcgggtggagctcagaccggtgggctaggtaagtcaggtagagcctgggttgctgggactttgctgctttgagtgaacccaggagtctggggttgatggggcatggagcttagtcctgtggatgtggctgcagtgaaccaggaggacctggaggcggggggatggccttcttcatgtctgccagcttccacacacctcagcttctccatgagacccacggcacccttcttctcccaggtttcaacctgcgcattgggaggccgaagggtccccgggacccgcctgctgagtggacccgggtgtaagtctaacgccagttcctgcctgttgcctcttgtgagctcggactgctgatgccccggtgctgctgagcgccgtgcgcagaatggaaacagtgggcctggatcaaagttaaagtttctcagggtgggaaatgtgggggctttgccccaatgactgtagcattcaaggcttgaggctggaggaggtagctagggtatagtggctggtgaggctgcacagagcagattcaagaaagaagatcaggaaggggcatgacccctgagttatgaaggggagaagggacagatgagcttccggagactgctctcctcaccacacagcactagtccatcctcagcacctgagcctccctcacttggacactcaggggaccacacagagaagtggatggacacttcgccatccaggcagaactaagccaggcataaccacagccaagcagattaaccccaggcagaccgataaaaagacctccagataggcagacagacagatggaccaccaacctggacagacagccaaa

SEQ ID NO: 8800 - DNA, 6000 bp, Homo sapiens
gcccaccccagccggagagaccttgcccgaagtcaccctcttccatgctatgtgccctgtagctgcagtttactggtgagcttggtagggcacagagaggatggcaccaccagctggagggggacaggccccaaccatgagcccaggatgcagagagcggcagggatcaccggagcccccccggctctggtgtcttggctcttcctgcacacggtctccacatgacgcccagcaagccggatctcaatttgttcacccatcctttattttctgtatttatgactagtatttctccagtttgtcttttgttggccttagtgacagtgagttttcctgttgagtttctattctgttggatctttattttagcagcggataggcaaattttgggtgatgtttattaatgcaaaatggaaggtgatgatatgtcacacacatccttctgcttcctgcagcagtttcgctgtgtgctgtgtcagaacaaaaacaacaacatcaaaaaggaaacaaaaaaccagtaaagagtgatggggaggacacttcttggaataattcccttggatgcccgttgcgggttaagtcagagatgaactgacttgggaaaggagctgaggaagaaatccaagaattcaagaaaggaggtgctggaactcaggctgtatttccgcaggtgcatggaatctcgcctgtttcactctggtaaattactcatactagctcctactaccatgaggaaacacagtcttcagaaggtgacaattagcaaattagagaattgcaaagcctgttttaccctgagaacctgaaccctttcttattcctgaagggctttccatcaaggagtctgtgtggtgggcaagagactggatcaattgaaaataacagaaattgtcacagtgttcttctagcaactgtcactcaccataactatcccacccgaggcttaaccagaaccctcccttccaagagctgaagtcgccctgagaaagaatgaacccgatacctgtccacccccacaggggccatcaggttgccatggagctgggctgtctgagtcttggtccagcctgttcctggccctcatctggggccctaatgtatgtcttaaacgctacctctctcaccatctaaatatgaagaggaagaaaagagaagctgattcctggggctaaggcattttagtgtggaagccaagtaaaggcctcagagtcactcttgtcttctgtctttgctgtttcactccagtctcaaaagcaatcctggtcttaggtcttagaatcacagactgccgaatgacagcacctgccctcagttcattttgccgcacttcttactttgacggtgccatttgtgggattcctgtttgcccatcttcctttcgtgccgaggaggcaagtgcatcccttcaccaggccaccactgcaggtgtgtgtgtcagactgaggaacagcagggagaggagaacagcatatggtaggcagcccaggggaagcatgctgggcccttaacccagaaggagggtctcagtgtgtccagttgctcatttccttgaaagaaaacccagatgtcctctgaggtgaacctagtgatagttttcccttgtagttttaaatgtgctcattcaaattagaatgcttagccatccgtcccatattccggcatttttcctttaacctatgtttgcagggttgtgagttgtgctgaatagtatgaaatgtgttattagtggacgcaccactgttgacctcagagcatgtgactagacagtgcaggaggagatgttgtcatgttactttggatataaaacgtccctaggtgaccttgtgggcctgatccacggtgaaaggtggggagagggtactggagcagggcagagggactggatgagcctgcatggggaggaaggcgtgactgagggaagacagctcagccccccaggggaaacctgagttcagtgttggggaatgtgaggacacaatggcggggcaggatggccctggcaccagcggtgctggggaccgtagggggccatgctttgtgagaggcaaacttggctccaaggatgtgaggctgggagcatggaggtgaaaaggccgagagacagtggggagctgaggcaggcagggcagagacggggggcccagcagggcctggggcaagaaattaaggatggggcagggtacctccagcaacttagtcacactgaggggatgggaggggtagcaagggactgggtggggacaaagtgacaagatggggagtagggaagtgggcactagtttgtgtgttaataggtcagcaagtcttttagagtcctgggaagtaaaataaaaattaaaacaacaaaaacaagccggacagggcagcacattcctgtagtctcagccactaggtaggctgaggtgggaggatcacttgagcccaggaggttgtgtctgagcctcccagctactcgggaggctgaggcaggagaatcgcttgaactcaggaggcggaggttgcagtgagtcaagattgtgccattgcaccccagcctaggcaataaggtgagactccatctcaaaaaaagataataataataaggggaaaactcagagatggaattacatgcaccaggtgtagtgtgagcaaaggattaacttcctgatacattcttgtttcccatatatatagctatcaaggtcatcttttagtaatgagttaagttctttcttttccaactcaaaatttgtctgcatctttacccaaatatccagatctgatactctaggcttgggctaatatagtggggtggaggaggcttgggttaaggtttaaagttccaagggctgaaccggaataaatggtgtatttatcaagggaagagcaaggcaaaaccagcaagtccaaaccatggaggcctcaaccgaggtgaggggaaaagttagggagccttaggaaagctctgaggagggaccccaattagggggaccgtagttagggtatgaggtttgtgagatcaggactggaattgctgcaagagaccctatgattgggtggcagcagcacgttgtggagatgagcctgcttcctcagcctcttcctcttgtcagaaccctttgcctctccctacacacgcacacacacatgcatgcaccatgctacagaaacctttctcagtcttgccattctctcaaattatgcgttggtcttcccttcatcttcagattctttaaagagtaatcaaagttcccacttctagcatgatgaagtgaggaggtcaacaaatctttccaaaatgtaactgtatagctggacaaaccatttagcattctgcaattttaccaaaggcacggcacaaatggggatgtgtttaagaatgaaagctggccaggcgcggtggctcacgcctgtaaccccagcactttgggaggctgaagcagaaggaccacttgagctcaggagttcaaaaacagcctgggcaacttggtgagacccccgtctgtacaaaaaaaaaatcaaaaaaggcatggtggtgcacacttgtggtcccagctacatgggaggctaaggcgggagaatcatttgagcccaggagattgaggctgcagtgagctgtgatcacaccactgcactccaacctgggcaacagagtgagacagaccctgtccctaaagaaaaaaaagaagaattaaagtgagccttggataagaccagcctgtgtccgtggcatctttgcccaggctgctacccccatttaccccagctgttgataacacacacagcggcccccagcagggcagcctgtggagataagctcccctgccacctcgctgcaggggctggaggcaagagtgaggaaggttttgatttgcagcatggctagttaaggtggtgatatcagtgaccaggaggaagaaaggccactgactcctagcctgaggctctgggcctttggagacgagcaaacgacctgcagattagtcatggatgtaagagggagctccgggaggtcggagagccagagggagcttagtaaactcttcacactacccaaatggactgaaggctcatagctggcagagattagagcaagcccaagccatgtccatatgcccagggcacacagcctgtgtgtgtgccggtgccagtgttaggaagtaaaagccggaacacccttgcaaatggcccggggcgtgcctcctccccattgcacatagatccagcagcagatggtggaaaccatattggctttaactgatgtttgactgacgaactatgcaaacaagaagcgacctctagggagtcagtctgaaaaattaaagcaaacaaatgccaacaataaaacttagcaatgacctgagtgagtgcacactgtggaggagacaggcttcctgcatggagtccagccaggagacagtacagaatgcatggagcagctattggaagacattgaaaactaaatagttgcaggcagctttcccaagaagaccagaacttgaagtaccaccaaaccggtggtgagataaccatgtttcccctatggcatcccgtgactaacctggcagtgggcaccagggtgcagatagaaagagctccagaagatgccctctatttctggctcaagtaacgggaaaagggtctcctaacattccgagggaatccagaagttcgttcctccccatttttcttttccctgttctctcatacctcagcccacaagcagtcccacagtggcactggcaccagccccaagaggagcccaggagccaagacgcaggagggaaccttctccaactgacagagctgtggtcccaagagggcagaaacaatccatgttgcttctcttccaattcagtcctcccactgcttggcttcagatgtagaaatgcatggtagagccagataccgaaagcctgttttctgcttggaagactaaaaagagaagcctcagcaaatgaaagcaacagggtaattgctgagagagagttaatcagtgaagcaaccccattaacctgtctataaaccccagggctcattcttgagctgctcctgcatagatctcgtcctgttcaacacaccaaagattgacagctgaactgagagaccatcacccacagacacaactggccactgggtggtgcacaagtcagacagaactgaatagtcctgtgaagactctggacactgaactgactttggaaccagactgcagaatggaggggtgggaacttgtggcttgaacctaatcaggtagattgcctggccaaaatgaaaatacctatcatctccataggatttaatttcattcaatgattttttttttttttagtaaatttgcagtgttttacagccttccccaaaatctaattccaaaatatctctatcaccccaacgagagactccattcacgttggcagtcacatgcactcccagatttcccctccacccagcccttggcaatcactagtctactttctgtgtctttgagtttgcctactctggatatttcatataaatgaaatgatatatgaggttttgtgattggcacctttaatttagaataatgttttcaaggctgattcatgttgtagtatgcattggtacttcattattttttatgcaaaagtaatattctattgtatggctataccacatttttctttgagacagagatctcactatgtcgcccaggctggagtttagtggctcttcacaggcctgatcacagctcctgcatggatcaaggagcatcactgcagctgcaaactgcagcttcaaactctccggctcaagcgaccctcctgcctcaacctccccagtagctgggcctacaggcacgtgtgtctgtgcccaataataccacattttaaaaatccatcttcagtagatggaaatttggattgtttccaccttttactaataaaaatagtactgctataaacattcatgtataggttttcttttgtttttgttttttcttttttgtagagatgggggtctcgctgtgttgcccaggct

SEQ ID NO: 8801 - DNA, 6000 bp, Homo sapiens
gcccaccccagccggagagaccttgcccgaagtcaccctcttccatgctatgtgccctgtagctgcagtttactggtgagcttggtagggcacagagaggatggcactaccagctggagggggacaggccccaaccatgagcccaggatgcagagagcggcagggatcaccggagcccccccggctctggtgtcttggctcttcctgcacacggtctccacatgacgcccagcaagccggatctcaatttgttcacccatcctttattttctgtatttatgactagtatttctccagtttgtcttttgttggccttagtgacagtgagttttcctgttgagtttctattctgttggatctttattttagcagcggataggcaaattttgggtgatgtttattaatgcaaaatggaaggtgatgatatgtcacacacatccttctgcttcctgcagcagtttcgctgtgtgctgtgtcaaaacaaaaacaacaacatcaaaaaggaaacaaaaaaccagtaaagagtgatggggaggacacttcttggaataattcccttggatgcccgttgcgggttaagtcagagatgaactgacttgggaaaggagctgaggaagaaatccaagaattcaagaaaggaggtgctggaactcaggctgtatttccgcaggtgcatggaatctcgcctgtttcactctggtaaattactcatactagctcctactaccatgaggaaacacagtcttcagaagttgacaattagcaaattagagaattgcaaagcctgttttaccctgagaacctgaaccctttcttattcctgaagggctttccatcaaggagtctgtgtggtgggcaagagactggatcaattgaaaataacagaaattgtcacagtgttcttctagcaactgtcactcaccataactatcccacccgaggcttaaccagaaccctcccttccaagagctgaagtcgccctgagaaagaatgaacccgatacctgtccacccccacaggggccatcaggttgccatggagctgggctgtctgagtcttggtccagcctgttcctggccctcatctggggccctaatgtatgtcttaaacgctacctctctcaccatctaaatatgaagaggaagaaaagagaagctgattcctggggctaaggcattttagtgtggaagccaagtaaaggcctcagagtcactcttgtcttctgtctttgctgtttcactccagtctcaaaagcaatcctggtcttaggtcttagaatcacagactgccgaatgacagcacctgccctcagttcattttgccgcacttcttactttgacggtgccatttgtgggattcctgtttgcccatcttcctttcgtgccgaggaggcaagtgcatcccttcaccaggccaccactgcaggtgtgtgtgtcagactgaggaacagcagggagaggagaacagcatatggtaggcagcccaggggaagcatgctgggcccttaacccagaaggagggtctcagtgtgtccagttgctcatttccttgaaagaaaacccagatgtcctctgaggtgaacctagtgatagttttcccttgtagttttaaatgtgctcattcaaattagaatgcttagccatccgtcccatattccggcatttttcctttaatctatgtttgcagggttgtgagttgtgctgaatagtatgaaatgtgttattagtggacgcaccactgttgacctcagagcatgtgactagacagtgcaggaggagatgttgtcatgttactttggatataaaacgtccctaggtgaccttgtgggcctgatccacggtgaaaggtggggagagggtactggagcagggcagagggactggatgagcctgcatggggaggaaggcgtgactgagggaagacagctcagccccccaggggaaacctgagttcagtgttggggaatgtgaggacacaatggcggggcaggatggccctggcaccagcggtgctggggaccgtagggggccatgctttgtgagaggcaaacttggctccaaggatgtgaggctgggagcatggaggtgaaaaggccgagagacagaggggagctgaggcaggcagggcagagacggggggcccagcagggcctggggcaagaaattaaggatggggcagggtacctccagcaacttagtcacactgaggggatgggaggggtagcaagggactgggtggggacaaagtgacaagatggggagtagggaagtgggcactagtttgtgtgttaataggtcagcaagtcttttagagtcctgggaagtaaaataaaaattaaaacaacaaaaacaagccggacagggcagcacattcctgtagtctcagccactaggtaggctgaggtgggaggatcacttgagcccaggaggttgtgtctgagcctcccagctactcgggaggctgaggcaggagaatcgcttgaactcaggaggcggaggttgcagtgagtcaagattgtgccattgcaccccagcctaggcaataaggtgagactccatctcaaaaaaagataataataataaggggaaaactcagagatggaattacatgcaccaggtgtagtgtgagcaaaggattaacttcctgatacattcttgtttcccatatatatagctatcaaggtcatcttttagtaatgagttaagttctttcttttccaactcaaaatttgtctgcatctttacccaaatatccagatctgatactctaggcttgggctaatatagtggggtggaggaggcttgggttaaggtttaaagttccaagggctgaaccggaataaatggtgtatttatcaagggaagagcaaggcaaaaccagcaagtccaaaccatggaggcctcaaccgaggtgaggggaaaagttagggagccttaggaaagctctgaggagggaccccaattagggggaccgtagttagggtatgaggtttgtgagatcaggactggaattgctgcaagagaccctatgattgggtggcagcagcatgttgtggagatgagcctgcttcctcagcctcttcctcttgtcagaaccctttgcctctccctacacacgcacacacacatgcatgcaccatgctacagaaacctttctcagtcttgccattctctcaaattatgcgttggtcttcccttcatcttcagattctttaaagagtaatcaaagttcccacttctagcatgatgaagtgaggaggtcaacaaatctttccaaaatgtaactgtatagctggacaaaccatttagcattctgcaattttaccaaaggcacggcacaaatggggatgtgtttaagaatgaaagctggccaggcgcggtggctcacgcctgtaaccccagcactttgggaggctgaagcagaaggaccacttgagctcaggagttcaaaaacagcctgggcaacttggtgagacccccgtctgtacaaaaaaaaaatcaaaaaaggcatggtggtgcacacttgtggtcccagctacatgggaggctaaggcgggagaatcatttgagcccaggagattgaggctgcagtgagctgtgatcacaccactgcactccaacctgggcaacagagtgagacagaccctgtccctaaagaaaaaaaagaagaattaaagtgagccttggataagaccagcctgtgtccgtggcatctttgcccaggctgctacccccatttaccccagctgttgataacacacacagcggcccccagcagggcagcctgtggagataagctcccctgccacctcgctgcaggggctggaggcaagagtgaggaaggttttgatttgcagcatggctagttaaggtggtgatatcagtgaccaggaggaagaaaggccactgactcctagcctgaggctctgggcctttggagacgagcaaacgacctgcagattagtcatggatgtaagagggagctccgggaggtcggagagccagagggagcttagtaaactcttcacactacccaaatggactgaaggctcatagctggcagagattagagcaagcccaagccatgtccatatgcccagggcacacagcctgtgtgtgtgccggtgccagtgttaggaagtaaaagccggaacacccttgcaaatggcccggggcgtgcctcctccccattgcacatagatccagcagcagatggtggaaaccatattggctttaactgatgtttgactgacgaactatgcaaacaagaagcgacctctagggagtcagtctgaaaaattaaagcaaacaaatgccaacaataaaacttagcaatgacctgagtgagtgcacactgtggaggagacaggcttcctgcatggagtccagccaggagacagtacagaatgcatggagcagctattggaagacattgaaaactaaatagttgcaggcagctttcccaagaagaccagaacttgaagtaccaccaaaccggtggtgagataaccatgtttcccctatggcatcccgtgactaacctggcagtgggcaccagggtgcagatagaaagagctccagaagatgccctctatttctggctcaagtaacgggaaaagggtctcctaacattccgagggaatccagaagttcgttcctccccatttttcttttccctgttctctcatacctcagcccacaagcagtcccacagtggcactggcaccagccccaagaggagcccaggagccaagacgcaggagggaaccttctccaactgacagagctgtggtcccaagagggcagaaacaatccatgttgcttctcttccaattcagtcctcccactgcttggcttcagatgtagaaatgcatggtagagccagataccgaaagcctgttttctgcttggaagactaaaaagagaagcctcagcaaatgaaagcaacagggtaattgctgagagagagttaatcagtgaagcaaccccattaacctgtctataaaccccagggctcattcttgagctgctcctgcatagatctcgtcctgttcaacacaccaaagattgacagctgaactgagagaccatcacccacagacacaactggccactgggtggtgcacaagtcagacagaactgaatagtcctgtgaagactctggacactgaactgactttggaaccagactgcagaatggaggggtgggaacttgtggcttgaacctaatcaggtagattgcctggccaaaatgaaaatacctatcatctccataggatttaatttcattcaatgatttttttttttttagtaaatttgcaatgttttacagccttccccaaaatctaattccaaaatatctctatcaccccaacgagagactccattcacgttggcagtcacatgcactcccagatttcccctccacccagcccttggcaatcactagtctactttctgtgtctttgagtttgcctactctggatatttcatataaatgaaatgatatatgaggttttgtgattggcacctttaatttagaataatgttttcaaggctgattcatgttgtagtatgcattggtacttcattattttttatgcaaaagtaatattctattgtatggctataccacatttttctttgagacagagatctcactatgtcgcccaggctggagtttagtggctcttcacaggcctgatcacagctcctgcatggatcaaggagcatcactgcagctgcaaactgcagcttcaaactctccggctcaagcgaccctcctgcctcaacctccccagtagctgggcctacaggcacgtgtgtctgtgcccaataataccacattttaaaaatccatcttcagtagatggaaatttggattgtttccaccttttactaataaaaatagtactgctataaacattcatgtataggttttcttttgtttttgttttttcttttttgtagagatgggggtctcgctgtgttgcccaggctg

SEQ ID NO: 8802 - DNA, 6000 bp, Homo sapiens
gttacttacatggcaaacggactttgcaaatatggttaagaacctttagatgggagatgatcctggatgatctgggggcccgagggagtcacaatcgtccttataagagggatgtaggaggatcagaaagaggagaaaggaatgtgaggatggaaacagaggtcagagtaatgtgctttgaagaggaagaacaggccacgagaagttgctacctgtaataaaatgtcaaataagatctagaggcttgaggagaacctgaggttatctgtggagggtggaaggcttatgctgaagtggccccctgagagcagagatcaggagtaagggacgatctcctagtactcacttgcagaagtgacttaaagctgctaaaagggtgtgtgtcagggctttggcattctgccgcagacatagaaagacctgatactgttttgacttcatgtgtccctgtagccattcagcggccaacatttgtatagtactttatctttctcagcttatttctaattagcgataattaatactcttagtattaatacgagttaatttgtaattcttacaaaagagtgtgagataaatgagcatgtgctgtctttaatttccaaaggaggaaagcactctgtgccgtctgagctgcccgcgatccagtccctaagagggaccatcggcaggcggcttcctggctcttggggtccgcacaggcctgtggtagccctgtgagggtcggctcctgcatagaaccctgcctgacttcccagaggaggccatgagaaccgtcaagaagttcatggactcaggaggacgtcgtcagcagtgctgaggtcatggaatgtgggctgggaccttgtgtttggtgacgttctgtaagtactcggcttgctcaagctaactgcccggctgggatcaccgctctaggaggactcaagagttcagatgagtggcccaggggcccgtcagtgctgtgcacctcgccccccgtgggcgggggaggagcctggggacttggccagtcctggaggagccctgagaccaggccctgtggcgggcaccacggcacggggaggtgcctggagggctggagcccacttggggggccttggtcagtcggggctgcagaagcagagaaatgcggggtgcccatgctggctgggactcgcccactgccctgcacatggcgagtgagggagagaggcaaggcacctttccaggggtgcatgggaggctgcggtcaaaggtcctgcacacccgcatgcatgctcacatctgtagctacagacactgacccccagagacccccgagctcatgtggggctggtgtaggcgtggggtggacactggggcagtgtgggctcctcctcctcctctatgcgcgtgacggggtgggggtggccccttcccttgccctggaagctccggccccctccccaccctccctgtggccccagtagacagagccctggcccctgccttgggccaggtttggcagagggggccctggctggaaactggaggcagatggaggggagctggggttgcgggctggccgtgtcccctaacccctacacagcccagctctgctcctgctccgcctgggtgttctgcaggctggggtggaggtgctccaggactaccccacagcccggggccacacacccctggagcgatccctatctctgtctgcgccctggcctccttcctgccaagaccctgactgagtcaataggcttgactttcataaactggccaacaagattgagaccacacttggagtggaagatggggccgtcttaagcccttgccccctgcacgggtcagcctgtggccaacgttctgggccgagcctcctcctcttgctccacgctcttcccaccctgagaggggcctggtctgggtgggtctcctgggacccccagtgttcgaacatgacctgaaaagcagaaatggaggctgaagccttggcgaggaggccagcacttcccaatctcaccttccacagctgatgtgcagggccgggggagtgttggtaatcctcccaggacacacgtgtctgcatttaagggtgtgcctgacatgaaaggagatttattcaatgatgtttgctaaagactggaagcggactactcaggaccagtgcggtgggtgctgggaccagggcagtgggattttgcagtggtggagagagatttaggctccactctgaatatggctccagcaagtgggatttgatagcccaggagcagagtggggtcctcggatggaacatcactaagaacaaacagcaggggtggggggttctggctgaagggaggcagggtcattcgtcatcacctgggtgcccgaggacgagcaggctgccctgacgaggatgatcagatacggggcggggcagttctggctgaagtcacttagcagtgttcttgctaaaaccggattttgcaaggaagtgtgcaggtggcctagaaggttcaagggcctgatagagtttggccaagcaaagaatctcgtcactgagaattagaatcaagggcaggtggctaaatagtgccttgtagattctctccagcttttgcggcccctccctccacatcctgctctgggtagcccctatcctgcagccatgacccagattcctgaagaggggatgactacacaggggcctggatgctgggtggcggcctcaggggcgggaggcaccgggagaggcctggccggagagccccagggacccaggtcaggtcaggacccagtgtgtagcggagcttgggctcatgaggtcagagctggagccactgcacatcgtctcccagggccggggctcccagaggacatgcagtgtctgcagttttctggggtgcccccgtcctccgcgtggcactctgcgtgttggggggcctattgcgagctgctcatcctggcttcttgggagcagcgtggcctgagcaagggaggctgcccaggaccggcgcctgtggggcggggctggtcacagggtcttggtccccgagggctgattcctgctgaatgcttcaatggccaagggtggatccctctccttccagcctgaggctgtttcaggaagaaacagtcaggccccggcaggtttccctgcccaaggggagagtctgaggaggggccgactcggcaggtggagcagggggccactttcatcgagtttgtgttcagaactcactccagggtccttttcttttggggccaggcaggcagcaccgtgtgggacattattagcaaggagaggaggggcccgggagagctcacagggcgttttgggagctccgtagacaggcaggtcctgaggacttttggaaaggatagaacaaggtcccgggcagctttgtggtggtcgagagcgagggaggaggtggcctccctgagcgtggatggctggatgcaggccccagacccaggggcagaggccgagaagggaaggcgggggcccagggaccacacttggcagggtggagggggcagggggagccacttgctggggaaacttcaccggatgatctgggctgaggacgcgcgagtgtggaagaaacggcgcctcccccgtgccagatgctgcccaccaccggcacagggccagagttggggtcagcagggcagccgtgtgcccccagtgggagcttggaggtcacggaggaaatgcgagaccagatgcaggcaggggagtcctccggagcctgcaggagggggccgctggctcaggggcaccgggagacccccacatggacagggtggaaagggctttcttcaaagccaggatcttgtccccatcacagcgtcccgctacgcattgggagcgcttgctgccaggaggctccccagtcccgcagcagcccctcagcggctgccctccaaggaaggggcgcacagacactccagggctccacagcgcgcgggccaggggccccatctacccccggggcagcgggactgggcgtgagcccggcctgggacacagcccctgcgactgcaccattgttaggggccttctcggagctggcagacctagaaccaggcctagggggtgggggtgtgcctggatgtgtgttgcgggggtctgaacccttagttaggaccgggggccctcctttccacttcgtgcagtccctggggtctggggcatcctagccatgcgtggggcctccctgctgggattggagaccccctgacagctggggctggtcccagcattttcgctcttcccccagaaggactcagatgcagggtcttctctgctccccgtcacacagagggtggcacccccgatgggaactctcatttatcaccaaaccagaagataatggagaaactgacagagaagggctgcaagcagctaccgcagggcggtgtgtggatgcagatgggatgggcagatggaggcgggggccagcatcgctgccttcttgcccctcccagaggaccccaggtccccagctcgggcgccccaccagactggtaacacctgcgtctgctgtttggcaccgggggatgaatcacttgcttttctttcaacagtgttctgtagtttccagtctacaagtcttacacttttgggttaaatttattcataattattttattatttttgataatattataaatggaattgtttacttaattttacttgaattgttccttgctggtgtataagtagacatctcattttttttagttgacctcgtatggtacaatctctttgaactcatttattatcactgatggtttgtctttttttttttttttttgagctttcattaaggttttctatagataagatcatgtcaagacaccctcagaccacagggcggcgccaccagcccggccgagtgcagctggagcgccgacgtccccgaggatacacagtgctgaggcagaacgcaggttcgtcacagtgggcctccgtgggcggcgccgcacgctcgtcacagtgggcctccgccggctacgccgctgcttcagtggcttgcaggcactttcctcttggaagtggcgactgctgcggggctgagcggtgctcgcacgcgtctcgggagccaggttggcggcgcgatgaggcgcagcaaggccgatgtggagcggtacgtcgcctcggtgctgggtctcaccccgtcgcctcgacaggtgagtgggtctggaagagagcggcggcctcgacccggccgggcggcggcggcctcgacccggcccggcggcggcctcgatgggtcaggggtcatggctcccgacgggcgctgctccctggcgcgctctgttgaggcggcggcctccacccggcccggcggcggcctcgatgggtcaggggtcatggctcccgacgggcgctgctccctggcgcgctctgttgaggcggcggcctcgacccggcccggcggcggcctcgatgggtcaggggtcatggctcccgagggcgctgctccctggcgcgctctgttgaggcggcggcctcgacccggcccgggggcggcctcgatgggtcaggggtcatggctcccgagggcgctgctccctggcgcgctctgttgaggcggcggcctcgacccggcccggcggcggcctcgatgggtcaggggtcatggctcccgagggcgctgctccctggcgcgctctgttgaggcggaggccggctagcgcagtcctgtgggcggcgtggcgcttgcaagcgcaggaagagtcctggggggaccgcggcgggcgggagacctttggcgccggctcttcctctttctcccggtttgttcccgacggtgctcgctcgtgggctcgccctggcccgggctttctggccccgtagtacccgcgcggcctagttctcgggggcttgggcacccgggtgctgtatcggcgggtttcttcccatgtcctggacatttactttatatgccgcggcggaggtcgtacctccttggcctggaggaacccagtggggactgacgcagctccgggtgagctttggcggctgcgtcgagtgacaaggta

SEQ ID NO: 8803 - DNA, 6000 bp, Homo sapiens
tgagtcctgaagacctccctctggagcctcagtaaatttacttaatctaattggtctagatgttggggtgatttttttttttttgagacggagtctcactctgtcccccaggctggggttcaatggcgcaatctcagctcactgcaagctccccctcggtgccggggtgattacccttatcttgcctcccgctaagtcacagaggtttggggagttctttcagacccccaataaacttgtctgtggagacctggggagtttcttcagacccgcaataaaactggtttaatcctaaatgggtcctgttgagaactccttcgttatgggctgggtgcggtggctcatgcctgtaatccaaacactttgggaagctaaggtgggtggatcacgaggtcaagagatcgagaccagcctggccaacatggtgaaagcccatctctactaaaaatacaaaaattagccgggcgtggtcatgcatgcctgtaatcccagctactcaggaggctgaggcaggagaatcacttgaacctgggaggcagaggttgcagcgagccaagatcctgctgctacactctagcctgggtgacagaggaagactccatctcaaaaaaaaaaaaaaattccttcattattgtgtcatgctttaaggcccaggacaggcctaggcaaaagttttgatggccttttgttacatcccagcctttgtataagggcactggcttttagtatttaacttcattcagtaattactgaaacagttgttatgaaagtctgcattagtgagacctggcctgccacaggaggttgcagtgagctgagatcttgccactgtactccagcctgggtggcagtgtgagactctgtctcaaaaaagaaaaatgatgcagaaagatttgtttgacacagggtgggcataaactttcaatttgtaaaaaacatagtatctgtgaagtacaataaaatgtagtgcgataaaatgaggtatgcttggacagcaaaacatcatgttgtacctagtaaatgtatacaatttttatttgtgaattatacctcaataaagctggacaaatgaactgtatttgcaacatggtagggaatatatgacattggacactaatgcaaatggaattttcagtgccttggtgaaaatgttataccactgaacaaaaaaaaaatgtagtgtaaaatgaagtaaaatgtgaaaatccctaataaatgcagaaatatgaactgcttatccaaaagagaaaagtcttttgagttcctcaagaagattctctctttggatgctgggcgcggtggatgccgggcacctgtatccgagcactttgggaggccgaggcagatggatcactggaggccaggagttcaagaccagcctgtccaacacggtgaaaccccgtctctactaaaaatacaacaataacccgggtgtgatggcatgtacctgtaatcccagctactcaggaggctgaggcacaagaattgcttgaacctgggaggcagaggttgcagtgagccgagattgtgccactgcagtccaacctggaccacagagtgaaactccgtctcaaaaaaaaaaaaaaaagaaagaaggaaaaagaaggttctctctttgggcactccttttcgatatattcaacataaatggattaatgataccatttttactaggtgagtatgtttgggcaagttgcttcagtgctcattctcttggtttcctttttttttttttttttttggagacagggtctttctctgtcacctaagctggagtgcagtggagtgaacatagctcactgcagcctccaacacctagcctcaagagatcctcctgcttcagtctcccaaatagctgggactactggcaggcaccaccatgcctggctagtttttaatttctttttttttgtaagcacagggtgttgctatgttgcccaggcaggtcttgaactactgggctcaagtgatcctcccacctcagcctcccaaagttttggattacaggcatgagccatggtgcctggctgtcttttgctttccttatctgtaaaaactgaggataataacagtacccttacaaagttggtggaagaatgatattaatacaaatgaagtgctaacagaaagagctttggaacacagcaagtacttgttagctatggctattgttatcaacacacttttcaaggcaaacttgtggtttcacctatcacctgagatatatgacttttaagtccatcagatcttctcttttggtttttatttttaaattaattaaatattattattattattattttgagacagagtctgctctgttgcccaggctagagtgcactggcacgatctcagctcactgcaacctccacctcccaggttcaagcaattcaggtgcctcagccatccaaagaagctgggattacaggcatgcaccaccatacccagttaatttttgcatttttagtagagatagggtttcaacacgttggccaggctggccttgaactcctggcctcaagcaatcagcccatctgggcctcccagtgtgctgggattacaggcgtgagccatcgtgcctggccctcttttcgttttagagataggaatctcattctcttccacaggctggagtgcaaaggcatgaacataactcattgcagtctccaatcctgggctaaagggatgtttccccctctgcctttggagtagctgggcctcagaactgtgccgcaactactgacttccatcaagatctctgtcctaccatttcatcttcctactaggctatccccacatggatatataaatggtacctcaagtgaaagaaatcaactacctaaaataggattttccactccaaactagattttctttacatgtcatttctgttaatgtgggtcacacacactggtaagctcagaatcatctttttcttttcttttattcacatccaatattgttgaaataaaacaaaatgctgtttttccttttttagaaaggcaatacttgttcattatatcaaaatttagaaaatatggaaaaacaaaaaggataaaaaattatccacaaccaaaatagcccaaatttccagttaaaaatgtcaacgcatttgatatttgtccacataattcagactgtaatgtttacacaaatgtgagcttttaaaatctaaaaggttctcactattaaaaatgttttgttaaattttgttttaaaagtaagattttaatatccaaattcccaaaatagacatttttgaagatttggaaaatacagacggctcaaaatctttacattattactgttaaattttggtatgttctgttattctgctagtgaaatatatatagatttgggggggctattccttttcctttttttttttttttttgagacaagggtctcactctggtgcccaggatggaatgcagtggcgctatcacagttcattgtaacctggaactcctggactcgagggatcctcccgcctcgacctcccaaagtgctggggctaccagcttaagccactgtgccaggcgaatggctattcctatatacacagttgacccttgaataacatgggtttgaactgcctgggcccgcttataagccgacagaaaatacagtattggaggggcctgcatatagagaggtctgacttttcctctaagtgttccacccgcaggactgactgcgggatttgagaatgcgcggacttcttcttcttctttttttttttaggaagtcttactctcgcccaggcttgagtgcagtggcgcgatctcagctcactgtaaccctcgcctctcagtttcaagcgattctcgtgcctcagcctcccgagtagctgggattataggggcccacctccacgcccaggtaattttttgtatttttagtagagatgggctttcgccatgttggccaggctggtttcgaactcctgacctcaggtgatccgcccgcctcggcctcccaaagtgctgggattacaggcgtgaaccacagcgcccggcggaatgcgtggattttggcataagacggtggttctggaaccaatcccccgccgagatgactgtttaaaaaattgtaattgtccaaaacttaatatttgtggtctttttcattatgcagttctaaatctccctttttttttttttttaaattcagacggagtctccctctgtcgcccagacggcgcaatctcggctcactgcaacctccgcctcccgggttcaagcgattctcctgccttagcctccggagtagctgggactacaggcgtccgacaccacggccggctaattttttgtatttttggtagagatggggtttccctgtgctagccaggatggtctcgatttcctgacctcatgatccgcccgccgtggcctctcaaagtgctgggattacaggcgtgagccaccacgcctggccctcatttaataagatatgaatttaaaaatgtatgctttagtattcacacatgtccgatgcaacgtatttaaccagtcatctccagaaactttgttccaatttacacgttcaccaaattggcctgagtgctttttttcttccaatgcattgcgcacttataatttagaacaagtgaccaaaacgcttaagagcccatcacgcaaattgttatctgctggaaatctacgccctaggctgtggacactggcggccgaaatctgatcccggcttgccaagacaccctcagagcacgcggcgctgccaagagcctggccgagtgcagctcgagcgccgacgtcgccaacgtggcgcacactgctgacgcagtacgcaagttcgtcacagtggtcctccgccggctgcgccgcaagttcgtcacagtggtcctccgccggctacggcgctgcgtcactggtttgcaggcgctttcctcttggaagtggcgactgctgcgggcctgagcgctggtctcacgcgcctcgggagccaggttggcggcgcgatgaggcgcagcaaggctgacgtggagcggtacatcgcctcggtgcagggctccaccccgtcgcctcgacaggtgagtgggtctcgaagagaccgacggcctcgacctggccgggcggcggcctcgcgctgctcaggcgtcatggctcccgacgggcgctgctccctggcgcgctctgttgaggcgccggccggctggcgcagtcctgtgggcggcgtggcgcttgcaagcgcatgaagagtcctggggggacagcggtgggcgggagacctttggcgccggcgcttcctctttctcccggcttgttcccgacgcttgttcccgacggtgctcgctcctggggccgccctggcccgggctttctggccgatcgcgcaccccgtagtacccgcgcggcctagttctcgggggcttgggcacccgggtgctgtatcggcgggtttcttcccatctcctggacatatactttatatgctgcggcggaggtcgtacctccttggcctggaggaacccagtggggactgacgcagctccgggtgagctttggcggctgcgtcgagtgacaaggtaggcatctcagcgcggacatttgcaatggcccgacggcgcaaatgacactgaaagtccccttgttttgagtatgaggtgtttgtcgctgtccctttgtaagggtccagctccactccgctcctcatactcacctccctcgcccccctccccgcccggaacactttggtagctgcctttgcttaaaaaaaaaaaattctaaagttcttacaaatcgttagtatggcttgcaatttttaaccttttccacaaatgttttaagggtatttttcctctttacatgtaaataatgtgatctattttggattcaataagactttagtaattggatctaaagagtgacggaagaagctattaaaggtggatgtgcgcagaatcttgagtcagtttgctttggcttgaataatcacagcactgtcgtttataagctgggtatttggggccagttacac

SEQ ID NO: 8804 - DNA, 6000 bp, Homo sapiens; identical to SEQ ID NO: 8801

SEQ ID NO: 8805 - DNA, 6000 bp, Homo sapiens
cctaagagcaatgcaaaagcttaagtagggggagggaactggggacatctgaatcacatttggattttgaagagattactctggctgcagtgttaacatctctaaaggtaatttctgctttgcaagtccaataagcaggatcagtcttcagtcactggaagcagaagctggtgccttggcagccagatctgggtttgaatcctggcttcatgcctcacttctggcatggccttgggcaggccagcctttcagagccttagtttcctcatatataaaacagcggtaataatacctctttctgcgttgttatgaaagttacggaaattaaagtaaataagtagtcttgcttgatacacagcaaactctccttgggatattttaaagtagaaaccaactttgatactatgtatggcatgaaacagctaacatccaaaagggttgtataaactttcagcttgaggaaaacattcgccttcctacaggtctatagtttggaaatactgcacctacatttgtctctctctctctcttttttttttttgagacagggtctcgctctgtcactcagcctgcagtgcggtagcactcgctctgtcactcagcctgcagtgcggtagcacgaccatggctcacagcagcctcaacctgctgggctcaggcaatcctctggctttagccacctgagtagctggaactataggcacatgccaccacactcagctaatcaattttttttttctttttgtagagacaaggtcttactatgttgcccaggctggtcttaaactcctgggcttaagcaatcctcctgccttggcctcccaaagtgctgggattacaggcatgagccactgtgcccagccttactcctgtctctttaaaacaactaaaacacaataatcaaccaaccactcattccactgtttgcatacataaggtgctacagccatgccttctgattttggaatttatcagatgatagaccatggagagatgagcaaccagagaacaaacaaatgacaaaggagcactgcaaatatagaaacaaataagccactggctgtggcgtgagggcatttgttggttatgaataagagactgctgggtgtcatatttagccagcatggggctggtcagtaagccttctgtttggatcagtcaagaattcaacattgctttcatctcttgaatggcccggggccctgtcagaatataactccagggccagtctcaatggctcatgcctataatcccagcactttgggaggctgaggctggtggatcacttgaggtcaaaagttggagaccagcctggccaacatgctgaaacctcatctctcctaaaaatacaaaaattagtcgggtgtggtgtcgggggcatctgtaatccccgttacttgggaggccaaggcaggagaatcacttgaatacaggagacagggctgagattgcaccactgcactccagcttgggcaacagagtgagactccatctcaacaacaacaacaaaaacttcagttgacttcaggattaagtcaagggtcttgtcaaaatactcaaaagccagctttcagtggttcccactggccaatgatgagacaatgtgagcactggggatgtaaaatatattaaatacatttaaatccttgagtttgtaatagcactttaaaaatattgatcgcctagcctgggcaacatagcgacagcttgtctctacaacaaatacaaaagttagccgggagtggtggtcctagcttcttgagggggtgtgccgaggcaggaggaacacttgagcccaggagttcgaggctgtagtgagctatgattgtaccattgtactccagcctgggtgactgagtgagaccctgtctccaaaatataaatatagatatatctatatatctctgtctatatatattgatcaccactggaaggtgaaatgaagccaatacattattttgaaaatttgtgaataaaggaaaggaatcaaatatttatcctgcctttctgacatgtactataccaaataaaatggtagatgaggggaaattttttctttatagaaaatttgagctgataaatgaaggaatggtagaattagttttatttatttatttatttttattttttatttttttgagacagagtctcattctgtcacccaggctggagtgcagtggtgggatctcagctcactgcaacctccacctcctgggttcaagcaattctcctgccccagcctcccgagtagctgggattacaggtgcctgccaccatgctcagctaatttttgtatttttagtagagacggggtttcgccatgttggccaggctggtctcgaactcctgaccttagatgatcctcctgccccagcctcccaaagttgctgggattacaggcgtgagtcaccgcacccagccagaatggcagaattagaatatcagtattttctaatcattaatgaattaatgaatctagacattaatcatcaatggttaccaacatcatgaaaaagatatcctctcctcaattatgtccctcttgatggaagaacacaatgaaatgaatgcctgccccgcaaaaatactgaactggatactagtgaactagatctaactaccaatttttaggaaatagaacagagggacatgttaaatgatacagattatgagaaactctacagaataaagtgcccaattactaaaacaaatgaattataattaaaaaaaaagagatggtggagagacccaaagaaaccttatgagacatattacccagttgcaaggagtgggttcaaacaaactgtaaaaatctcattaaaatattgataattgccaacttaaacactagtgcgatatttgatgatctttaggagttattaacttttttttttttgaggcggagtcttgctctattgcccaggttggagtgcagtggcacaatcttggctcactgccacctctgcctcccaggttcaagtgattctcctgcctcagcttcccaagtagctgggactacaagtgcatgccaccatgcctggctaattttcatatttttagtagagacccggtttcgccatgtaggccaggctggtcctgaactcctgacctcaggtaatccacctgccttggcctcccacagtgctgggattacaggtgtgcgccatcgtgcccagcctattgttaactttttagatatgctaacggtatcatggctaagtttgaaagagataaagtttttattttttagggatacaaatggaactatgtaccatttagatgaatggtacgaaacctagaatttgctttaaaataataggagaggggatggagggttgaggtatttataaagcaagattagccatgggcttaatcattgctgaaagtggtccatgggctcatggtagtttgatattttccataatagaaaagtttaaaaacattcattggccaatctatctgtccatttcttttaatattaaaaacattaattattattagtagtattatattaatatgaagtctcactttgttgattcacccaatccctttcatgagagatgtggaggttggtcttggctgttaggaaacgtagattctaatccattcaacagcccagtgatttgagaacttcagctctctgggtctccctgtactcctttggaaaacgagagacgaagttgattgttgcagtggggatttgggtcctgcagtctggctgtctgggttggaattgagcttcgccataggtacccttgggtaaatttacttaatccctcagggtttcatcttcctgttttgtaaaatgtaaataacaataacgctcacctcgaagggttgttgtgaagattacatgaacgatttcatgtattcattccgtcaacattgaacacctagtctccagctctgcgaggggaatggggtggagtggcacagaaaatacgggggccaggctgtttagcgcctaaagggagagtccagatcacccatggtaaacacgaaataagatgcagtatttcaaatagctagaactgagacgaaaatacaacgcagcaatttgatggagagcaacttcgagaaaggtgagctgcaacattaactcggctgatctgggacagtctggcgggggaggtgacatctgagccccacctgacttagaggatgtcagctatggatgatccgggtttccacacgcagcagttctcaagccaggtgactgcaccgccctaaagttccctccacttttggcaatgtctggggatttttggttgccagcaatgggaattggggggtttgttcttgtatctagtgggtataggctaggaacgccgcccagtatcctacagtgcacaggacaccccaagcccccccaaattagctggcccaaagataaagagagaagagcaagggcaaaggtcctgcaggagtcagaaaggagcttgctgtgttcagaaaactcaaaatccagtgtggctgagtgaggacgacgaagaatgaggtagactgggctagactatggagcactttttacggcacggtgaggaatttggaattatactcaaagcagtggaaagcccttgaagagttttaaacagaaggggaaggtaacccatgtgaaacgctttgcatatataagcgctcaataaatactgtctattattaatattattatcaccattgtgtctaccctacttggctccagacccggcccatgcctcagcgaggccgcagtgactcctcctggccagcagagggcgccagcggacacttggctaccggccgcccagggcgggcctcctcttgccgtccccttcctcgtcttttcccctcaggagaagtcgggaaggtggcggcggcggcggcggttgtcccggctgtgccggttggtgtggcccgtcagcccgcgtaccacagcgcccgggccgcgtcgagcccagtacagccaagccgctgcggccgggtccggcgcgggcggcgcgcgcagacggagggcggcggccgcggccagggcggcccgtgggaccgcgggcccccggcgcagcgctgcccggctcccggccctgccggcctcctcccttggcgccgcggccatggcggccagcgcgaagcggaagcaggaggagaagcacctgaagatgctgcgggacatgaccggcctcccgcacaaccgaaagtgcttcgactgcgaccagcgcggccccacctacgttaacatgacggtcggctccttcgtgtgtacctcctgctccggcagcctgtgagtgcggggcggccgggcgggtgtcgggcccttcccgggaggtgggggagcgggcggcgggaccgggacccttccggggctgggaaagagccgggtgccgtgggaggcggtcgggggcggccgttgggcgccggctggcgggcgcggcgtgggaggctgcgggctggatgcgcagggcccgggcagccgggctggggatgcgttttcggttttgccgggcgagggtttacgttctgggcagccttcgtgggtgggacgtgggcggggttggggtcagggagggggcgaccggggcgagcgtccctggtctccgtcgagcctgcggccgccgccctcgctctccagctacccggggcgccgggctgtggggggtgggggaagacgctaggaggccgggggggaggtccatgcgggtcctttgtgtgccccgcctctcagcggcccgggagccgcggtgcggagcgaggcacctgctgggcgctcctgctgggggtcggggagaagctggggtgggagggagggacgcctgcctcgcccgtgccttttttctgggtcgagagtacctacgtaactgggaggaagcaggcacttaggaatagtagcaggatgaaagcatcttgatggcagatgtgaatcccctgggaaaagttcgaaaggattaattgcgggagggggaggcagaggagcagatttgaagctgtgggattttagttttatggtccgaagagagtgttgaggag

SEQ ID NO: 8806 - DNA, 6000 bp, Homo sapiens
agccatccgtcccatattccggcatttttcctttaacctatgtttgcagggttgtgagttgtgctgaatagtatgaaatgtgttattagtggacgcaccactgttgacctcagagcatgtgactagacagtgcaggaggagatgttgtcatgttactttggatataaaacgtccctaggtgaccttgtgggcctgatccacggtgaaaggtggggagagggtactggagcagggcagagggactggatgagcctgcatggggaggaaggcgtgactgagggaagacagctcagccccccaggggaaacctgagttcagtgttggggaatgtgaggacacaatggcggggcaggatggccctggcaccagcggtgctggggaccgtagggggccatgctttgtgagaggcaaacttggctccaaggatgtgaggctgggagcatggaggtgaaaaggccgagagacagtggggagctgaggcaggcagggcagagacggggggcccagcagggcctggggcaagaaattaaggatggggcagggtacctccagcaacttagtcacactgaggggatgggaggggtagcaagggactgggtggggacaaagtgacaagatggggagtagggaagtgggcactagtttgtgtgttaataggtcagcaagtcttttagagtcctgggaagtaaaataaaaattaaaacaacaaaaacaagccggacagggcagcacattcctgtagtctcagccactaggtaggctgaggtgggaggatcacttgagcccaggaggttgtgtctgagcctcccagctactcgggaggctgaggcaggagaatcgcttgaactcaggaggcggaggttgcagtgagtcaagattgtgccattgcaccccagcctaggcaataaggtgagactccatctcaaaaaaagataataataataaggggaaaactcagagatggaattacatgcaccaggtgtagtgtgagcaaaggattaacttcctgatacattcttgtttcccatatatatagctatcaaggtcatcttttagtaatgagttaagttctttcttttccaactcaaaatttgtctgcatctttacccaaatatccagatctgatactctaggcttgggctaatatagtggggtggaggaggcttgggttaaggtttaaagttccaagggctgaaccggaataaatggtgtatttatcaagggaagagcaaggcaaaaccagcaagtccaaaccatggaggcctcaaccgaggtgaggggaaaagttagggagccttaggaaagctctgaggagggaccccaattagggggaccgtagttagggtatgaggtttgtgagatcaggactggaattgctgcaagagaccctatgattgggtggcagcagcacgttgtggagatgagcctgcttcctcagcctcttcctcttgtcagaaccctttgcctctccctacacacgcacacacacatgcatgcaccatgctacagaaacctttctcagtcttgccattctctcaaattatgcgttggtcttcccttcatcttcagattctttaaagagtaatcaaagttcccacttctagcatgatgaagtgaggaggtcaacaaatctttccaaaatgtaactgtatagctggacaaaccatttagcattctgcaattttaccaaaggcacggcacaaatggggatgtgtttaagaatgaaagctggccaggcgcggtggctcacgcctgtaaccccagcactttgggaggctgaagcagaaggaccacttgagctcaggagttcaaaaacagcctgggcaacttggtgagacccccgtctgtacaaaaaaaaaatcaaaaaaggcatggtggtgcacacttgtggtcccagctacatgggaggctaaggcgggagaatcatttgagcccaggagattgaggctgcagtgagctgtgatcacaccactgcactccaacctgggcaacagagtgagacagaccctgtccctaaagaaaaaaaagaagaattaaagtgagccttggataagaccagcctgtgtccgtggcatctttgcccaggctgctacccccatttaccccagctgttgataacacacacagcggcccccagcagggcagcctgtggagataagctcccctgccacctcgctgcaggggctggaggcaagagtgaggaaggttttgatttgcagcatggctagttaaggtggtgatatcagtgaccaggaggaagaaaggccactgactcctagcctgaggctctgggcctttggagacgagcaaacgacctgcagattagtcatggatgtaagagggagctccgggaggtcggagagccagagggagcttagtaaactcttcacactacccaaatggactgaaggctcatagctggcagagattagagcaagcccaagccatgtccatatgcccagggcacacagcctgtgtgtgtgccggtgccagtgttaggaagtaaaagccggaacacccttgcaaatggcccggggcgtgcctcctccccattgcacatagatccagcagcagatggtggaaaccatattggctttaactgatgtttgactgacgaactatgcaaacaagaagcgacctctagggagtcagtctgaaaaattaaagcaaacaaatgccaacaataaaacttagcaatgacctgagtgagtgcacactgtggaggagacaggcttcctgcatggagtccagccaggagacagtacagaatgcatggagcagctattggaagacattgaaaactaaatagttgcaggcagctttcccaagaagaccagaacttgaagtaccaccaaaccggtggtgagataaccatgtttcccctatggcatcccgtgactaacctggcagtgggcaccagggtgcagatagaaagagctccagaagatgccctctatttctggctcaagtaacgggaaaagggtctcctaacattccgagggaatccagaagttcgttcctccccatttttcttttccctgttctctcatacctcagcccacaagcagtcccacagtggcactggcaccagccccaagaggagcccaggagccaagacgcaggagggaaccttctccaactgacagagctgtggtcccaagagggcagaaacaatccatgttgcttctcttccaattcagtcctcccactgcttggcttcagatgtagaaatgcatggtagagccagataccgaaagcctgttttctgcttggaagactaaaaagagaagcctcagcaaatgaaagcaacagggtaattgctgagagagagttaatcagtgaagcaaccccattaacctgtctataaaccccagggctcattcttgagctgctcctgcatagatctcgtcctgttcaacacaccaaagattgacagctgaactgagagaccatcacccacagacacaactggccactgggtggtgcacaagtcagacagaactgaatagtcctgtgaagactctggacactgaactgactttggaaccagactgcagaatggaggggtgggaacttgtggcttgaacctaatcaggtagattgcctggccaaaatgaaaatacctatcatctccataggatttaatttcattcaatgattttttttttttttagtaaatttgcagtgttttacagccttccccaaaatctaattccaaaatatctctatcaccccaacgagagactccattcacgttggcagtcacatgcactcccagatttcccctccacccagcccttggcaatcactagtctactttctgtgtctttgagtttgcctactctggatatttcatataaatgaaatgatatatgaggttttgtgattggcacctttaatttagaataatgttttcaaggctgattcatgttgtagtatgcattggtacttcattattttttatgcaaaagtaatattctattgtatggctataccacatttttctttgagacagagatctcactatgtcgcccaggctggagtttagtggctcttcacaggcctgatcacagctcctgcatggatcaaggagcatcactgcagctgcaaactgcagcttcaaactctccggctcaagcgaccctcctgcctcaacctccccagtagctgggcctacaggcacgtgtgtctgtgcccaataataccacattttaaaaatccatcttcagtagatggaaatttggattgtttccaccttttactaataaaaatagtactgctataaacattcatgtataggttttcttttgtttttgttttttcttttttgtagagatgggggtctcgctgtgttgcccaggctggtctcaaattcctggactcaagtgatcctcccatcaaaaactcccaaagtgctgggattacaggcgtgagccactatgcctggcctgtatacaagtttttgtgtagacatgtttacatccaattaatgaacacaggatgtctttccattgatttagctcctctttaatttccttcaacagtgttctgtagtttccagtctacaagtcttacacttttgggttaaatttattcataattattttattatttttgataatattataaatggaattgtttacttaattttacttgaattgttccttgctggtgtataagtagacatctcatttttttagttgacctcgtatggtacaatctctttgaactcatttattatcactgatagtttaggtctttttttttcgaggtttcattaaggttttctatagataagatcatgtcaagacaccctcagaccacagggcggcgccacgagcccggccgagtgcagctggagcgccgacgtcgccgaggatacacagtgctgaggcagaacgcaggttcgtcacagtgggcctccgtgggcggcgccgcacgctcgtcacagtgggcctccgccggctacgccgctgcttcagtggcttgcaggcactttcctcttggaagtggcgactgctgcggggctgagcggtgctcgcacgcgtctcgggagccaggttggcggcgcgatgaggcgcagcaaggccgatgtggagcggtacgtcgcctcggtgctgggtctcaccccgtcgcctcgacaggtgagtgggtctcgaagagagcgacggcggcctcgacccggccggggggggagggggggggcggcggcggcggcctcggcccggccggggggcggcggcggcggcggcctcggcccgtccggggggcggcggcggcggcggcggcggcggcggcggcggcctcggcccgggcaacgtccggatgaggggcggcggcggcggcggcggcggcggcggcctcggccccggcccgtccggggggcggcggcggcggcggcggcggcggcggcggcggcggcggcggcggcggcggcggccccggcccggccggggggcggcggcggcggcggcggccgcctcgatggctcaggcgtcatgtctcccgaggggcgctgctccgtggcgcgctctgttgaggcgccggccggctggcgcagtcctgtgggcggcgtggcgcttgcaagcgcaggaagagtcctggggggaccgcggcgggcgggagaccgttggcgccggcgcttcctcttaatcccggcttgttcccgacgcttgttcccgacggtgctcgctcctgggcccgtcctggcccgggctttctggccgatcgcgcaccccgtagtacccgcgcggcctagttctcgggggcttgggcacccgggtgctgtatcggcgggtttcttcccatctcctggacatttactttatatgctgcggcggaggtcgtacctccttggcctggaggaacccagtggggactgacgcagctccgggtgagctttggcggctgcgtcgagtgacaaggtaggcatctcagcgcggacatttgcaatggcccgacggcgcaaatgacacggaaagtccccttgttttgagtatg

SEQ ID NO: 8807 - DNA, 6000 bp, Homo sapiens
gaaccaggctggccggacgggtggctcatgcctgtaaactcagcattttgggaggcggaggcaggtggatcgcctgaggtcgggagttcaagaccagcctggccagcatggtgaaaccccatctctactaaaaatacaaaaattagctgggcgtggtggcgggcgcctgtagtcccagctactccggaggctgaggcaggagaatcgcttgaacccaggaggcggaggctgcaagtgagccaagatagtgccattgcactccagcctggtgacagagcaagactccatctcaaaaaaaaaaaaaaaagaaaagaaataggctgttaggaagtcctgtggagaaagcaggctataacaaatgaatctaacaatattacaaacgcatgatacagcctcactgaaagagttgcatggagaaggagctgacctaagcaactttggaagacagccttttgactggatactgtaaaactaaagaaaattgtatattaacacagtattctaggtagtaaatttgtttctcagtaattttgaaactacaagtataataaatacataaatatgttgtagataatgaaagtcggagtctcactctcagagaaaaaagttacaaataagcaaggggggaagttagaataagccctgtggagtagagtgggaggtatcagtatgaatgtgtgcgtgtctatgtatacacatgtataatacactaatctgtgtttagctatattttttcgctctgtcttctgagaagccctagaagcagtgacaccccagtatttctggagaaacgcctgagaaattctaggtctggagccaggaatacacaaaataaggctggaacatcttgtagcaccagaaggaaaagaaaggatggaggcgtgtaagaaggacatgtggtgggctgaataatggcccccaaatatgtccagatcctaatccccaaaacctgtgaatatgttacttacatggcaaacggactttgcaaatatggttaagaacctttagatgggagatgatcctggatgatctgggggcccgagggagtcacaatcgtccttataagagggatgtaggaggatcagaaagaggagaaaggaatgtgaggatggaaacagaggtcagagtaatgtgctttgaagaggaagaacaggccacgagaagttgctacctgtaataaaatgtcaaataagatctagaggcttgaggagaacctgaggttatctgtggagggtggaaggcttatgctgaagtggccccctgagagcagagatcaggagtaagggacgatctcctagtactcacttgcagaagtgacttaaagctgctaaaagggtgtgtgtcagggctttggcattctgccgcagacatagaaagacctgatactgttttgacttcatgtgtccctgtagccattcagcggccaacatttgtatagtactttatctttctcagcttatttctaattagcgataattaatactcttagtattaatacgagttaatttgtaattcttacaaaagagtgtgagataaatgagcatgtgctgtctttaatttccaaaggaggaaagcactctgtgccgtctgagctgcccgcgatccagtccctaagagggaccatcggcaggcggcttcctggctcttggggtccgcacaggcctgtggtagccctgtgagggtcggctcctgcatagaaccctgcctgacttcccagaggaggccatgagaaccgtcaagaagttcatggactcaggaggacgtcgtcagcagtgctgaggtcatggaatgtgggctgggaccttgtgtttggtgacgttctgtaagtactcggcttgctcaagctaactgcccggctgggatcaccgctctaggaggactcaagagttcagatgagtggcccaggggcccgtcagtgctgtgcacctcgccccccgtgggcgggggaggagcctggggacttggccagtcctggaggagccctgagaccaggccctgtggcgggcaccacggcacggggaggtgcctggagggctggagcccacttggggggccttggtcagtcggggctgcagaagcagagaaatgcggggtgcccatgctggctgggactcgcccactgccctgcacatggcgagtgagggagagaggcaaggcacctttccaggggtgcatgggaggctgcggtcaaaggtcctgcacacccgcatgcatgctcacatctgtagctacagacactgacccccagagacccccgagctcatgtggggctggtgtaggcgtggggtggacactggggcagtgtgggctcctcctcctcctctatgcgcgtgacggggtgggggtggccccttcccttgccctggaagctccggccccctccccaccctccctgtggccccagtagacagagccctggcccctgccttgggccaggtttggcagagggggccctggctggaaactggaggcagatggaggggagctggggttgcgggctggccgtgtcccctaacccctacacagcccagctctgctcctgctccgcctgggtgttctgcaggctggggtggaggtgctccaggactaccccacagcccggggccacacacccctggagcgatccctatctctgtctgcgccctggcctccttcctgccaagaccctgactgagtcaataggcttgactttcataaactggccaacaagattgagaccacacttggagtggaagatggggccgtcttaagcccttgccccctgcacgggtcagcctgtggccaacgttctgggccgagcctcctcctcttgctccacgctcttcccaccctgagaggggcctggtctgggtgggtctcctgggacccccagtgttcgaacatgacctgaaaagcagaaatggaggctgaagccttggcgaggaggccagcacttcccaatctcaccttccacagctgatgtgcagggccgggggagtgttggtaatcctcccaggacacacgtgtctgcatttaagggtgtgcctgacatgaaaggagatttattcaatgatgtttgctaaagactggaagcggactactcaggaccagtgcggtgggtgctgggaccagggcagtgggattttgcagtggtggagagagatttaggctccactctgaatatggctccagcaagtgggatttgatagcccaggagcagagtggggtcctcggatggaacatcactaagaacaaacagcaggggtggggggttctggctgaagggaggcagggtcattcgtcatcacctgggtgcccgaggacgagcaggctgccctgacgaggatgatcagatacggggcggggcagttctggctgaagtcacttagcagtgttcttgctaaaaccggattttgcaaggaagtgtgcaggtggcctagaaggttcaagggcctgatagagtttggccaagcaaagaatctcgtcactgagaattagaatcaagggcaggtggctaaatagtgccttgtagattctctccagcttttgcggcccctccctccacatcctgctctgggtagcccctatcctgcagccatgacccagattcctgaagaggggatgactacacaggggcctggatgctgggtggcggcctcaggggcgggaggcaccgggagaggcctggccggagagccccagggacccaggtcaggtcaggacccagtgtgtagcggagcttgggctcatgaggtcagagctggagccactgcacatcgtctcccagggccggggctcccagaggacatgcagtgtctgcagttttctggggtgcccccgtcctccgcgtggcactctgcgtgttggggggcctattgcgagctgctcatcctggcttcttgggagcagcgtggcctgagcaagggaggctgcccaggaccggcgcctgtggggcggggctggtcacagggtcttggtccccgagggctgattcctgctgaatgcttcaatggccaagggtggatccctctccttccagcctgaggctgtttcaggaagaaacagtcaggccccggcaggtttccctgcccaaggggagagtctgaggaggggccgactcggcaggtggagcagggggccactttcatcgagtttgtgttcagaactcactccagggtccttttcttttggggccaggcaggcagcaccgtgtgggacattattagcaaggagaggaggggcccgggagagctcacagggcgttttgggagctccgtagacaggcaggtcctgaggacttttggaaaggatagaacaaggtcccgggcagctttgtggtggtcgagagcgagggaggaggtggcctccctgagcgtggatggctggatgcaggccccagacccaggggcagaggccgagaagggaaggcgggggcccagggaccacacttggcagggtggagggggcagggggagccacttgctggggaaacttcaccggatgatctgggctgaggacgcgcgagtgtggaagaaacggcgcctcccccgtgccagatgctgcccaccaccggcacagggccagagttggggtcagcagggcagccgtgtgcccccagtgggagcttggaggtcacggaggaaatgcgagaccagatgcaggcaggggagtcctccggagcctgcaggagggggccgctggctcaggggcaccgggagacccccacatggacagggtggaaagggctttcttcaaagccaggatcttgtccccatcacagcgtcccgctacgcattgggagcgcttgctgccaggaggctccccagtcccgcagcagcccctcagcggctgccctccaaggaaggggcgcacagacactccagggctccacagcgcgcgggccaggggccccatctacccccggggcagcgggactgggcgtgagcccggcctgggacacagcccctgcgactgcaccattgttaggggccttctcggagctggcagacctagaaccaggcctagggggtgggggtgtgcctggatgtgtgttgcgggggtctgaacccttagttaggaccgggggccctcctttccacttcgtgcagtccctggggtctggggcatcctagccatgcgtggggcctccctgctgggattggagaccccctgacagctggggctggtcccagcattttcgctcttcccccagaaggactcagatgcagggtcttctctgctccccgtcacacagagggtggcacccccgatgggaactctcatttatcaccaaaccagaagataatggagaaactgacagagaagggctgcaagcagctaccgcagggcggtgtgtggatgcagatgggatgggcagatggaggcgggggccagcatcgctgccttcttgcccctcccagaggaccccaggtccccagctcgggcgccccaccagactggtaacacctgcgtctgctgtttggcaccgggggatgaatcacttgcttttctttcaacagtgttctgtagtttccagtctacaagtcttacacttttgggttaaatttattcataattattttattatttttgataatattataaatggaattgtttacttaattttacttgaattgttccttgctggtgtataagtagacatctcattttttttagttgacctcgtatggtacaatctctttgaactcatttattatcactgatggtttgtctttttttttttttttttgagctttcattaaggttttctatagataagatcatgtcaagacaccctcagaccacagggcggcgccaccagcccggccgagtgcagctggagcgccgacgtccccgaggatacacagtgctgaggcagaacgcaggttcgtcacagtgggcctccgtgggcggcgccgcacgctcgtcacagtgggcctccgccggctacgccgctgcttcagtggcttgcaggcactttcctcttggaagtggcgactgctgcggggctgagcggtgctc

SEQ ID NO: 8808 - DNA, 6000 bp, Homo sapiens
caacagatgcacacaccgccagtgcaaagctcatctgcttgtatgttctctcaggagatgtatggtcctcctgcattgcgttttgagtctcctgcaacgggaattctatcgcccaggggtgatgattactttaattacaatgttcaacagacaagcacaaatccacctttgccagaaccaggatatttcacaaaacctccgattgcagctcatgcttcaagatctgcagaatctaagactatagaatttgggaaaactaattttgttcagcccatgccgggtgaaggattaaggccatctttgccaacacaagcacacacaacacagccaactccttttaaatttaactcaaatttcaaatcaaatgatggtgacttcacgttttcctcaccacaggttgtgacacagccccctcctgcagcttacagtaacagtgaaagccttttaggtctcctgacttcagataaacccttgcaaggagatggctatagtggagccaaaccaattcctggtggtcaaaccattgggcctcgaaatacattcaattttggaagcaaaaatgtgtctggaatttcatttacagaaaacatggggtcgagtcagcaaaagaattctggttttcggcgaagtgatgatatgtttactttccatggtccagggaaatcagtatttggaacacccactttagagacagcaaacaagaatcatgagacagatggaggaagtgcccatggggatgatgatgatgacggtcctcactttgagcctgtagtacctcttcctgataagattgaagtaaaaactggtgaggaagatgaagaagaattcttttgcaaccgcgcgaaattgtttcgtttcgatgtagaatccaaagaatggaaagaacgtgggattggcaatgtaaaaatactgaggcataaaacatctggtaaaattcgccttctaatgagacgagagcaagtattgaaaatctgtgcaaatcattacatcagtccagatatgaaattgacaccaaatgctggatcagacagatcttttgtatggcatgcccttgattatgcagatgagttgccaaaaccagaacaacttgctattaggttcaaaactcctgaggaagcagcactttttaaatgcaagtttgaagaagcccagagcattttaaaagccccaggaacaaatgtagccatggcgtcaaatcaggctgtcagaattgtaaaagaacccacaagtcatgataacaaggatatttgcaaatctgatgctggaaacctgaattttgaatttcaggttgcaaagaaagaagggtcttggtggcattgtaacagctgctcattaaagaatgcttcaactgctaagaaatgtgtatcatgccaaaatctaaacccaagcaataaagagctcgttggcccaccattagctgaaactgtttttactcctaaaaccagcccagagaatgttcaagatcgatttgcattggtgactccaaagaaagaaggtcactgggattgtagtatttgtttagtaagaaatgaacctactgtatctaggtgcattgcgtgtcagaatacaaaatctgctaacaaaagtggatcttcatttgttcatcaagcttcatttaaatttggccagggagatcttcctaaacctattaacagtgatttcagatctgttttttctacaaaggaaggacagtgggattgcagtgcatgtttggtacaaaatgaggggagctctacaaaatgtgctgcttgtcagaatccgagaaaacagagtctacctgctacttctattccaacacctgcctcttttaagtttggtacttcagagacaagtaaaactctaaaaagtggatttgaagacatgtttgctaagaaggaaggacagtgggattgcagttcatgcttagtgcgaaatgaagcaaatgctacaagatgtgttgcttgtcagaatccggataaaccaagtccatctacttctgttccagctcctgcctcttttaagtttggtacttcagagacaagcaaggctccaaagagcggatttgagggaatgttcactaagaaggagggacagtgggattgcagtgtgtgcttagtaagaaatgaagccagtgctaccaaatgtattgcttgtcagaatccaggtaaacaaaatcaaactacttctgcagtttcaacacctgcctcttcagagacaagcaaggctccaaagagcggatttgagggaatgttcactaagaaggagggacagtgggattgcagtgtgtgcttagtaagaaatgaagccagtgctaccaaatgtattgcttgtcagaatccaggtaaacaaaatcaaactacttctgcagtttcaacacctgcctcttcagagacaagcaaggctccaaagagcggatttgagggaatgttcactaagaaggaaggacagtgggattgcagtgtgtgcttagtaagaaatgaagccagtgctaccaaatgtattgcttgtcagtgtccaagtaaacaaaatcaaacaactgcaatttcaacacctgcctcttcggagataagcaaggctccaaagagtggatttgaaggaatgttcatcaggaaaggacagtgggattgtagtgtttgctgtgtacaaaatgagagttcttccttaaaatgtgtggcttgtgatgcctctaaaccaactcataaacctattgcagaagctccttcagctttcacactgggctcagaaatgaagttgcatgactcttctggaagtcaggtgggaacaggatttaaaagtaatttctcagaaaaagcttctaagtttggcaatacagagcaaggattcaaatttgggcatgtggatcaagaaaattcaccttcatttatgtttcagggttcttctaatacagaatttaagtcaaccaaagaaggattttccatccctgtgtctgctgatggatttaaatttggcatttcggaaccaggaaatcaagaaaagaaaagtgaaaagcctcttgaaaatggtactggcttccaggctcaggatattagtggccagaagaatggccgtggtgtgatttttggccaaacaagtagcacttttacatttgcagatcttgcaaaatcaacttcaggagaaggatttcagtttggcaaaaaagaccccaatttcaagggattttcaggtgctggagaaaaattattctcatcacaatacggtaaaatggccaataaagcaaacacttccggtgactttgagaaagatgatgatgcctataagactgaggacagcgatgacatccattttgaaccagtagttcaaatgcccgaaaaagtagaacttgtaacaggagaagaagatgaaaaagttctgtattcacagcgggtaaaactatttagatttgatgctgaggtaagtcagtggaaagaaaggggcttggggaacttaaaaattctcaaaaacgaggtcaatggcaaactaagaatgctgatgcgaagagaacaagtactaaaagtgtgtgctaatcattggataacgactacgatgaacctgaagcctctctctggatcagatagagcatggatgtggttagccagtgatttctctgatggtgatgccaaactagagcagttggcagcaaaatttaaaacaccagagctggctgaagaattcaagcagaaatttgaggaatgccagcggcttctgttagacataccacttcaaactccccataaacttgtagatactggcagagctgccaagttaatacagagagctgaagaaatgaagagtggactgaaagatttcaaaacatttttgacaaatgatcaaacaaaagtcactgaggaagaaaataagggttcaggtacaggtgcggccggtgcctcagacacaacaataaaacccaatcctgaaaacactgggcccacattagaatgggataactatgatttaagggaagatgctttggatgatagtgtcagtagtagctcagtacatgcttctccattggcaagtagccctgtgagaaaaaatcttttccgttttggtgagtcaacaacaggatttaacttcagttttaaatctgctttgagtccatctaagtctcctgccaagttgaatcagagtgggacttcagttggcactgatgaagaatctgatgttactcaagaagaagagagagatggacagtactttgaacctgttgttcctttacctgatctagttgaagtatccagtggtgaggaaaatgaacaagttgtttttagtcacagggcaaaactctacagatatgataaagatgttggtcaatggaaagaaaggggcattggtgatataaagattttacagaattatgataataagcaagttcgtatagtgatgagaagggaccaagtattaaaactttgtgccaatcacagaataactccagacatgactttgcaaaatatgaaagggacagaaagagtatggttgtggactgcatgtgattttgcagatggagaaagaaaagtagagcatttagctgttcgttttaaactacaggatgttgcagactcgtttaagaaaatttttgatgaagcaaaaacagcccaggaaaaagattctttgataacacctcatgtttctcggtcaagcactcccagagagtcaccatgtggcaaaattgctgtagctgtattagaagaaaccacaagagagaggacagatgttattcagggtgatgatgtagcagatgcaacttcagaagttgaagtgtctagcacatctgaaacaacaccaaaagcagtggtttctcctccaaagtttgtatttggttcagagtctgttaaaagcatttttagtagtgaaaaatcaaaaccatttgcattcggcaacagttcagccactgggtctttgtttggatttagttttaatgcacctttgaaaagtaacaatagtgaaactagttcagtagcccagagtggatctgaaagcaaagtggaacctaaaaaatgtgaactgtcaaagaactctgatatcgaacagtcttcagatagcaaagtcaaaaatctctttgcttcctttccaacggaagaatcttcaatcaactacacatttaaaacaccagaaaagggtaagtactttgttgttaaagttaagcacaatttttctttcttttaatgtttagcttgatgcagactctttgtaggatactaatgttgggatataaatgatgctttgtgaacacccccaaaatatttgagcaattttttttctcccttaataagttcacggtgaggtttcaaagagcaagagaacttagtttaagacatttcagtaactggaagatacttttatcatgctagggcagagcaaaagaactcggtacggtatacggactcatgcttgaatcatgcacattaacgtgagtctttttttaaagtgttcattttcatttgttcagtttcttttgtcactcagaaaacatgatattgaggctgggcacggtggctcactcctagaatgccagcactttgggaggttgaggtgggcagatcacttgagctcaagagttcgagaccagcctggccagcatggtgaaaccctgtttctactgaaaatacaaaaatgagccgggcgtcgtggtgcgtgcctataattagcagctacttaggaggctgaggcaggaggatcacttgagcacaggagatggaggtagcagtgagctgaaatcatgccactgcactccagcctgactgagtgactgagactttgtctccaaaaaaaaaaaaacaacgtgatattgagatgttctcattttatatgttgtatgtcagtcttgctcatgtattaaatgagcaaagaatgaaactacagggataaatgaatatgtaagacaatcagattggtggtataaattgagggattctggctttttatgttttaaaagcatattcattttgtttcctaaaatgttaaaaaacgaaatattctttattttctaggatttaattttagcctttttaaatctaatcccat

SEQ ID NO: 8809 - DNA, 6000 bp, Homo sapiens
atgcttagccatccgtcccatattccggcatttttcctttaatctatgtttgcagggttgtgagttgtgctgaatagtatgaaatgtgttattagtggacgcaccactgttgacctcagagcatgtgactagacagtgcaggaggagatgttgtcatgttactttggatataaaacgtccctaggtgaccttgtgggcctgatccacggtgaaaggtggggagagggtactggagcagggcagagggactggatgagcctgcatggggaggaaggcgtgactgagggaagacagctcagccccccaggggaaacctgagttcagtgttggggaatgtgaggacacaatggcggggcaggatggccctggcaccagcggtgctggggaccgtagggggccatgctttgtgagaggcaaacttggctccaaggatgtgaggctgggagcatggaggtgaaaaggccgagagacagaggggagctgaggcaggcagggcagagacggggggcccagcagggcctggggcaagaaattaaggatggggcagggtacctccagcaacttagtcacactgaggggatgggaggggtagcaagggactgggtggggacaaagtgacaagatggggagtagggaagtgggcactagtttgtgtgttaataggtcagcaagtcttttagagtcctgggaagtaaaataaaaattaaaacaacaaaaacaagccggacagggcagcacattcctgtagtctcagccactaggtaggctgaggtgggaggatcacttgagcccaggaggttgtgtctgagcctcccagctactcgggaggctgaggcaggagaatcgcttgaactcaggaggcggaggttgcagtgagtcaagattgtgccattgcaccccagcctaggcaataaggtgagactccatctcaaaaaaagataataataataaggggaaaactcagagatggaattacatgcaccaggtgtagtgtgagcaaaggattaacttcctgatacattcttgtttcccatatatatagctatcaaggtcatcttttagtaatgagttaagttctttcttttccaactcaaaatttgtctgcatctttacccaaatatccagatctgatactctaggcttgggctaatatagtggggtggaggaggcttgggttaaggtttaaagttccaagggctgaaccggaataaatggtgtatttatcaagggaagagcaaggcaaaaccagcaagtccaaaccatggaggcctcaaccgaggtgaggggaaaagttagggagccttaggaaagctctgaggagggaccccaattagggggaccgtagttagggtatgaggtttgtgagatcaggactggaattgctgcaagagaccctatgattgggtggcagcagcatgttgtggagatgagcctgcttcctcagcctcttcctcttgtcagaaccctttgcctctccctacacacgcacacacacatgcatgcaccatgctacagaaacctttctcagtcttgccattctctcaaattatgcgttggtcttcccttcatcttcagattctttaaagagtaatcaaagttcccacttctagcatgatgaagtgaggaggtcaacaaatctttccaaaatgtaactgtatagctggacaaaccatttagcattctgcaattttaccaaaggcacggcacaaatggggatgtgtttaagaatgaaagctggccaggcgcggtggctcacgcctgtaaccccagcactttgggaggctgaagcagaaggaccacttgagctcaggagttcaaaaacagcctgggcaacttggtgagacccccgtctgtacaaaaaaaaaatcaaaaaaggcatggtggtgcacacttgtggtcccagctacatgggaggctaaggcgggagaatcatttgagcccaggagattgaggctgcagtgagctgtgatcacaccactgcactccaacctgggcaacagagtgagacagaccctgtccctaaagaaaaaaaagaagaattaaagtgagccttggataagaccagcctgtgtccgtggcatctttgcccaggctgctacccccatttaccccagctgttgataacacacacagcggcccccagcagggcagcctgtggagataagctcccctgccacctcgctgcaggggctggaggcaagagtgaggaaggttttgatttgcagcatggctagttaaggtggtgatatcagtgaccaggaggaagaaaggccactgactcctagcctgaggctctgggcctttggagacgagcaaacgacctgcagattagtcatggatgtaagagggagctccgggaggtcggagagccagagggagcttagtaaactcttcacactacccaaatggactgaaggctcatagctggcagagattagagcaagcccaagccatgtccatatgcccagggcacacagcctgtgtgtgtgccggtgccagtgttaggaagtaaaagccggaacacccttgcaaatggcccggggcgtgcctcctccccattgcacatagatccagcagcagatggtggaaaccatattggctttaactgatgtttgactgacgaactatgcaaacaagaagcgacctctagggagtcagtctgaaaaattaaagcaaacaaatgccaacaataaaacttagcaatgacctgagtgagtgcacactgtggaggagacaggcttcctgcatggagtccagccaggagacagtacagaatgcatggagcagctattggaagacattgaaaactaaatagttgcaggcagctttcccaagaagaccagaacttgaagtaccaccaaaccggtggtgagataaccatgtttcccctatggcatcccgtgactaacctggcagtgggcaccagggtgcagatagaaagagctccagaagatgccctctatttctggctcaagtaacgggaaaagggtctcctaacattccgagggaatccagaagttcgttcctccccatttttcttttccctgttctctcatacctcagcccacaagcagtcccacagtggcactggcaccagccccaagaggagcccaggagccaagacgcaggagggaaccttctccaactgacagagctgtggtcccaagagggcagaaacaatccatgttgcttctcttccaattcagtcctcccactgcttggcttcagatgtagaaatgcatggtagagccagataccgaaagcctgttttctgcttggaagactaaaaagagaagcctcagcaaatgaaagcaacagggtaattgctgagagagagttaatcagtgaagcaaccccattaacctgtctataaaccccagggctcattcttgagctgctcctgcatagatctcgtcctgttcaacacaccaaagattgacagctgaactgagagaccatcacccacagacacaactggccactgggtggtgcacaagtcagacagaactgaatagtcctgtgaagactctggacactgaactgactttggaaccagactgcagaatggaggggtgggaacttgtggcttgaacctaatcaggtagattgcctggccaaaatgaaaatacctatcatctccataggatttaatttcattcaatgatttttttttttttagtaaatttgcaatgttttacagccttccccaaaatctaattccaaaatatctctatcaccccaacgagagactccattcacgttggcagtcacatgcactcccagatttcccctccacccagcccttggcaatcactagtctactttctgtgtctttgagtttgcctactctggatatttcatataaatgaaatgatatatgaggttttgtgattggcacctttaatttagaataatgttttcaaggctgattcatgttgtagtatgcattggtacttcattattttttatgcaaaagtaatattctattgtatggctataccacatttttctttgagacagagatctcactatgtcgcccaggctggagtttagtggctcttcacaggcctgatcacagctcctgcatggatcaaggagcatcactgcagctgcaaactgcagcttcaaactctccggctcaagcgaccctcctgcctcaacctccccagtagctgggcctacaggcacgtgtgtctgtgcccaataataccacattttaaaaatccatcttcagtagatggaaatttggattgtttccaccttttactaataaaaatagtactgctataaacattcatgtataggttttcttttgtttttgttttttcttttttgtagagatgggggtctcgctgtgttgcccaggctggtctcaaattcctggactcaagtgatcctcccatcaaaaactcccaaagtgctgggattacaggcgtgagccactatgcctggcctgtatacaagtttttgtgtagacatgtttacatccaattaatgaacacaggatgtctttccattgatttagctcctctttaatttccttcaacagtgttctgtagtttccagtctacaagtcttacacttttgggttaaatttattcataattattttattatttttgataatattataaatggaattgtttacttaattttacttgaattgttccttgctggtgtataagtagacatctcatttttttagttgacctcgtatggtacaatctctttgaactcatttattatcactgatagtttaggtctttttttttcgaggtttcattaaggttttctatagataagatcatgtcaagacaccctcagaccacagggcggcgccacgagcccggccgagtgcagctggagcgccgacgtcgccgaggatacacagtgctgaggcagaacgcaggttcgtcacagtgggcctccgtgggcggcgccgcacgctcgtcacagtgggcctccgccggctacgccgctgcttcagtggcttgcaggcactttcctcttggaagtggcgactgctgcggggctgagcggtgctcgcacgcgtctcgggagccaggttggcggcgcgatgaggcgcagcaaggccgatgtggagcggtacgtcgcctcggtgctgggtctcaccccgtcgcctcgacaggtgagtgggtctcgaagagagcgacggcggcctcgacccggccggggggcggcggcggcggcggcggcggcggggggggcggcggcggcggccgcctcgatggctcaggcgtcatgtctcccgaggggcgctgctccgtggcgcgctctgttgaggcgccggccggctggcgcagtcctgtgggcggcgtggcgcttgcaagcgcaggaagagtcctggggggaccgcggcgggcgggagaccgttggcgccggcgcttcctcttaatcccggcttgttcccgacgcttgttcccgacggtgctcgctcctgggcccgtcctggcccgggctttctggccgatcgcgcaccccgtagtacccgcgcggcctagttctcgggggcttgggcacccgggtgctgtatcggcgggtttcttcccatctcctggacatttactttatatgctgcggcggaggtcgtacctccttggcctggaggaacccagtggggactgacgcagctccgggtgagctttggcggctgcgtcgagtgacaaggtaggcatctcagcgcggacatttgcaatggcccgacggcgcaaatgacacggaaagtccccttgttttgagtatgaggtgtttgtcgctgtccctttgtaagggtccagctccactccactcctcatactcacctccctcgcccccctccccgcccggaacactttggtagctgcctttgcttaaaaaaaaaaaattctaaagttcttacaaatcgttagtatggcttgcaatttttaaccttttccacagatgttttaagggtatttttcctctttacatgtaaataatgctgagattacaggtgtgagc
